United States Patent Application Publication US 2011/0191912 A1 - sequence listing, part 10

SEQ ID NO: 11337 - DNA, 3000 bp, Unknown
  misc_feature (1)..( 3000): cDNA_ID_2717289_gDNA_ID_2214490_Annot_ID_183639 3000 nt of promoter + ATG
gtaatttttatctaacttataaattcagttaattacattttcgttatttgtcacttcttattgcatggacgtttgtaattggcttctctctaaaagactaaaattggtttttttttttttttttttaattatcggattgggcagaagcaaaagctggctctagcaaaacagttgaatctaagggcaagacaagttgaagtgtggtttcagaaccgtagggcaaggtaaagaaattatctttattttctaggggtattataggaaatttggtttcacagaaccttagtaattgctatgatggggatataattgtccttttatgacccaaaagcgatttcagttccctgtcctaaaagaaaatcctaataagatctctgcctctgtactgtcacatggagtttcttactttttactacagccttaaagacacatgcatgcgtatgcgtacaaataaaatctacttttgtccttttttgtttcttatcagttttaaacttttatttctgttcacttcactaattaaggtgattttgatttattatttgtacgtacattaggacgaagctgaaacaaacggaggttgattgtgagtatttaaagagatgttgcgataatctgaccgaggagaatcgacggctgcagaaagaagtgtcggagctgagggcgttgaagttgtctccacatctctacatgcacatgactcctcctactactctcaccatgtgcccttcttgcgaacgtgtctcctcctctgccgccactgtgaccgctgctccttccactactactactcctacggtggtggggcggccaagtccacagcgattaactccttggactgctatttctctccagcaaaaatcaggtcgctagggaaggagtatcttcggtagttttagcttagaataaagatatgagtatgaaagtttcaaagattagcttctatctattgaaaatgaaaacaaagattagtctcaattcaaagggttcaatttgaggctctaattctgaatttgttttaacctgtaaaaggattaccctttttagaattcagttttgtgagtatatttgattgtttattacctctaaaatcatgagagagatcttctaggggttgtacgtaataaaacattaatgggcttagataaagattaaccaacaaaaaatcatggtgggctttttgccggcattactctgttatgcatagatgttctttctcctcctttgttgggttataaaaccgagagacttcgaaacccaccgatggtattgggatccatatttccaaactgtctgtctgaggatgtggatatttgggtgatgttgaaactctcaagtcattttatatgaggaattttcaaacatcagttttaatgaaacaaagaatgttccaattggaacataaatatcataacaaatgaaattatcaataaatagaagtaataaagaatcgtaatacctaatcaatcaaattattggttgggtccaaatgagcgtctcgtcaagttactcgagcctcctctttttttcttttctttctgccttctttggtttactcgtcaaagtctcatctcactaaaaataagtttcatctaaacttctctaaagtattttctatgggggtgaaaacgttaaactgaaagtgtagtgaagaagttgataaaaaaggaaaggagttgtacaaagggatgcagattcctatattcaacatggtcgacatatatctcctttctttctaatttcagtactttcaaaagagtaacttttaagtttttattaaagaccagtctcttaatgttcaattcaaccaaaataatataaacttataattgtatatatatgaaaatcaaactgttttcatgagtttgtgcctaattgaatagatttcaactaaacctcaataccagatttaaatgcacaatattataacaattgttcagtgtaacatttttttttcctaaagcatgaaaaagaagaaacaaacaacaatggctgaattttggatcataacgtttttatggttgagataaatgaaattctcctgacaacattttactatttaatggagtaacaacaaagagaaacaatatggaaataccaatctgtattaaagttaacactaacaaaagaaaaaatcaatagtcttaaaatgtaattgcggtaaaatatattgaaacattgtaataatgtataatggtattcaaatcaataaaaatgcagaaaatcaaattgtaattaaaaggtaaaaaagataaaaaaaaaagggaggtgaattaattctgctgcctctctctctatcatattcgtatatatgagctgtgttttcatcacacgaagccctcttctctcttgtctcttctcctctaagccccgacctggaattttccaattccttcatcatcatcttctctctctatctctttgtgccgcacgaataaaggaagagagagtttaacggaattactttgagactttgagagaggtcttttggtttcttatacagttttcgggtttggcttcaattctctccgaccatcactctctcttctttatcctctcttcactttcaaattcccattgaccttcttctcatcattgtgagtttaatgtcaatacaaatctattgacgaagaaaggtcagagattttgcttctctattcgagggtttttgcgttcgttgagctctttgaattcggttttaatctaatcgtatcgtgtaatgtgttgttgattcgatatggttactaggttttgaaaagactctgagccttccaagtatctaaattgcttaaaatcgggggacgaaaggtttggttgtgtttgtttgctattgaagatctctgtgtcttcgtttgattatgcccttttaaggaatttgtgatcagcgttttaaaggttgagactttagagatatataaagcctgaagtttcgatttttatttcggtaagctgcaagaggatttgttgctgttttagaggattatctgatcaaaggtaatg

SEQ ID NO: 11338 - DNA, 3000 bp, Unknown
  misc_feature (1)..( 3000): cDNA_ID_3039583_gDNA_ID_2214490_Annot_ID_183642 3000 nt of promoter + ATG
aagagctgatgatgtattgatgtttcagtacattgcatatttaagaatgtgaaattctggaatgaagcgtgtgaatggtgtgggagagagtgtagaagaagtaaagcaagagattcaaaggaaatagaagaagtggtggtcacgtgggaaatgggaaggggttcacgtgggaagttgccaacgtggcagaacatggtccccagtgaccacactcgtgcggcgtaatttttgttcctccacgaccagacattcacttctctttaatcattggatacttctctcctcctccgactcgatggttcctaacaattccacgcgctcactctcgcgtaatttttcctgtaaaaatcgctgtgatttttttttttttttttttaaatcgttgagagaatttaaagaagagaacgttagaagatactcgataagatctttagcaaaacaaaaaactcaatatattaatacacgtaaatatgagttaaattgtggatatgagtatatttacaatatggtttgagttttgttataactgtatggcgagggaattaatttaaagatatcagttcggtaagagacagctacgaacaggatccggtgaaaaccggccaaagcaaccaaagcccatgttgtaccaacaacgagagtttctgaggtaatcatgcatgaatataaatccttatcatacttacttaattcaagagttcaataattttgatacatctacatttttaaaaagaagatacacaatttggtcccacgtgtgtgtccataaccatgtgcatttataattatacatatattaatgtaaagtatcaatttatattctgttattagcaaaaaaaatatatataaattttgatctttgctcaacatttttttttgacacggtaacaactaacaactgaaatctgttgctcatcggcatatttttattcgtataaatcactcactatcaatgacgtcaaaaagaaaagaaaatcattcaaccatagttctactgtttagtccatccatcaatgttattgcttgctgagccaatttaatcattacaaaataattatgatattttcacgtaccacatgattgtatcgacgtatctaacaatttactcgaaatcattacacatgtccacgtgggaagcccgtcacttattttggtccgttccaagatttgattgattcttataatttattatttgctatccgtgcaatctgtattaataataacatatgctacgttttgaacactaaaacatagggatacgctggaaaggtgtgtaagatattagaatttcagaataacagctgttcacatgcatgcagaaattatatttataaacagagatcataaaggcatacataatctaagtagcatttataagaactaaggtgatcgatcgaacactgaattgaattatatcagaatgaacttgccgccttatcggtgcttttttaaaaagtcgacgaaatatctagtgaattgatccgatagaaaaaagatgtctttagatcaaatcgttcgacaaattttttctttcaaatatataaatcctagacaaaatatatctcaaaacgtctggactctggatagttcaactagctagttaccaaattaaaatcttttgaaataagactttactatggtataagttttaaatggtgacggtcacaagatgaatcgtatatgaaactataacacaattgaatgctgttttgttttttgttattgacagttttcggattcgcaacttgtaaccatctgaaccctaatattaatcatagttaaggactgaaaacaacagcatcgagcgtatttccgttgaacaatctttacgaaatccaaaataaataaataaagttaaaaagcagaaagtttcaagattcaaaaaaaaagttagcgaggagacatagcgagtgagagccacgtgactaagatgtgtaaagaatggagtgaggagaaaaaaaaaacagacaaaggacttaaaattaaattagatacgccagcgtttcacgtgggaagtcacgtgattgagtatccacgtgtcaatcccacaagtgaaataatagacgggttcccattgtcctaccttcgcaccacccccgcgcgtgtctctttgcctctctctcaccggacaccaatcatttgatgcgacacgagcttcttctacgtaattacatttataccccttagcctcctctcatgatgttatgatcacacagcctcgatccaatgcgttttggattgtgtgtgggtgtccagctgttatccatgtgaattgcacgtgatctcgctttgtttgagaaattagatttcattgcactaaaattggtagagagacaattagaacttgagtgatggataattcgtcttttcttaagacgatatctatttaactatattagacttatgaacaaaactaaaaatttcatttgaaatgtactatcgctcaagatctcaaggccttcatattgttctttttttttttaatcaaaattttaagtaatatcaattataagtggtttttagattatagatttttggttttggtctttggattttacacaaaagaagaaataaaataaatggaaaaatatataaaataaataaattcaaatggtaattctaaaaactagtaaatatggtttttggattttgggaaagaattgacaaaatctctttaaatctagattctctaatttttaggaaatcatttttattataatcttgaatgagtaacaaattgtttttttccaaaatcaaaaactaaaaaccatttcagaatctacaaacaataaaaaagtcttaatatttgcatataagtcaaactggtggtatctgggttaaacttaacaaaatgtgttgggcctaaataagctcaattaaaacgggccttttctcaagtacaccggtcaaaatcaaattttatccacaaggagtcgcttttggcttatccactgaaacaaagagactcgttggattcgtgaagccgaaaaaaaaaaaaaa

SEQ ID NO: 11339 - DNA, 3000 bp, Unknown
  misc_feature (1)..( 3000): cDNA_ID_3039596_gDNA_ID_2214490_Annot_ID_183636 3000 nt of promoter + ATG
cctccatgaggtattgaaggaaggcactgatgtgtgtttgatagaccagattgcatcagttcatcactgtcccaaaactattgtgcttggatttagcaagggtggagttgtgatgaaccagctcatgagtgagatcagttccttggataccaactttgcgaaaacttcatctgcaatggtagaagaatctaccagccagcatgaaaagattcagatcattccagcctccaaagaaagcttcctcaacagcatttctgaagttcattatatagatgtaggactgaactcttctggtgcctacattactgatcacaatgtcgtgcagagaatctcccaacgccttgcacgaggtgcagactcgctacgcattgtcattcatggaactcctaggcagtggtgtgatgagctgcgaggctggattcgcaaggaaaaagatgagttggttcgtttgctcaaagctgaaactgagaattccggtgggaaactacaggtctgtgaaaggttctatttttctgatagacttgctgatttgcaaatgcactttgagataattgatgctatggatgtctcctaaccattcgcatgataaaagacacataataatacattgcaaaatgatagcaacttaaagccgttttatcagtacaaaaaccaaaacttttttttttttaaagacttccaaaaacaaatggtaagagaaactaaagaagacttgttctttaagatgacaccagcatcagagtaagtgagaggcttttagacggatcatattgttaccacagaatcactcttccatggcttcgttttgaacagacttcttttcggaaacatcaactttgatcttctgtgccccgggagcctggaccatatgaatgttctgatcaagttctttcatatcgtcattgagtttcttctgcttgtttggcttcaacctaagtcccatacaaaaaacaaaaacaatcataatcaaaaacagagtctagttttaaaatcatacaagcagtgttatcaaggatttgcaggagactagaagaagaagaagaaggaatgtatacctattttcgatatgtttggcttcccttgcggttctgatcttagcaatcttcttaatggccatgagtgtattctctgtaacgttcctgtcgtatctctcaggtctgtttctcttcttctcaaactcaaatgttgtatccttttagggtaaagtaaacaaagaaagacaagcaggagggtcagcatcaactagacaaccccaaggaaacaaagaaaaacttttgctcaaatgaacacgtaccttagtcatgtccttcccgtgtgcagctctgaatgctttagtccatttcactttacgtgggtttctcttcatcttgaagttcttgtgacacttcgacctacagaaccggaatatctgcaaaggagaagataccatgcttgtaagtgaattacaataacgcataagaaacaaagctaatcgataacaagacatacaaacaataaggtgttttgattaacatttatgctcaaatttttatcagaacatttgtaaacctcttatatactaaactcctagctaaagacacataaacatattgtaagaatatacaaaatggtcatttttttagctaaagactcacacaaataacgacatatatcaaaaattgttcatttaagctagagaatacgagcaaggagacattcacatatatagaatctaagagtactatgtaatataaaactcaagcaaactatttactgtgaattaaagcaggttgataaagatttatgccaaattaattaccttggcatcgttacggacaaattgaataccatgaccaggatatattgtggaagagcaaaaccaacacttctccaatctcatattgcctcgtcttgaaaaccctacaaaagactgttgcaaagttaagacatgtaaaactgaaactcagaccacaaaattgacaacaaacaaacaaaaaaagaggatactttcccagaaataaagtcgcttacttatagtaagagctaagaagcagaagacaaagtttcaatttttctctaattacacggtttcaatgaacagatattcaattatactactcaaaaattagtctagatttcaacaaatatgaaaaaatcataacaaagagaacaccaaacgaacgagatgggattaggactttgagattaagcggcaaacctgtaggtgattcttctaatttgcgacggcgatttcaggaaaagggttttgctttagagcccccctgcagaaaaaaaggtctaaagagaagaagatgactacttctaagaaatctcttagggtttatgaaacgttaacataaatttctaatttgaggcccataacctaacattgattccggcccattagttgttatgttttgtctgcccattaatgcggtaattacggcccaaatattcaattttggattccttattatattatatagtatctcgatcctttcatataatatgtaaaaaagttgtaaataaatatgcaagtccatttaattttgttttcatataagaaaacttttaattgcatatatattgttatttgaagagttttagataaaacttttattgtcaatcgataattttcatgttcatggttttgtatcagattactgaatgagtttagtcattaaaaatcttagaaatcaaatatgtaaaatatacaaaagacacacatagaagcatggaacccatctgttgcaagagaagaaaccaacatgatatgtaatttggttttatttaatttatttccggtttaatgtcttgttaaccggttaagtgatttaggttttcaatttgtctctttatagccttacaagtttaaccaatcaaaaagaacaattttctcaaacgagcccaggatcttcgagctgataattctattttctcaattcatcttctaagacttgtggtttctccttccttggagttcacagagaattgggatttatcctcccttgtccggtttct

SEQ ID NO: 11340 - DNA, 3000 bp, Unknown
  misc_feature (1)..( 3000): cDNA_ID_3039601_gDNA_ID_2214490_Annot_ID_183632 3000 nt of promoter + ATG
gttgaaattccccgagtcaccagcaactagctatgcaggcagggacttgatacaggctttactggtgaaagatccaaagaacaggttagggacaaagagaggagcaacggagataaagcagcatccattctttgaaggtgtgaattgggcattgataaggtgtagcactccacctgaagtaccgagacagatggagaccgaaccgccaccaaagtatggaccgattgatccggttgggtttggtagtaatagcaaaaggatgatgggaccaccagcagtatcagcagcagcagcagacacgaaatctggtggtaaatttctagactttgagtttttctaaagcttccaagatttggttccgtagtagccatttttagtcttttatctatgtcgttatatattgtaaccacgcctctagctttaatagatcaagagtgagggtttaattcttatagtaacttaggtcttgtttggtttttgtatcggagattaaaatcttcttccatggaaccaaaacttttgtaaggacatggaaagccccaagtcgaaattatttaagataatctcctttggtactagtactgctaggtttctcggaatcctttttctacacatagcaactaatagatcgtaatgtcaatgtcaatgtcactgccatttttgggtacatctatactatatgaacatttttgtggtcccaaacggtactataatctaaaaccaatcaacgatccaaaatgttatctttcttttttgtatattctaatcccaaaactgaactgattttggcattcgtgtgttttgtttcgtttaaaagagtcggcataactattgcttgatagtctatagtctataccaagaagaaccccatccatgtgcttcagacaaagaagagagaaatgatgacttgtcagatcctaactcttatctctcagggaatccgatgaaaacggaccccatagacttttacataaattctaccgaccagtttcatgccaaaaagagacaattcgaggccaggtcctagattgtaatcatcaccttatatcacttatacatatgattaacgaacaagcatgagattagtctttattcatttcattagaacatgtagctgggaactacatgaacaaaaaatccccacatttcataacaaaaaagaaaagccaagtcctagggaatagggatcatataggtaaaacgataaaaggttatactatgatacacttttttcatttatacgttaattaatgactggattagtgttttctctataatcttctcagctatagtatttaactaattaaacaaggaatagtttctacagtgattttctttaaataaagacttatgttgaaagaaatcaaaatagtaaaccatagttgaaacaaaacatccattttaataacacatttcgtctttttaatgtccaaagcagccatcagccatgtggattaattggtgctttatgataagactccaaatcgttgcgtaggacgttggtcttattattactccacttgatttttgattaagccgactttaacgggcttttccacaaggcatcacctacttgtgccttggcccattatcaaaaaacctagtagaatattctcacgtcatctttcccacgtatatgtgcacgacgtttttgttattttgtacgtaaacaagaggactggcgtttttatattccgataattaaaatactgaatataattatttaaacgatttgcatttgtctgtgtagagatgttgttgcaacgaaaggaacgattagagagaataaaacgaaagtcgcaattaagaaaacgtgtctttgacagtcacagtgggtcgacttaacctttcgacgtcagacttaacaatattttattacattcagcacgtgaaaattgcgttgtttccgattagttttatttttttaatgggagttgcttattaatgttttaaatttggagggatttatactttattcctgaaaaaacataaacgaagaatgaatctaatcttttgtttattggtgagtaactaactacctatattcaatttcataccggaaaattttgtattatgtactaatatactttgttagactcgtcgttaacgactaaacgaatcttgtaattttccatagctttcttgacttccactgttgtattgcgcgtttcaagtgttttcaataacttatatttgctcttctctctctctctctctctctcttttttgttgttgttgttgttcactttgatgaatcttgacaaagtttacaaagttgactctatttaagcaaccaatggcaaaagatgatcgagtgaaaacctattatgtgtatatagcactaaacattatttgattaacatccaaagatatatatgagtttatacagtttcttagtttttaaatcggtggattcttttttaacaaaaaaggtttaagatcttgtagattgatttttgttcgtcaaaaaactttattatagatggatttttggtgagtacagataggccacaaaaagtgaatttaactaatttcttaatcagttatttaaaatcgtcaagtatatatggattatcattttataatgatttgggttacaaaatatcaaagaacagccaacaacaaaaaaagaaatcgaagaacaagatcatctatagaaaaaaagacaaatattactgaaaaagaaagaccaaagaccaaaagtccaaacaaaaataaataactaatatttttgtcgctgttctattttaagaacgaggcaaaaaaagaacagaaaaaaagaagaaaacgaatcttctaagaacgtaacaactatcatcaaatcaaaacctcaaagaaccttccatggactttctctcattccatacctttataaactcatacacaactacttatctcttcacttcattagtctccaagaagaaaacatctctcactctctaaaatacacactctcatcaaaaaccttctcttcggttcagaagcattcaagaatccatt

SEQ ID NO: 11341 - DNA, 3000 bp, Unknown; identical to SEQ ID NO: 11330
  misc_feature (1)..( 3000): cDNA_ID_1831917_gDNA_ID_2214490_Annot_ID_183630 3000 nt of promoter + ATG

SEQ ID NO: 11342 - DNA, 3000 bp, Unknown
  misc_feature (1)..( 3000): cDNA_ID_2706211_gDNA_ID_2214490_Annot_ID_133449 3000 nt of promoter + ATG
agaatcgagaatctatctctgtagctggtggtgttgaagctttggtatgcttccagtttgtttagtatgattacactgttcctctgcatatataaggggaattgatcacttttgttgattattttaggtggcgctcgcacagtcttgttcaaatgcatcgacaggtcttcaagaaagagctgctggtgcactttggggattatcggtgtcagaagcaaacaggtgctaaatacatctgaatctaagtttaatgcgttctgtttatagattgtcacgtgatatgtttaagatcaatgcagaagcaacataaggacagaccatcttgctttaacatatcacacatgctgatactttttattttgcttgcaccaagttgaggcttttgttacagagaagttttaaaggagtttcttaccaatttattgttactgtcactttccttgataataatcctaccattgctctttttgatctccatcagcgttgcgattggacgtgaaggtggggttccacctctaattgcacttgcacggtctgaagccgaggtaagaactttgagcatagccaagccatcttggataatctgatataaaatttcctcaatgtgctggtttttttcccaggatgtacatgaaactgcagcaggagctctatggaatcttgcttttaatcctggtaatgcactccgcattgttgaggaaggaggagttccagctcttgttcacttgtgttcgtcttctgtctcaaaaatggctcgattcatggctgcattggctttggcatacatgtttgatggaaggtatattaatatataacttagttaataaacatcccaaattcaatccgactctcacggttttcgatctgaattatcgatctgcaacaggatggatgaatatgctctgatgataggaacttcttcatcagagagcacatcgaaaaacattagcttagatggggcaagaaacatggctcttaaacacattgaagcttttgtcctaagttttatagatcctcacatatttgaatctcctgttgtttcatctacccctactatgctagcacaagtcacagagagagctcgcatacaagaagctggccatttgagatgcaggttaaatcttttcgcctctatctatctctatcagcggtgtcttgtgtttgattgaaaactgatttgaaatttttaaatgtattgttttctttgcagtggtgctgaaattggaagatttgtaacaatgttgcgcaatcctgattcaacactcaaagcatgtgctgcgtttgcgcttcttcaggtatgtaaaaatgtgaaaacaaacattgtgtcgtgttctctgttggttacaacaactgatgcatatatcttatctttttgtgcttgctctaattcagtttacaataccgggtggtcgacatgcaatgcatcacgtaagccttatgcagaacggaggagaatcgagattccttcgttctgcagctgcttctgcaaaaacgcctcgtgaagctaagatctttacgaaaattctcctacgcaatctcgagcatcaccaggcggaatcttccatttaagcctcttagagaaaatgatagttaaaagtcccgtttacttagaaatacgtctgtatctcaaatacgcaagaagccaaagccatactgcaaaaccacaaactctcaagatgctttatcagaccaagaatgtcctctctgtgtgattacatgagactattgtgttcttctttatcgtgttttgagaattttcctgtaataacaggtccaaaggattcgaaggtgctgtttcttctatctcctatcttgttcatcgttcctttttggctctgatcatttcttgtgccaagatctattgacgatattaccctccgctctgttattcccttagataaatcatatgtgttgtaaattaggcccaatgacatgctcatgaaaatggaaaactaaacagagcttctgtcacttgacgtttcaggttttcaaaagagaaacattaatacagagcggagggtaattttgtgtcgattcatatttttcacagagcaaaaagtttccttcagcaagaatcaattcatatcagaaatacagataataatgagaaaacaccatttttgaagaagccgatacataaagttgaataaatcaattcgatttcatttgtcaagaaccggaactggacccatatcaaaccggttttattgatcttcctttgtctttccgagagcatggggagtgcagaaaatgatgacatggacatagagtgagcaaaggagataatatctactacatagcaatgtgtaggatgacttacatttagggtcaagatgaggaagatttcaagccagagagatggcttaaggatggcgtgttccaaccttaagaaatacatttctaataaaacctgagatgttttctttctttgactatgtatgtaggctggtccaagaatctgtcttggcaaagatttcgcataccggcaaatgaagacacttattcacttctttcgcttcaaaatggctgatgagaagactactgtatgttactagagaatgcttactcttcgtgtccaaggaggacaaacacctctaaaaaacttttttttcatatcaaataatatatggaagtataatcaattaaaaaaaacacatttttcccccatatcttctgttttgtctttatataatttgattacgtggtacaaaagaaagttgaggccctaattcatattgtgcgactttttcacccacaattactacatgagaaaacatcaaaacgacaaaatcggttacactcaacgttaaccttcgaggtaaaagagagggttcagaatgtttcgttggatgcgtgtaaaatccgtcttgacttttcgtgattgttgaatcgtctatatatgacttcttagcgggaagattgaaaaaatcagacaacaagacgaaacaacttccaagccaaaaaaaaaaaagtgaatcaatggagattttgacgagcatg

SEQ ID NO: 11343 - DNA, 3000 bp, Unknown; identical to SEQ ID NO: 11337
  misc_feature (1)..( 3000): cDNA_ID_2717289_gDNA_ID_2214490_Annot_ID_133450 3000 nt of promoter + ATG

SEQ ID NO: 11344 - DNA, 3000 bp, Unknown; identical to SEQ ID NO: 11336
  misc_feature (1)..( 3000): cDNA_ID_2706215_gDNA_ID_2214490_Annot_ID_133451 3000 nt of promoter + ATG

SEQ ID NO: 11345 - DNA, 3000 bp, Unknown
  misc_feature (1)..( 3000): cDNA_ID_2707710_gDNA_ID_2214491_Annot_ID_133456 3000 nt of promoter + ATG
ttgaaggggagattgttgggtacaaaccaacgtcccacatctgaagtttagaaaataagtttctaatatataagccaagtccaactccaactagtaagagatcttttgggaaggatcccaataacaaatccttgcaggtttgagcatgtagacccaaagaaaacaatatcatagtaaatgggagttgaaatgggcttgggaagcccaatagtttgcggattgcactggatgcagtctctcatgaagtcattgggatcgacttgtttcaatctcgcttagcttcctttgtgttgtatcttgcatttatccctagtttatcttcttttgaaatattgttaggcatttcttgccttgttaccttatattttccctttatttggattgtatttgctcctcttttgactgagtctgagacttaatttgaatgaaaattatggaccaaacaaaacacacaaaatctactaagataagtgaggtgaattagccaagagataaatccatagatattggcatgttttatgtatatatatatatatgtctgattacatatatggaagaacaaatattacttaggggattttggaaaaatgtattttgatacaaacttatcttacagtataaccgtttatatgttcaaatatttataatattataaacgttttcttaattttaaatatatgaattataatgtttataactctttaaaaccttagaaatggagatggtacatatcctaaaaatctttacatcaatcgaattttcagacaatcatggcctttatggcctttcatttgaaaaaacttgtttatatgtatttgaactatattatgtgggaatgtttattaacaaaccattgtgagtttatatcaacaatttattttgtaaaagtaaatatataaaatgtgtttattaatgtaaaacttaatacattgacaaaagagtaaaagttaataaaatctaagcaaacgcaaaatatcaaatctaagagccttttaaatttctttcaatcatatttatattaaaacaaaataactttataaaaattatttctccgtatatcgccagttttaatctagttattaatcaattaatccatcaaattaaatgagtttatgggttgacccatcaaataagttgagtcaacccataaactcatttactaattttttggtattctacctatctagaatatgtaaaattaaaatcatgtttattctgcattttatatgaacgagctccaaataagtgtaatttatatttcatgataataataaattttaaaacatttacatcatattcagattcaaaagaaagtattctaaatccaccaacagtaacaaaaaaattatgcgattataaattttcattcaatagattcattgaagaacataagatatattattatagttaagacatacatgattaacacaatttatgctctcttaagggctaggaggctttcctatggggctccatttatactctaatttaggaatttctttaccatgtgtgaagtaaataccatcttctctagcttcccaaatattctttttaccgtagtgagctatcagaccgccacttttatatgccctaaaatttgcataaaacttgtaagtaggaccacgtccctgccataactcacaatcaaatttagttttcaaaacactatcatgaaaacgaaattcgtagatttgtactccaggtctcaaatagtggtagcctaggtcgtcgtcttttgatgtacaatgaatcttgagaacgtttttcacaccaagagaatttttaaaaactacagaatttttttctctgaacttcgcattactcgatcctgcacataacacaataataataaaagaaaacgaaaaacaattcattgtttcttagatttacttgttcttttgttttaggggctatatatatataagataaaagatgtttagaaaaaaaaagaagaagaagataaaagatgatattttggtgctattttgggaaaactcattcaacgttcaacttttacgaggtgtatgtttcttaaattgacttgaattctaattgagacaaaaaaactgaaaaagagatatgtttcttaaattgacttgaattctaattcagacaaaaaaagagatatgtttcttaaattatgtttcttaattgacaggttgtacagttgattcttcagttagaatttcttccattaattggcaaattattgtttttgtggacgataagatttattgtaaagacctgatggctttttaatgatgttttacattataaggattattgtggcaaggcaatcatacaagatttgtgactcatcaagctcgggtgacaatgatagtataagaaaaggaagggttaaagacgtaatcttgaaaaatctgattcgtccaaactgcttaatagagccccttctaaataacaaggtcacgcgaaacaagagatacctaaatcagctgatgattctgatgctacaagaaggttttcaatgtcaatgaggccctgtttgtttcatcatttccattcagatgatcgacttacatgattcatttaaatcatacatttgaatgatgtttgtttcattatttgcaatttaatctacatgatgcatttaaatggatctttatttgtttgatcattttgtagttcatccacattctcgtttagataaaaatgttcatgctttcattttgacaaataacaattattcaacatcattacccattatcaatactaaacatattggcgggaaaatatgattttatgattttgctgagaatacacgattttacggttttggcgataaaatacgattttgcgatgttggcgggaaaacatgagtttggggttttggcgagaaaacatgattttacggatttgcgaaaacatgatttatggttttggcgggaaaacatgattttacgattttgacgggaaaaacatgattttgcggttttggtgggaaaaacatgattttgcggttttggcgggaaaaccatg

SEQ ID NO: 11346 - DNA, 3000 bp, Unknown
  misc_feature (1)..( 3000): cDNA_ID_3039621_gDNA_ID_2214491_Annot_ID_183675 3000 nt of promoter + ATG
agttattccgctatttatcatacatattagtcaagcctaataatgttttcctccgccttttcaatacttaaccaaaatttccgccaaaattcgtcaataatggtgaaaccgtaaataagtagtgtatttttgggtgtggtttaaactttaaacaaataacgtaatatcatgtaaaaccgcttgttatcataagtgatatttttaacataagcataaaattccactatttttcaaaagaattatacaataaataatctaacttatttacaattttgcaatctatttttttttaaatggtaagagttaaactatttagtgcatatgtacccttttttcattgtagaaaaaatgaaacagtaaaagatttatgcaaatggtagctgaacaatatttagcttactagtgcccattgtaccgacaaattcagcagcaaggaatataaagatattttggttgaaccaaagcaagaagtaccgtaaaagagagtactttggtggataaacaaaccaaagaatgagaaaaacattattatttattggtttgttaatcaaaagtatggttaaatgagaatcaaatacccaagaatctgataacttaacccatcaacaaaagcagaagctgattctggttctgcacaaagacagagagatgtgcacttacaaaggtaatccttgccgcgtcccctaagttctcagaagcttcttaagtttactaggctccattacgacaattaggtgaagaaatagaagaaactaacaatggtccataaaaagggtataacaatagcttagcaagtcttctaggttggttctttcttaggaactactggagattggtgtcttcaaatctctacacaatgtccacattgttcttattgagtagattttgcactggatttaaagtcatgaaaatggttcatccttaactcaagtcgatagaagtgacacaagaccgtcacaagatgtgaacataggaggaatgtagaatcatttgtcctcaaactaacaaaacttttaacagaaacattcattacagaataaagaaactagatgaattgttgtgctatatagtcacaactctagcatgatagtcaactagattagaacgaaaaccataaccaaaagcttcaagatttcaatccatgctatcacatatccatcacatgagaaccggacaagtgaatgccaatgccaaatattataagaaaatctaacaaagctataatctgaaatatcctcataagcctcatgagtcaatgatataacagagacataaattgttcgaaaagccacaagtaggaacgtataacctgagcatagaagtgcatacaaagcaattttcaatcgccttttatcacatgaaagcatgcaattctgagctgctgaaaagggaaacaaaagataacctggtaaaagccaatgacaaacaatatgatgattattttagtaaaaactggactagtgaatgccaatgacaaactataggacgattagtataagaaaagcattctgttagaaatattaacaggtgcagagagctctcagttctttcacttcgtattaacacagcaaaaacttccactgccaatgagaaaagcaaaaacgtgccataagatttcaggtgtgtgtcaagcagcttttggttttcatttcacaatgaccaatgcatacactttcataacgaattcaactccatttataaatcttgttttccaacagcatagatcaaaggctaacatcaaattattgaaaacaaggaaaccaaagccaacaaagttataatctgaaacatcctcatagcctcatgaggctgtcatatgactttgaaaagacacaagcaggaacgtataacctgagtataataaaactgcatacaaagcaatttccaattgcaatttatcacagggaaagtatgcaactcagagatgttgaaaagggggaaaacaaatgatcacctgataaaagcagcgtccttagacaacattgaaaagaagaactagtaagatggcttataagcccaatgcgtagaagagaccactcaccctcaagatccagcttataagcaatcttaccattccttctcttcaatgtaaaagattcattaaaccaactgcaaacatctccttcctaaccatcatgaactcactcatcaacactctactactccactttattgcttgcacataacaatcaccatagcttaaactaactttccacattaaacctctagaactaaaaatgctcaatttcaatactcaataaccagaaaagttacaaacttaacaaaccaaatcagatgtagtttcacctatcatcaaatgaaaaacagagacagagaatttgggtttctactctaacaactagaattctcgataacaagaaaagttacaaactttacaaaccaaaccagatatagtatcacctatcatcaaattcaacacatttttagatagttactctcacactcgtaatcattgtacataatcgaaaaagagattagaaacaaaaatactcgaattcaaacttaagcagtcacagtaacttcgtgcaggagcttaccggagatgaattcatcataaaccggcgacggtagcggcggagcaaagcaaaaatgcgatgattcatggaataggtctcaaaagtcacgagaggatcacgtgagatatcttgaaaagaatcggacggctaagaataaagcagactaattctcttatctatctctaaccgttaaataaaaactaaagttttaaccttttaacctgggactagggttttcagatttcactactcttgtcgtgtaagacttgagcaactatataatctcaacttttctcaatcactatccgctgcggtctcgccgtgctgcccacaacaatctccgacttcgtcttcctcatctatcatcgtcgtcgtcaaccttatttatctcttaatttatcattaaaaccaaaaaaccaaaaaaaaagccttagctttcgtttcttcaatcccagcaaaaaaa

SEQ ID NO: 11347 - DNA, 3000 bp, Unknown
  misc_feature (1)..( 3000): cDNA_ID_3039638_gDNA_ID_2214491_Annot_ID_183672 3000 nt of promoter + ATG
cctaatcggtattataatcatagtgatttattatttgtacaatagattagggtccatattttatcattaactttatacaatcatttttacttttgtcgtttatacgatatattcaataacttaactttgccactaattcaacgtcacaggtatgacatgtactttcatctttgttatataaatgacaaaagcgaagttcttttgtctttttttctttgtaggattgccaaacaatcatatatgcaattatttgtacatattgttttccaattaatatataattctctaatcttattaagttagctttgttttatcaattataatatgtttcttattgtaattttcttcttaatttaatcggcattacaatttgtctcaaatcaagtccaattttatgtaatgattgatctaaagaagcatgtatttgattataggtttataatttaaaaccaattagcaataagtggattgatccatatcttttatataccatttaaaattatgttttatatactcattcgatctgtgttcaatatgtcaagaagatcgttcttgatcaattatattcatccttcaacttaaaagagtattttcaagttagcatttatatattctctctttctatttttctctttctgtaaattagtaattttctactatgaggttacaagttaatatgattagtaatgtagtaaatcatatattacaaagtatacttagcaataatattattttcattatactattttcaaaaagataattgtaattatatcattgaaattttaacgacacacgcataatgtgcgttagatatcaaatttgtataaataattaatcgtgtgtctgattttttttaactttggtggactagctagctgtgaactagttggcacatgaacatggtgccaattacgacaattcatacattttttttggaagaataaagcaaaacagcaaaccatataaatcaataagagaccaccaatatggtttacattgttgatattcacatcctttgtatgaaaccattatattttcatgtgcactcgtggttctataaattagaattatacctatttagaaagtttcaaggacagtcgttggttttaaatatatataaaaaatcttcatttatgaatattgagtcatggaatttatgaggtgatgtgaattgtttatcttttagttttatttttattattctgaaaagtcatttccaagtgtgaacggagcatcaatttttttgataacgttttgcgatgaaaaaaactatatttcttctttttttttttaaatgaaatgagctcaaaatagatttatcgcatggaatttttttaatttttaagtcatatgaaatatataatttaagtttgatagatcaagaaatgggtccatcagagaatcaaagctccactcggatcagaccgattcaaacgtatggttctaattagttgtttttataaaactccttgaaggtaaatcatatagatatataaaaagtattagttcatatgagaaaaagtgaaccaaaaaaaaaaattgtataccctaggttataataggtagaggagtttgtaaacaccaatcaactaaactaacccaaagtcaaaatgaaactaacgcaaagtcaaaatgataattataagtacttcacttattgtctgataatataaatgcgcctgtcgcaatttaaatggtgaagtctacgacattcacaggttatcccctattaggttatatcatattcattaataatttaatatcccaagttcccaaccttcacaaatggatcttcttggtcataagattaataattctagatcaaatctaatgttaaatatagaattctacgatgtgttgcaaacttcgagtgtaacttttttcagaaatctcaacatattgttgatttgattgactatatccagatagaggataagtattcaaagaaaaaacgtaatatctccttttcaagctttattttatactagttgacttagacttagaaaactagcatagtcaacaaacgttttgtcataaatcggatagacaacattaatgtaaaaagacttggtaaacaggtaaataaagacgtcttaaatgtacatataacctgtcgtttctttttggggaggttttaaatgatacatagttatactgaaacggaagataaatatgattcatcgattaatctgtcatatctaaaatattgtaactattgacttacatagatatagagagacaactccaattacagtattccattcgttcaagccttgcagaaatggaactattataagatgatggttaaattagtgggccttttaataagctcatcttatctctgataacccatgacttatgacctttaacctacaagaccaaaacttgtcagaccaaaaaaaacaaaaagcccaaaacttgtaagatgctaaaagtatattactttgggccaaaccagctatttgaggccggattagcttttgtaggtttcgaaaatgtagtctttataaagagctaatcaacatccggacacaattaatcaaaacttcgtactgattcgtatatgttgggatgcagagtctggactcctggactcaggtgcttgtttattttgggccgaaccagctattcgaggccggatatggagttcacgtttcaaacattgtttaactattattgttcgggtgagaattatgagttgttaaggacggttgatcttgtttaatttcaggtgctcgagataactggagaggttagtattagagtagatacgatatatgtaaatcctagatttactagatacgttcttatcttctatgagcaactctccttgtataaatactctcttcgactattggaataaacacacttttacattatatttcattgtatcagagcaaaagctcttttgacctaaatttttttccaccgcagccttcgttgttctgtttcttattctacttctattttctcctattactatacctctactatacgatg

SEQ ID NO: 11348 - DNA, 3000 bp, Unknown
  misc_feature (1)..( 3000): cDNA_ID_2706277_gDNA_ID_2214491_Annot_ID_183671 3000 nt of promoter + ATG
tatgtttaagaataatctatgatcaaaatatagatgaagaggaaatgatatatatagcgaaggaactttcggtgatagggcaaaagaaacacgtttctgggaggaataaatggtttcgtcagctttcgtctttgactttgagtgtctcttcagtcaagtcaagttttgtgtgtactttgtttttcattctcaagtctctctcctcgattaaattaaaatcgtggtcacatctacgaatctaactgtgtgaatgtctcgtcgtgatctggttaactaaaggttgaatatttttaccctaataaaggttcttttttccaagcttctacactaacttttctttttaattaaaaacaaaattgaactagtttatgatttcatttgtgtatattattttacgtatagaccatgtcaccatgctatttttgttatatatcatcgtatcagtgtttgttatttgttatggttattgtggaccattggccaaacatatatgcattgtttcaatcatgttgaaggtctaatctacaataacactctcttggataatttttcacacaaaaaataaaatgtagaaaaagatgatcacatgagtactgattatggttttaacttttttttttttggtatcaatgttaagtatttataccattttcgaagttatgacagaagttacacggaatacatgtagcggaaaaataaatctacagaaagcacagacaaaaacaaacagtaatagtggttaacgttaactaaaagcggaaacaagagaaaaaacaccgattccgagaagctaaactcagaaatttgcgtgatttccacaactcgaagataccaaagagttggagtcccatcgtagttgccacgagcaaactttagcagaagcccgtccacaaaacctcttaataaagcgcctacagcttctccgcaaactaacgcaaaaacgcaaagacaacagaggactaaaacacaaatccgacggttacagggataaccaaagaaactaccttcagtcaccattcctatcaaaacaataggaaccatctcccacggataaatgatgcctcgaagaccaacgcgccgcctctattcttcccttaagactccactccgacatgacgcataacatcactgttgtctaagtacaaaacaacaacaacaaaagacaccacaagctccaacttcgagcaaaaacgatgaagaatcgaggaggctttacgaagagcagaaaaaacaaaactaaggcgatgcaccacctgatttctagatcggagaagaatcccgtcgctaggaggtccaacgaacccaaacgtctcatcaagagccacaaccaccgcagaaaggagaaacccaccacgcaccaccaactagagacgatgggcaatcgaaatctgaaacaaaacgatggagcacgagaggaggagaaacatcaaagacaacaaagagggaggaggaggagccctccccgttcgccggcaaggagtgccgcaaacggagaggcggaggaggcagatcgccgacattatgatttaaacttaatttgtaacaagaaattactctaaaatgatatcggcatagatattgtattagacttcatttttaacaaatatggttgtacaacaaccaacctaaaccatgattagtgaagaagaagcaataaaagtagagtaaataaagcccaaagaattaatgaacaaaaataacaaagaggatgttgacgaaaagtcaactccactaagctggcgacgacaaaaacttctgcgatttaagttaaatttgttgggtcctacttcgaaaccagatcatacggctgacgacgaaagtttgactcgatcctctctcttctttttcgtccgttatgactcttatcatcacacctatcttgatttgtctctccataaaaataaaaaataaaacattttctttttcattcatcttaacaacatgtattttatcaagtttaattacaatagtgtcgacgaaaagaacaagaaaaatgccgacaaaaaaaaaaatactagaacaagaaaaattagaataatgtcgaaaagcgattaagttagtggtttagccgtttgttcatcttctagcctaatagtttggacatctctttctttagtggagtaaaaaatgagtctaatgtactaattaaaccagaatagagataatttcatcctaatacaaattactagattatatacgaagtagtaatacttcatttgttctaaaaacttttttgaaaaaaataaagttttttcgatgaaatgtataattggttaatcagagtaaaaatatgtacaaaagtgtttaactgtgtctaaacggatgactagcagtttaataaggagttttggacagctttaatcactatagttgtaagaaaacaagatgtgagtttgtaagttctctcacaaagtttttttccaaagctctttcaaaaacattgaattgtaggcattacaaatgttttggtgcttaaatgaattgtatcaaaaattgttggtgttacaaattgttacaacaactcatctaataaagacttgattcttctatctcgacaaaagattagagtttgccaaagctcatgggatagtggtgtatagtaaaataaaataaaatgtattgagttctcttggtttttaagtaaagaacatgtatgcaaatatgctcgtaaacgttttaaaaatagtgatgatcaagacttatcactaccgttgcaacaaacacgtgaaggttgaatcctctaattttgtacaaactttgacttttcgaatctaacaaaaaaagaaaaagttgactcttaacaacaaaaattgaatagtaaaaaagactatttatgaacataggaaaagtctaaaccgtgacacattagtcagtcacctaccatacaaattacatcactttaaataccaaattttttattcatttttgttctcttatttactttagtcctctcgaatcccataaagtccacaactctctccttgtagagagagagatttt

SEQ ID NO: 11349 - DNA, 3000 bp, Unknown
  misc_feature (1)..( 3000): cDNA_ID_3039646_gDNA_ID_2214491_Annot_ID_183668 3000 nt of promoter + ATG
taacttatgaaaccattttctcagtttatcatgataattgatcctctatttaaaaccctaaagtttatattttgtttgttcaaacacagtcggtactcaaaatagatgaaacataaatttgattttatttctaaaccacttggaaaaacatatactattattcttctcatgcaaaggaccccattataaaactaacatggcttttactattggattcactgtagtgattaagggtgtatcaccaactgttttgaatttttgtcaacttaattagttattaattaagaagtgggtaaagctaacataccaaccttttactacacaattatcttaaaaaatccttaaatttataagaatagaagaaagctaaaacgaataaggaaaaagaacagcaatcgagtgaaatgatgaacatattcaactcccaccattttgtttatatggatgagttccaaaattttggggcatacattctctaacagtattgagatatttcaataatagtatttgcataatgaaaagtaatattgatcatttcagaagattatatgctctttttatttaactattacgagatacatggttttattttgtaacatgttatttttaccaaataaaatttgttaattgttttactcatatcattaagctattttcaatggaatctaatatattggacgtgtgacattatcttatattttctgtaattatttagcatgttaaatattgatttttagtatattcatgtatggtaataacaaacaattatattgaaagagtcgtatactcgtatgtatgactgtttatatcgtaatcgtatatactgcaagttaaattcaacaactgtaattactaattagataaaatcaaatatctgtcgggcgtaacatgcgacccaacaaacgtcatgtgaatattttaattcttctattagtttgttaacctaatcgtgattgggtattcatataaatacacattttcatataaatacactttgtatatggtaagttatcattttatacaaaaaaccaaagaatgttttcttctctattatatcatcatatcccataattatgggaacccaaaaaaaaaaaaaattggaccctccattataaatataaactattgtcatataaattttagacataactgattttgtcataaagaaattgaaaggagaatctccgtgacggttggatatagcaataataacaactcttaataatcatagcaacaagcaaataaaagcagcacatggaagccatttgcgcaaggataattcttgtaagaacacattacctaaaagctaataataatgagaaaaacagcagaaatattcgaaaccatattaaaaaagaatgaaacatttcttaaataaacctaaactagattcgattttgcatgtttgatccacttgatgtatgaacaaaagaaacataaaacagtaagcaaaagtcaaggatctaatgtaaagtcataaggaaaaaaactaaatttaaacaagttgtaactgcagatcatgttatgtcttttaactagtaaatcctacgaccaattagattagagcaaccaattcttttatgattttgatttttgagagccaatttttatttgtattgaaaataatagttatatttttcactcctataaatttattttctactaatgaaattgttgtttataaaagtattctgtgtgtaatagtctataaaaaatatagtacaattttacacatttttaaaagttaatatttttgatattttgtatagtaaatacaaaaaataccaccacacaatacattgatgattcgaagtttcgaaccaccattttcattgaatcagctctaatattaaaaaaaaatgatttttttgataaaatatataaagaatgttagttttgttaaaccaatatatcataaatacgatagtatatatttttgtattttattgagcttgtaatcagtacatggatgcgaatccgagtgacgttgatattggtacaaactacaaagtatagtagtctaagtatatgtccatatatatataataaatctgttatattcaatgattaatgaaacctggaaactggaagtgcaaaaatgcattgattactttaatcgaaaagaaaaacaaaatgcattgattatagtatttataaaactgcagattttgcagagagcaggaaacagagaggtttggttttgcgttgcgtgagctgtttcctctttaactctctcttcttctacctcttgaccctctctctctctctctggtgatgcggtttcttccttggaagccatgaaaacacaatcagcttcaccgttcttcttcgtctccttcttcttcttcttcttcttcttctcttctctgtttcttctctcctctgctttaaactctgatggagttctcttactgagtttcaaatactctgttcttcttgatcctctctctttattacaatcatggaactacgaccacgacaatccttgttcatggcgaggtgtgttgtgtaataacgattcaagagttgttactttatctctcccaaactctaacctcgttggttcgattccttccgatctgggtttcctccaaaacctccaaagtcttaatctttccaataattcactcaatgggtcattaccggttgagtttttcgccgccgataagctccggtttcttgatttatcaaataacttgatctccggcgagatccctgtatcaatcggaggtttacacaacctccagacgttaaatctctccgataacatcttcaccgggaaactaccagctaacttagcgtctcttggaagcttaacggaggtttctctgaagaacaactacttctccggcgagtttcccggcggcggatggagatcggttcagtatctagacatttcttcaaatctaatcaacggttcactcccacctgatttctccggcgacaatctccgatacctgaatgtctcgtataaccaaatctccggagagattcctccga

SEQ ID NO: 11350 - DNA, 3000 bp, Unknown
  misc_feature (1)..( 3000): cDNA_ID_2717309_gDNA_ID_2214491_Annot_ID_183658 3000 nt of promoter + ATG
ccgagtatgagggatgtgatttgggatcttgagtatgttcttcagctacagatgatgacgaatcgtcgagaggctcatgaagaagatagtacggcgattaattccggtggttcgttggttgctccgaggttgatggtgagtgattcgtttagtacgaactcgatatttcagaatggtgatgaatcgaagaacagatttggatttacagattcatcggagactcgagttttttcgcagttgaagatctctgatgcaagatgatgaaatctttcgcaattgtgtgtaaaattataattttttcgaaatgtgaagtttctagcagtatctggttcaatttcaaaatttaatatccggttatttccggttaatagataatcacagtccgtctatagggtatttcgaaggctaaacactattttggtgttaaaattacatcatttttaacgattttgatgtcgttgatgaacaagtccaaattacgagcgagggatccaccaggcgccatcgccgatctcgtcgcttgcttcaactccgccgctctcctcctcatatccgcagcgtcggtaccctttgtcacggcgtcaatgcatctctccacctcagcaaccttaagctctccatcgacgacatcgttcttcatccgtactccgattccaaacacatcaacaagcaatctcgcgtcaagcggctgatcaaaccaagtcggatacgccaccatcggaacaccactcaccaccgtctcgatcgtcgagttccatccacaatgagtgacaaaacaagagatcgccatatggcatagtatcttctcttgttgaccccattcaataacaactccttgaccttcttcaaccatatcttccaaaacgtcaacgttttcggccttctcctttggccgtatcacccatagaaatggaactcctctgttttttaatgctgtcgctatggtctcgacttgattctctgatgatttgagtatgcttccgaaagatatgtaaaaactgaagacctaacttgtttgtcaagccactccatacaataatcatcagctttccacatatctaggcttttcccatctaagattttgtcctcatcagctcccaaaagaaatggagaaacaagaggaccaattgggataataggttttaaatcaaacatcgattcaattataaccgattcgagttcataaaatgaattagccaaaacccatttaacatctttcaagcattcgacgaattccgccattagtgtattgaagatagcaccgtgagaaggtaacatcaatgtcgggagatctcggacttctaaaaacggtaagcctggtaactccactttttgattaggatcttcgagatcggggaaagagtttgtcttcatgtagtaacggtaataaactgagaaacctgcacaagcttcaatccagaggattgcacaaggaatgttatgagcagctgcaacagctggaacccatggagtaaaaggcacagagatgatgcaatcaaatctctttccttcgattattttcgaaaagttattggctccgacttttctcaatgactctgtgagaggttcgtggtctcttggatcgtctttaggcagaccatcagagaagaacacaagatccaccaggctatggggttcatcggtggatgagaggaggtcacgggctgattcaatggtggcgagagtgaagtgtaggttggttcgtgcgagatgtttggcgaatttgagcattggatttaggtgaccttggaacggtaatgctaccattagaacgtgtgtttcttgaccctcaatacttcccattttttttgtatagacttttagtagtaataattctttttaatagtaatttagaggtattagacttgaatttcgtataaaaattatgagttttaatcttagtggtatatataacaattgttcttcaacaatattaagtgagatttttgtaatatatcattatgatttgctaacccaatatataatggtcaacagatttaaaattatgattttctatattcttgtaaaattgttgtggcaagaaatcatgttcttaccaatttctagcataattatgtcaacagccagctgcaaagttatcttattaactaaaattttatataatacagaagtgtgaacttgtttcaaattagttaaaaagagtgtatattgagtacaattttctaatgatatttaataaaaaaacattgtgttaaaattttaagagattttgtcatgtgattattattattccttatatatatattatcctttatatattaattgagaaacattcttaataaaaacttactcttatatgttattaatgaaaatgtcatgctgacatgttgtgttcgtagagatttgtaatctatttcattcattgtctaacatttactagaatattaacagattttctattagtattatttatacatatctcacacaaataataaaaataaaaaagagatcacatttaaattgataacatatgcaattaaggaatgcactttgttgtttttcaatcaatttacgggtaaaactaactctgatactaaaaatctctgcttcaataaaataataaaatatagtacatgttttttgttacgaaacaagtttcggattctgaatagtgatgatacaataaatttgtagttaactacaatgtatttatttaatcattattttaccccgcacattttgacctctcattttttttgtgttgcctattttcctaacttagctgaattcttgaactcaaagatcttgaatagctctatgctacttgtgctggccaatctgaatttattaataatgtttgatatatattacacgtgtttaattgcatgggacgtgaatatatctttagtaacgggtgggataaactccatgacaataccaaaatttgaactctcgcgcttacgttataaactaagctataacttctaaccccccatgcatgtttcaattcaacacatttacaaattcttagatctaaat

SEQ ID NO: 11351 - DNA, 3000 bp, Unknown
  misc_feature (1)..( 3000): cDNA_ID_1831091_gDNA_ID_2214491_Annot_ID_183653 3000 nt of promoter + ATG
cttcgaccgaattaacgcaaaccttgaaccattcatcatttccctatgaatgtaatcaaaacagcaatggagttaattttgtactatttattaaaaagttatggaacatacttgaattgcttaagattctaaagaaaatatctgtcggattatagtggccattctttcttttcttttatttttgcaataattagtggccatgccttttccatgcttgatattgaaagttgattcacaactcgtaaaatatatctctccgaacgcagcttcgtctttgaattttgaaatagtttcttctaatcaacaaaacaaaaaaacttttatagataatttggttttagttttacataataccatttaacatcgagtaatgagctcaattagacaaagataatatactgtattatttagaccaagaaaattagtaacgaatttctaacctattcaagtaaaataacagacaagtgggaggaaataactatttcaattaacgtatgcaatactaaggaatagtggtatttaattattaaaaagaagaagaaagaatagtgatatggacatactagaaaattgttgaaatggtccaagtgttcccctaaatgtctaatcaaagataaggcatgacccgtgcgaccagtcacttcctcaatttgttttctttctctcattaggtcatattcatatgcataccgtctttttatcaattacatattcaataattattgttttaggtcgtatattctctttttctattagtattatgtataccagtaatcttatttagtctttattttaaggcttacatgtcaactgatcgccatgactgaatattatcttcggatacctccaagatatcaaataatataatatttgaataatattaatatcataattctgatttttttgtatataaagcaaaaggatacaaatgtatatgcttttcatattttcatctatgtgatgtatattattgatttttcttaccaagataccaccgtattaatttttatatcttattatttattactggtatcgtaagaccaatctctttaacacatcgccaaaaaaaatgtataagagctacattatcagttggcttggattttccttttttctgccttcatcactttgcgcgttaattccttctataatcgtcctcaaatatttttaaattgctatgtgctgaatattttaaattttcataaactttaaagcaacctaataattttctatttctttcaatatatttattgtttttcctatttaccaatttaaataaaatataattttaatacataatatacattaaaaattgaacctcttgctctttcagaagaaaaaaaacaaaaagcaaaaaccctagaattaaatagtactgtcaagttggagtgggtacaggcacgatcgagcaaaacgaaatgtcccatgcatgcctttaattgctttagagttagttcttccaaatcaagaattagttttagttatcaataaataggagtacccactagtagtcgtaccacgacctttcaattcataggacaaacgtcttaccccctgcattattatgcgatatatatgtgaatcatacatcatacatggtgcctaaagaaaatgtgaatcatacatatgaatcttaattattccatacatttaaattatgaaatgcataaaaatgttttcgaaaatgattttataaacatatacgcagaatctcaaagttgctaattgtatactattgctttggtttggttgttaggctaacgtcccatgatccttcggaaagataaatatgcatgacccggagtgatggagcatctaaaattttatggaagctttgctcttaaaaagattaagctgtaattgtataagtatatatagttttaaccaacttgtggttatttttgtagtcgtcgaaatatttattatgggattggaagatcatggtggattgatatgtgtgtcttttctatatatttttaatatttaggtcccattaaatcagtttgtgatttcagaatcctaacatacccttttgagattacttttcctatttatctcgaacataacctcattctaaaactacaacactctattgggacaattctatttggatcaaatttgtgctatagtcatgaatttattactcaaaattaactaaaaagaaatgaacgacacatattttaaatgttttctaggtttaatatcaacttcagatgtggaatattccaaacatgttcgagtttttctattgcaatttcaataataattgatcattgtggacgttttaaatcactagaacattttggcctctcacatgtttcatgattagtctttattttatatacagaattccggattatgagagaaaaaaacacatacttttattaataattacaaatttaaattgaaaatttatttttatgttattacatccaatgaactaatgtcaatgcatggaaagaattacttaggctccgggaacaacaacatgatcccttcacacacatactctaattcaactaaccaagtcttcttaattctgataagtcaaattgaaaatgtcattaccactgattaaaaaggaatcaaaagaaaaaaagcttttagtattgagtattgaccgtcgctatcggtgacaggcagagtcacaagccaaataaaagggaaccgcgtggtacgtacgggctgacgcctagctgctacggtcatgacaataaattgcccaatcaaagtaacatgccaacgtggcgcagacatatcagtcccacatgtctgcccaaaactagccaaagattacgtgaccgcggtccctcttgtcccctgtctcggtctaacgataacaaaccgagcccacttttatgtcgacgtggaatttggctgacgttggttttctccttcttgccactataaatacaaccccatactcgtcgagtttcaatatctcctcatcatcaaacacaaagtctaatattatcacttacaaataccattttaatcatg

SEQ ID NO: 11352 - DNA, 3000 bp, Unknown
  misc_feature (1)..( 3000): cDNA_ID_2707699_gDNA_ID_2214491_Annot_ID_133457 3000 nt of promoter + ATG
ttgttttttcaaaattaaaaagtgtttttcagaggggccatattaaacatgttttggttcgtgcgtggatacatgctttttcatagcttttgattccgatttttgaaacacaaagcgaacctcagacgaagtttctatataatctaattctacatacatggttacacatatcatgttatgttttttgtcaaattattttaaagttaaactgagtctgaattgatgtatatacatcttcacggatgattcgacaatgtgatgtttcctatgtccattatactccatatacatcgtacatacatcttcacggataaatatcaaatttatttgcttcttcaagcaagcgtatatgttttttcatacttccaaaagtgttcttgttttttagtaaatggagttttacgtttttagagattcatatttcttctgcgctgaaaagtgaaacataagataggataatatcttcgcgcagcctgggaaatgtagattgctctttgaaagttgtgccatctgtttttcttttggtcgtctgccattcattctaaataaagcccattacatatacatgtatttattcaaaaaaaaaaatactcaaaatggtccgtaaaaatagagaaaaaaatacgaacaactatgtcaactaaatatttcgagagaaaaaattatgttgttatcattttccaaaaaaaaataacccggaaacatcaacaaataaaatgagcagacttctttaaaatgagatgataaacacgtaataatcttttagaatttgtttttttgaatttaatgcaaaattatattcaaaagaaaaaaatactgtttggtacatagaaatgcatacttttttatggaaatcaagtaaagattatctatccttgactttttaatttttatctttgatttctacttgttgtttaatatagtgaacctatataaaagtttgcgttgtttagaattctgatgaattggtaaagataacaaactacacgggcatgttcacctcttttcacaatgcattttgatgagcatgcaaacattaactatacatatctatatatacatttttgcagccattttgtgaaataaatcttgtagttgaaacttatttacaatggttgccactggattttaatatttgtttttgataattagaaaaaaaaatttcgaattaaatatttgatatttaacaatttccctaaaatctctctacattaactacacgattggttactaaaataaaactttcaaaatatttaatatcatttaattactacaaaattatcattattgatattgtttttctgcatgactattacaattcaattataatcatcaaaccgtagagatatttgatagcatttaattactagataattttaaaaataaatgattcataaacatatgataaataagatcaacattaataaaataaaacgggacgggttggcggaacgggtttggcaggacgttacttaataacaattcttaactagaaaataaaaatattttatagatagttacatagatagttacaaattgtaaacttttatatatactaattttaaagtataaattgtctccgcggtataccgcgggtgaaaatctagtatatacatattttaataagatatcttttattatcatttaatgaaaacattaaatatgtacttgttttttgtttctcttataattcaggtactttgaacaattaaatagataatttagcacaaaaggtatactatatccatataacattatatttgtaatctatgtgccatccatttctaaactttgtaactttaacatagttgttgacaatagaagttgcactaaaagattgttttttataattatgtgtaaagaataatttacaaaaaattggtgaaaggatggatatcttttgcaaatttaccaagaaaaaaaaaagaagagaatatcggaggtgagagacgtgtatccacgagccaaccatgtttaatatcaggcttggttcccactattgcatgacatggcatcatccccatggttctttcgatctcgccaggtcatcaacctaagtggaccatttatttcgcatgatacacaccacctgtttatttctttatttgcttttttattccctatacatgctttttgattttgatatatactgttcgaggaaacaatactcctaaatagtatagaaatattttaagaagacagaaatataaataattatattaaaaatcttaacattagttacaatatattaataaattcaacaaacagtttatatatagtttattcatgtttgaagcaaaacaaagtttaaaaacaaatattttcgcatgttactttatcacaaaaaatgatctaattatactaaaaatgataaatttatcgaatctatttaatattttgaaaaggattctatttacactatacatatctatggactacgatagacatttttatttttaacacacgaggccacaaacgaaggtatacgtgatgcatgaacactgtgaagtgtgaagcttcctatataatctacatgttgatgaacgctcgataaaattataaacctaattattagtccaaagaaattctacaaaaattctctatttaaaaaaaaaaagatagtgaaaaaatgtgtccgtaagtaaataagcgaattaaatgtaaaatctgtcccagaaaaacaaacaaaactaaactagaaaagagaaatttgaatttacttttccaaattccatttacacatcaaaattttatttatttgtttatgagtgattatccgaattacctccaccaaataaaaccctatcttatttccccctaaattattagaaaaatataaagtgattaagattcttttgaaagtttgtgtttatactttatcttgtactaagagaaacagaacttccctataaaaagcaaaagcaagtaagaataacgtgttaaactaaaacctcgaaaacaacaaaacccgaaactgaaacagagaatccaaaaaaaatg

SEQ ID NO: 11353 - DNA, 3000 bp, Unknown; identical to SEQ ID NO: 11351
  misc_feature (1)..( 3000): cDNA_ID_1831091_gDNA_ID_2214491_Annot_ID_133459 3000 nt of promoter + ATG

SEQ ID NO: 11354 - DNA, 3000 bp, Unknown
  misc_feature (1)..( 3000): cDNA_ID_2717309_gDNA_ID_2214491_Annot_ID_133464 3000 nt of promoter + ATG
atggaaattgctgagaaatgtttgaaagagtatggagatgagagaccgagtatgagggatgtgatttgggatcttgagtatgttcttcagctacagatgatgacgaatcgtcgagaggctcatgaagaagatagtacggcgattaattccggtggttcgttggttgctccgaggttgatggtgagtgattcgtttagtacgaactcgatatttcagaatggtgatgaatcgaagaacagatttggatttacagattcatcggagactcgagttttttcgcagttgaagatctctgatgcaagatgatgaaatctttcgcaattgtgtgtaaaattataattttttcgaaatgtgaagtttctagcagtatctggttcaatttcaaaatttaatatccggttatttccggttaatagataatcacagtccgtctatagggtatttcgaaggctaaacactattttggtgttaaaattacatcatttttaacgattttgatgtcgttgatgaacaagtccaaattacgagcgagggatccaccaggcgccatcgccgatctcgtcgcttgcttcaactccgccgctctcctcctcatatccgcagcgtcggtaccctttgtcacggcgtcaatgcatctctccacctcagcaaccttaagctctccatcgacgacatcgttcttcatccgtactccgattccaaacacatcaacaagcaatctcgcgtcaagcggctgatcaaaccaagtcggatacgccaccatcggaacaccactcaccaccgtctcgatcgtcgagttccatccacaatgagtgacaaaacaagagatcgccatatggcatagtatcttctcttgttgaccccattcaataacaactccttgaccttcttcaaccatatcttccaaaacgtcaacgttttcggccttctcctttggccgtatcacccatagaaatggaactcctctgttttttaatgctgtcgctatggtctcgacttgattctctgatgatttgagtatgcttccgaaagatatgtaaaaactgaagacctaacttgtttgtcaagccactccatacaataatcatcagctttccacatatctaggcttttcccatctaagattttgtcctcatcagctcccaaaagaaatggagaaacaagaggaccaattgggataataggttttaaatcaaacatcgattcaattataaccgattcgagttcataaaatgaattagccaaaacccatttaacatctttcaagcattcgacgaattccgccattagtgtattgaagatagcaccgtgagaaggtaacatcaatgtcgggagatctcggacttctaaaaacggtaagcctggtaactccactttttgattaggatcttcgagatcggggaaagagtttgtcttcatgtagtaacggtaataaactgagaaacctgcacaagcttcaatccagaggattgcacaaggaatgttatgagcagctgcaacagctggaacccatggagtaaaaggcacagagatgatgcaatcaaatctctttccttcgattattttcgaaaagttattggctccgacttttctcaatgactctgtgagaggttcgtggtctcttggatcgtctttaggcagaccatcagagaagaacacaagatccaccaggctatggggttcatcggtggatgagaggaggtcacgggctgattcaatggtggcgagagtgaagtgtaggttggttcgtgcgagatgtttggcgaatttgagcattggatttaggtgaccttggaacggtaatgctaccattagaacgtgtgtttcttgaccctcaatacttcccattttttttgtatagacttttagtagtaataattctttttaatagtaatttagaggtattagacttgaatttcgtataaaaattatgagttttaatcttagtggtatatataacaattgttcttcaacaatattaagtgagatttttgtaatatatcattatgatttgctaacccaatatataatggtcaacagatttaaaattatgattttctatattcttgtaaaattgttgtggcaagaaatcatgttcttaccaatttctagcataattatgtcaacagccagctgcaaagttatcttattaactaaaattttatataatacagaagtgtgaacttgtttcaaattagttaaaaagagtgtatattgagtacaattttctaatgatatttaataaaaaaacattgtgttaaaattttaagagattttgtcatgtgattattattattccttatatatatattatcctttatatattaattgagaaacattcttaataaaaacttactcttatatgttattaatgaaaatgtcatgctgacatgttgtgttcgtagagatttgtaatctatttcattcattgtctaacatttactagaatattaacagattttctattagtattatttatacatatctcacacaaataataaaaataaaaaagagatcacatttaaattgataacatatgcaattaaggaatgcactttgttgtttttcaatcaatttacgggtaaaactaactctgatactaaaaatctctgcttcaataaaataataaaatatagtacatgttttttgttacgaaacaagtttcggattctgaatagtgatgatacaataaatttgtagttaactacaatgtatttatttaatcattattttaccccgcacattttgacctctcattttttttgtgttgcctattttcctaacttagctgaattcttgaactcaaagatcttgaatagctctatgctacttgtgctggccaatctgaatttattaataatgtttgatatatattacacgtgtttaattgcatgggacgtgaatatatctttagtaacgggtgggataaactccatgacaataccaaaatttgaactctcgcgcttacgttataaactaagctataacttctaacccccc

SEQ ID NO: 11355 - DNA, 3000 bp, Unknown
  misc_feature (1)..( 3000): cDNA_ID_2717305_gDNA_ID_2214491_Annot_ID_133465 3000 nt of promoter + ATG
cttctaacaaggtggattatgctttttcaatccaccttgattacttctaacaaggtggattatgcttctaactaggtggattactgctaacaaggtggattacttccaacaaggtggattatgcttctaacaaggtgaattatgcttctggattatgctttttcaatcattttacttatttacgcaagttagacaaggatcatcattgattttttgtcgacgtcggagtcttatattcttttttttttgtgtggtcaaaaagattaggcagcgatcatctttttttttttaattaatgaattgattagaactttgggttctttttttcagtaccgttttgatctcacctcttcgttgtttatcggtattcttcgtgaataacgatattatcaacaaccttcgttgaacggccattctttggaatcaacggtttttgagttaagaacccactatttggttccaaagaatggtttgtgagttatcgttaaaattttaatctcttaatcattttttgtttttaaactccaatttaagaacccgctatttggttcgattaaaaaaattagtgaatcagataaaaattataattggagttttttcatatattttaaaaaattgaatcattcttttacattgttctcctaaaattacagggaatcttttttctttaatgtaaaattaccgagaatctttttttcttttaatgtagaatcatccggcagagaatctttgttgccacgttccctatgagttatcttagcttatgagagtgttagagacaaatgtttcatgagatgccatatggaagaattcatgcacatgcaataaatgcattgtttaaccaaaaaaaagaaagaaagaacaaagcattgttgcatgggttcgtttacataatggaattctataaagaagaagcaaacaaagctatcaactaattcattacaaatagagacatatcattaaaaggtgtatgctccatatgatacttgtcttttaatctcttataagcttagccataggggatactatgttggcttggtttctccgtactatcactctagaaatgaatgaatgcctttatttaacggcaaccaacacattatacacaagcaaacaatatctgacagagaagatgtatgtgatggtacaagtagagaaattactccatagaaaaatttgaaccttggttagactaaggagatgtgttaagtagatatataacgatttgaaatttgtgtatttaaatacagataataattcactgtaagaaaactaacagaaatcattaaggtataattcatagttatttaaaaacttatttataatggtgaaaagaaatacttaaaccaaattaactcagcaaaagataaggacatataaaacaaacatatatatatttaattttatgagaaatcttttgtttttgtacgattacaaaatatatagtgattttgtttggtattataatatgttgtaaacacaacgctaaactcagatcaacttctgtgtttattgcaaattttaagaactactagattttaacccgcgatataccgcggaaacaacttattttttaaattagtatataaaaaagtttgcaaattaaatctatttatttttattttatagtttacaattgttattaagtaacgtcctaccaaacccgtctcgccaaatccgtcccgtaaaaaaaaccgcggtacactacaaatttaaatatataattaaaataaatattttacgggattgcaattgtattttggtttgtcaaaacaaatatttgtttaaaatagttgccaaaatctagttcaaattttggagaaaaaagatttattggatagataaagaatgtatttaggtgggttttgctcattttaagggattgcaattatatttttgtttgtcaaacattttttgttttaaatagttgctgaatatatttggaatatttttagtttgttaatcaatttattgctggaaaaaaatcaataattaaaagttaatggcagccattgttaatgtatatatagatagttggtgtttgttatgaataattagaacaaatttttttatagaaaaaaataatttaaaagaaacttattgttttcattataatcccgagatgtcaaaaccaaattttgttggcattaaaatattttaaattaagatattgttatataaatatcatgcaacagcccaaaattttagtatataaattatatattatattttaaatatttattgatttatattatacaaataaagtatcatttatgttattcataaatttagagatatagatttatggtttatactatataaaatgaatatatgtttatattatctaatatccacttaaaaattacagtacattcattataattaaatcttatattgaagctatactatttgaatgaaatatttaattttgaataataagactagtttatgaaattcataatgtctggaaagaaagataattataagagtcaaggtgtttggaaagaagggtagtaatagtattagttaaaatgtttgaaaataagaatagtagaaaaataaattaatttcaaatacaagtaaaaaccgtggatttgacatataagtataaataatttttctttaaataagattcggttttcaaatttagtgcggattttcattctcttgtaattatacacttgtttgtaattagttaatttaagatttaaaagaaaatcatatgcacattaaccaagttacttaatcagcgttcccacttcctaccaaaaaaaaaagagttactaatcagcgccacacacatgtaacgtaattaagatatattaatcctaacacggtatgaacaatttgacagataaggtctaaagcaaaaacaaacctgtggtcacatgctctaagtcgttcatgaatctttgatcatgtatgtctataaataccttcgattctatcgacattttagccaaacttttgacgtgatccactagcaacaaagtttatacc

SEQ ID NO: 11356 - DNA, 3000 bp, Unknown
  misc_feature (1)..( 3000): cDNA_ID_2706296_gDNA_ID_2214491_Annot_ID_133472 3000 nt of promoter + ATG
taatttcaatttatatacatgcaaattacaaaatataatagtttttgggggataattatcttcttgcgcctttttattaaattaatatgctcatatagcagttcttacaattaatataactagggttttaaatttcaatatcgagttgacaaaatgaattgtttacaagtttttttcttttcaatatgcattgttcatcacgtattcgtagtgatgcaaaaacaaactataaattataattgcactagtgagattagcaagaagtgttataaattagaataaacggaactatcaaactgtgttatgtacaccatttatttttgttaaagaatatgtgtagtagttagaaaactgatcaaattaaactgaaaattcacattacggagatcaagttacattgtctattgatgaaaaaaacaaaataaatccaaatggcactaaaagttgtagaaattgaaagaagaaaatagatttttgtctaggaataaaagtcaaaatgggaaagacaaaaaaaagagaggcaaataagcagtgatggagctaaagcaacgctttactcttttaattatgaattatttgatttgacctccactcgcctggctttttttggttgttctttatagaaaagtaaaataacacaattagcacataacatgagttatcgagaaaccaattctctttgtggtgttttagttaatttctataacttatgaaaccattttctcagtttatcatgataattgatcctctatttaaaaccctaaagtttatattttgtttgttcaaacacagtcggtactcaaaatagatgaaacataaatttgattttatttctaaaccacttggaaaaacatatactattattcttctcatgcaaaggaccccattataaaactaacatggcttttactattggattcactgtagtgattaagggtgtatcaccaactgttttgaatttttgtcaacttaattagttattaattaagaagtgggtaaagctaacataccaaccttttactacacaattatcttaaaaaatccttaaatttataagaatagaagaaagctaaaacgaataaggaaaaagaacagcaatcgagtgaaatgatgaacatattcaactcccaccattttgtttatatggatgagttccaaaattttggggcatacattctctaacagtattgagatatttcaataatagtatttgcataatgaaaagtaatattgatcatttcagaagattatatgctctttttatttaactattacgagatacatggttttattttgtaacatgttatttttaccaaataaaatttgttaattgttttactcatatcattaagctattttcaatggaatctaatatattggacgtgtgacattatcttatattttctgtaattatttagcatgttaaatattgatttttagtatattcatgtatggtaataacaaacaattatattgaaagagtcgtatactcgtatgtatgactgtttatatcgtaatcgtatatactgcaagttaaattcaacaactgtaattactaattagataaaatcaaatatctgtcgggcgtaacatgcgacccaacaaacgtcatgtgaatattttaattcttctattagtttgttaacctaatcgtgattgggtattcatataaatacacattttcatataaatacactttgtatatggtaagttatcattttatacaaaaaaccaaagaatgttttcttctctattatatcatcatatcccataattatgggaacccaaaaaaaaaaaaaattggaccctccattataaatataaactattgtcatataaattttagacataactgattttgtcataaagaaattgaaaggagaatctccgtgacggttggatatagcaataataacaactcttaataatcatagcaacaagcaaataaaagcagcacatggaagccatttgcgcaaggataattcttgtaagaacacattacctaaaagctaataataatgagaaaaacagcagaaatattcgaaaccatattaaaaaagaatgaaacatttcttaaataaacctaaactagattcgattttgcatgtttgatccacttgatgtatgaacaaaagaaacataaaacagtaagcaaaagtcaaggatctaatgtaaagtcataaggaaaaaaactaaatttaaacaagttgtaactgcagatcatgttatgtcttttaactagtaaatcctacgaccaattagattagagcaaccaattcttttatgattttgatttttgagagccaatttttatttgtattgaaaataatagttatatttttcactcctataaatttattttctactaatgaaattgttgtttataaaagtattctgtgtgtaatagtctataaaaaatatagtacaattttacacatttttaaaagttaatatttttgatattttgtatagtaaatacaaaaaataccaccacacaatacattgatgattcgaagtttcgaaccaccattttcattgaatcagctctaatattaaaaaaaaatgatttttttgataaaatatataaagaatgttagttttgttaaaccaatatatcataaatacgatagtatatatttttgtattttattgagcttgtaatcagtacatggatgcgaatccgagtgacgttgatattggtacaaactacaaagtatagtagtctaagtatatgtccatatatatataataaatctgttatattcaatgattaatgaaacctggaaactggaagtgcaaaaatgcattgattactttaatcgaaaagaaaaacaaaatgcattgattatagtatttataaaactgcagattttgcagagagcaggaaacagagaggtttggttttgcgttgcgtgagctgtttcctctttaactctctcttcttctacctcttgaccctctctctctctctctggtgatgcggtttcttccttggaagcc

SEQ ID NO: 11357 - DNA, 3000 bp, Unknown; identical to SEQ ID NO: 11348
  misc_feature (1)..( 3000): cDNA_ID_2706277_gDNA_ID_2214491_Annot_ID_133474 3000 nt of promoter + ATG

SEQ ID NO: 11358 - DNA, 3000 bp, Unknown; identical to SEQ ID NO: 11346
  misc_feature (1)..( 3000): cDNA_ID_3039621_gDNA_ID_2214491_Annot_ID_133477 3000 nt of promoter + ATG

SEQ ID NO: 11359 - DNA, 3000 bp, Unknown
  misc_feature (1)..( 3000): cDNA_ID_2992127_gDNA_ID_2214492_Annot_ID_133478 3000 nt of promoter + ATG
aaggctatttaaaagaaagggtaatgagcaaaataagggagactacaatctttttgtatgtggggaggatctttaattttagttaacctgagaatttgtgatagcgaatcatgctactaagattgtattttaatttctttgcaaatattttgtttaagctatttgtatcatcaaagcatactactagtaccccctatcttaaagtgttgctatgaaaaatctgatttttaaaaaaaaaatataattttaagaatttaaatagcttcttattcgatatatataatactaatattacaacgatgattcaaatttaagtttattactttttgataaatgataaattataatcttagtctaaaaatgtgttttgggggaaaagggtacttttttgaacaacaaaaaaagtataattcgtctttcaccaaacacaaatagtgatctagtgacatttaccgctgacaaaatcattcaaatcacaattatttatactatgcatcatttattcatcatatattttggaataattaatatgggttatgtaaataaaataaaaatattttactttataatacatctaaatataacaagtaatcattatttttaaattggtgaaaaaggcatgttattcatatgataaattttaattggagaagaaaggaatgcaatgagtttagaataagcataacgaatgaaatgaaattatagtagatcacagatgccagataaacaccaatccgtaatgtgaattaaaatactagctataactattaccaagatctatgtttattcctttcaatttgattatatcgattataatcattgggatctctaaatgaacctaattgatgtttataattatacagataagttagttgttttgattctttaaagttttgggggatttaagttttaacattcataaaacgttagtattatatgcttaccaatctaaagtattagatgaattattttaataatctgaagtattatagccatgtgatgctaatgtcttgttgatcttaaaaagacatgaactaaaactctatatagatagtgccaaaattccttgatcgcgctatgtacattagtacggtctcaaatttcctggcatgtataaggcatagagatttactcacacaattataagaaacactaaattttcttttattcaaaatcatattatgtacatagattcatagaaagcttctaatcaagatccatacaaaattacaaagggagacacaaacctcccatataccttgccggttttattatattgacatatatatagactatataatgctataacataacataacaacatactatacgaacatataatatatatgtgcaaattaacatgttaatttgaacaagtcgcggcacacttggtcgtacagtcaaatgaacatcctccactgcggctggtgcttttataaccatccttgttaacgttggttgatttgtagcactcctcgggacatgtcagcttcttaccgctacaagctccttgcgccgagcatgtatgtgcacctccagcattcatcatatctccgaatgatcctccagcacctccagcacctccagaggaccccgaaaacccggaaaatccatgatgaaacccggatttggaaccaaacatctcgctgattccactatcccagagttgacgactagcttgagatgctgagacgaagatgattaccagaagaaaaggtaaaaggattgattttgtaaacattttgttgttgtttgttgttgtttgttgttgttgttgttgttgttgttattgttttgtgtgtagattggttgttgtgagattgaataggatgatgtttcaatatatgcatatatataacatactctgactacatatgtgaccagtgatttttgttaagctatttaaagaaagaggcaatgagaaaatttaggtagactacaattatttgagaaagctctctaattttagattaattgtagaggactagctagataattggtcggagtagttttatgcaactaagaaattgtgtaaaatttcttgcaagcgtgtccgtaatattatgcacattggccgacgtacataggttttgggagggtcacttgtacacatgatttttttttaaaaattaaaagtaattttataaggtttgctaataatgcccctattgatgtattaattttatgtcccactaggtgactaatgtggcttagcatttgttgcatatatatgtcaggaattaaggatctaatttttttttcaagaacacgaaattaaagtagaaaaaataatgtgcacacaagatatatagtggttttactcaaaaagagttacgtccactttcttctgctgcagatttcactaatatcgaaaaaattcggaggatacaagttctctcaatctctaactctacctctatacttcgatgatataacataggtgactactacaattatataaatgaaaaacttaggacaaacatacatatgccaatattacccaaatatctttaccagcacgtttactagacatcatacgttcatatagaataaaacaatatctgtcatttgtggtcgaaacacacaacaaagaaaaaaaacaatattaatgacaatagtgaaatatcatagtattacagtatattttgatattcaaatatttaatttacattagttacaaatacaatcgttttcttttcttatataaaaaaaaaaatataaaagaaaaaaaaaatgcaatcgtaaatttgataaattcaatttccatgattcataggcccaaatttggtaaattcaatttccatgatttccttgattaaatgggcctcgttaataatcgattgggccaaacttcttaatattttttaagtcacgtggaatgtcacgtgctaatcatcttcttcatagaaaccaaaaacctaatctgcaagatctaaaccaaaaaaaaaaaacttcagaaaatttgaaatcctcagaattgcagagcaaagaacaaccatg

SEQ ID NO: 11360 - DNA, 3000 bp, Unknown
  misc_feature (1)..( 3000): cDNA_ID_3039734_gDNA_ID_2214492_Annot_ID_133480 3000 nt of promoter + ATG
atcgattattaacgaggcccatttaatcaaggaaatcatggaaattgaatttaccaaatttgggcctatgaatcatggaaattgaatttatcaaatttacgattgcattttttttttcttttatatttttttttttatataagaaaagaaaacgattgtatttgtaactaatgtaaattaaatatttgaatatcaaaatatactgtaatactatgatatttcactattgtcattaatattgttttttttctttgttgtgtgtttcgaccacaaatgacagatattgttttattctatatgaacgtatgatgtctagtaaacgtgctggtaaagatatttgggtaatattggcatatgtatgtttgtcctaagtttttcatttatataattgtagtagtcacctatgttatatcatcgaagtatagaggtagagttagagattgagagaacttgtatcctccgaattttttcgatattagtgaaatctgcagcagaagaaagtggacgtaactctttttgagtaaaaccactatatatcttgtgtgcacattattttttctactttaatttcgtgttcttgaaaaaaaaattagatccttaattcctgacatatatatgcaacaaatgctaagccacattagtcacctagtgggacataaaattaatacatcaataggggcattattagcaaaccttataaaattacttttaatttttaaaaaaaaatcatgtgtacaagtgaccctcccaaaacctatgtacgtcggccaatgtgcataatattacggacacgcttgcaagaaattttacacaatttcttagttgcataaaactactccgaccaattatctagctagtcctctacaattaatctaaaattagagagctttctcaaataattgtagtctacctaaattttctcattgcctctttctttaaatagcttaacaaaaatcactggtcacatatgtagtcagagtatgttatatatatgcatatattgaaacatcatcctattcaatctcacaacaaccaatctacacacaaaacaataacaacaacaacaacaacaacaacaaacaacaacaaacaacaacaaaatgtttacaaaatcaatccttttaccttttcttctggtaatcatcttcgtctcagcatctcaagctagtcgtcaactctgggatagtggaatcagcgagatgtttggttccaaatccgggtttcatcatggattttccgggttttcggggtcctctggaggtgctggaggtgctggaggatcattcggagatatgatgaatgctggaggtgcacatacatgctcggcgcaaggagcttgtagcggtaagaagctgacatgtcccgaggagtgctacaaatcaaccaacgttaacaaggatggttataaaagcaccagccgcagtggaggatgttcatttgactgtacgaccaagtgtgccgcgacttgttcaaattaacatgttaatttgcacatatatattatatgttcgtatagtatgttgttatgttatgttatagcattatatagtctatatatatgtcaatataataaaaccggcaaggtatatgggaggtttgtgtctccctttgtaattttgtatggatcttgattagaagctttctatgaatctatgtacataatatgattttgaataaaagaaaatttagtgtttcttataattgtgtgagtaaatctctatgccttatacatgccaggaaatttgagaccgtactaatgtacatagcgcgatcaaggaattttggcactatctatatagagttttagttcatgtctttttaagatcaacaagacattagcatcacatggctataatacttcagattattaaaataattcatctaatactttagattggtaagcatataatactaacgttttatgaatgttaaaacttaaatcccccaaaactttaaagaatcaaaacaactaacttatctgtataattataaacatcaattaggttcatttagagatcccaatgattataatcgatataatcaaattgaaaggaataaacatagatcttggtaatagttatagctagtattttaattcacattacggattggtgtttatctggcatctgtgatctactataatttcatttcattcgttatgcttattctaaactcattgcattcctttcttctccaattaaaatttatcatatgaataacatgcctttttcaccaatttaaaaataatgattacttgttatatttagatgtattataaagtaaaatatttttattttatttacataacccatattaattattccaaaatatatgatgaataaatgatgcatagtataaataattgtgatttgaatgattttgtcagcggtaaatgtcactagatcactatttgtgtttggtgaaagacgaattatactttttttgttgttcaaaaaagtacccttttcccccaaaacacatttttagactaagattataatttatcatttatcaaaaagtaataaacttaaatttgaatcatcgttgtaatattagtattatatatatcgaataagaagctatttaaattcttaaaattatattttttttttaaaaatcagatttttcatagcaacactttaagatagggggtactagtagtatgctttgatgatacaaatagcttaaacaaaatatttgcaaagaaattaaaatacaatcttagtagcatgattcgctatcacaaattctcaggttaactaaaattaaagatcctccccacatacaaaaagattgtagtctcccttattttgctcattaccctttcttttaaatagccttttaatattcttcatagaatcaatttcaaatctaaacttaaactctggcctctcttatatgacaactttaatgaataagatcttacttcttttcttcaataaatatttcctctgttcaatttcttgttttattttatttttgaagaatatggttgaaaga

SEQ ID NO: 11361 - DNA, 3000 bp, Unknown
  misc_feature (1)..( 3000): cDNA_ID_2717353_gDNA_ID_2214492_Annot_ID_133484 3000 nt of promoter + ATG
tgctttcgataacattttccatttcaattcagcttccagttccttgatcgcattaattagaagtagagggattagccatacagaaattttcctcgattcattacagattttaaaatttaatttgttatttaccgttttaatttgtattactgtagattctagacatcaggctaaatatgctttgcacacacttttcagttttaacatattacaggcttaagaaacaaaagaaatgcactttaagtaaaattatttttaggaaatgcaaacaaaaagaaaattaatgcaaaaagtcttactttcggatgatattttgaagaactaaaatcaaagtgaagcaattaatgaacctgaaattatcaaagtgattaagtgaagttattaacacaactcacacatgtgcatgacgatgcggtttttttcctcttaaacttggaatttaaattaacgagatccaattatttgactcaaactgtttctcattggctaacaatgtgactcaaaagctagttgatgtttttgaaaaaaaatcatagtagagccgtcgagcagttttttttgttcctggacaaaacactttttttttaaccataaaaattattgttaataaaatcgaccaatgtctttcgcttttctggtttgtccaagaaaaaaaaaaagtcttttgcttttcctatagccataaataaaaaaggccacagtcaaataatcttaatttgcgctatttgttattttcttattctttttatattatatcaaatacggtatgattagtagataaacgcgtttattaaatagcctaaatagtttttcacaacttatcatgaacgctaaaattcaacaggatgcacagtttcgatccatatacatcgtggttttattttaagtacacgtagttttcatatatggtagaaaaaaataatatttatgtgataacatgaaaaataatgcaatcctgattcgatttaagtgttggttaattagtcaatacagacggttttaacaatttacagcaatcaaaaagaaatctttttcatcttctttgcacttcatcatttacaaaaatatgaaagcaaacctaaaaataactcagaattcatcttctagctaatttttacatccttaatttagctaaatctaatgcatcttctaacctctaattgtatatataaagtagcccatctttcttcaattttacaacaaacaaaaagaaaaagaagaagtactatcagctatatatctcaacaaataaagaaatatgaaggcatgggtgatatgtttgctagtgatttgcgcggcagtgattgcggaaccagtggagagtcggaattacatagaatatggtgcgattaacaagtgcgctggtcctaatcctcctccgggatgcaatcctcccggggccgaacagaagaaccctaatcccgttaacgaatatagccgtggctgcagcaaaattcatcggtgcaggcgtgactgaacccgaagtgacgttcatcatttaaactgattcctcatctctacgaactctgtacgtatttgctttacatgcatatacatacactcgtatatgcaaggtgttttatgtgtatcaaattaattaatagtttattaatcctcagatcattgtattaaaaatatcaaatatatactaactgtgttaaattatataaagtgttcatcaatctcctttacatctaattttttttatcggctttgatcttatactaactataactaggattctgatttataatactataaactggaaaatttgtaagaaaacaactagacgcaaaaggactagcaatataattaagcagaaaaaaaaaatttggttactagctaacctaacctgtaagatgattagtggaacatttaaaaagtgcatggcatgactcgaccaacgaaaacaatgaagttgaaagccatttatgcaatatcctaaaacagtcagaaacttggtctatatctcttgcatatgcatggataatactttataattataaccgtttttattaaaacattgaaaactggatttatgcggtaacttttttccttcttattttaacatttaattattcctcaagttttatttacctttgttcgcatattcttcttttttatataatcaaatatagtatttatttatatatattttcctcaattcattacagattttctcaagttaggcagatctacttgaagagagtaagaatacaaaagtgtttaggaagaattgtaataaactctcatgaaaatagttataagagatacattatgttatataaagatgagatttcctaatctacgataaacttaaatgtaaataatatatttaaagataatgttaaactttctaaacttcaattattaacgtttattaataatcttttagatacttatagaataattatcttgatcttgtcatttcaaccgtcaatctcggtcgatttccggttttcaataccagttctctatattctaataatgtgtttgaacaataaaacaaataacaaagtacaaactacacctcattttagaagtcatcgcaataattaacatgttgaatgcgtcgactttgcataacaatctttttttttctgttcaatgtgatcatattattcagttaaataaaataaaatcaaacaccacaagattcttcacgaaaccaaatatacgtatctggctcttattcagagactttgatatttgtctgttaaaatgacttctaatattcttattacaactcacgtacaagttgacaattgaagattttgccgaacataaaaaaaaaactacttacttacaagttgacacttaatgatctttcagaaaatctaagaattaccatccctgtttaatttattcattatctattctgtctctagtcttgaaatagaattttacttctgtctgtttctgtctatatatgtttatatataggctcttatctgttcttgaacgttaacaatttcagtttctggtcattaatttactaaa

SEQ ID NO: 11362 - DNA, 3000 bp, Unknown
  misc_feature (1)..( 3000): cDNA_ID_2706333_gDNA_ID_2214492_Annot_ID_133486 3000 nt of promoter + ATG
accaatgaaatttatataaaagccaaaagctctccttcagaacgaaaagtcgaaaaccattataatgtgactaaatctcacatctgtatcctctccataactaagagttcaagaagaaaaaagcgtagagattactggttatgtttttatcttagtctcagagagttcgcctgagagttaccggtccatttaataagaaaagctttagtttagtcatcttcatcttcatactccagttcatcagaactacctcctcccatcactgatacgtaaatgacgacagctagaaactgagcagctagaaagaaccttgctcttttcttaaattttttctcctcttcggtcttttctacctttggtttgctctttggcttcgaacctgaacaaaagatgaaattcacttccttcacaggcttaaacatatccaatgaatgttgcatatatgacagatatataatatgatgaaatatatatgatatggacgttgaaggttagatgtgtcttactctttcttggaaatgaggaagggaatgagtgaagtggaggtgaaggagatgaagaagaggcttcaaggaactctgacttaagtttctcagcatatcgcacaagattactatgttccagaagtttgcaccgaagcactgatgtaacctgatcatgcaccattaagaaaactacttcatctaaatagttctaaggctaaattcaacctgataaacccataactgagaaatatattggtgaaatttaaagctgctcactggtaacgcttggattataaaaagtatgtgcgagagtaagaaagcatccaaactcgatggcctgtgggaagagaataatataaacattgtcaatcttttacaaaaaggcttaagggaaagaatccagttccggaatgtgattgcaatacctgtcttcaaagagaaacttctgctcacctaacctagtcgacaaagcttcatatgcctcacttgctctcttgtatatctgttcacatttaagactatgaactttaataactagttcaaatgctcacaaatataaaccacaggtcttctaaagtaacaacaaaacttaaacaaacccgacctgtttttctctttgctctgcgttctctttggtgattcctaaacggttctttgccaagtatgtctgcttataaaacaggaccttgctgatcacccaaggaagatctgaatagtagattttcgatgtagatatcccctcggtaccaacccatatctcataggtaagcgcttcttctagccaagacacaataagagccttcaaagataaataatccgaaagagactgtagctgagagtccagattaacaatcccatctttcttcagtttttcaattactcctccatcttcattgttatatgcaacatatgtatcactttcaaagtacggcagttcatctatattaaaaacaaatgattaacattgtcaatacacaagcttataaatattgaatgcacaaatttgtaaatccgtgaacaaaggattacgaagtgtctagagatattatcaaacataacatagaaattctgaagatattgttaatatacaaactcaatagctaaatcaaacaactaatttcttctgaacaagtatgaaacatcatcattctcttcgaattaacaattacgataacgaggaattcaaccaaagctataacaagaaattatgatgaacacttcctatccagaaaaattcaccaatgcatatatacacctcaaaattgaattactattgcctaaaaaccctatctaaactctgattaacctaagagcaggatcttaatagtacgaattcgaatccagaactcaaaattatcttgtctaggattcgaatctcaattcaagctaatagaattaacaatgttcacttccaacagatacacatcacgcaaccaaaaccttaatctaacaacaaccaaaatacgaagcgaggaatcaaaacagaagcaaacctgaatcagggaaggttgaattgaacgcaagttcaaaaggtagctgggctaatttcaggtatatataagcaggaagacaattagggcaagctgttgggagatcgaaggaaggcttccttgccaccaaagtataaacattcgtctcttgatcgccttccattatagtgactcgtatgtgtgagagctctggtcaaaagaagaagaagtactcaagtaagttcgatcgtcgatagagagagatggggcgagaagagaagatccagtcgagtccgggtctgggttaaggtttagtcggtcgggtttaaaactagggtttattaatacgataactcattttgggctttaaaaggcccacaaattacccattaagacaaaactactggaggaggagactcggagaaagtggaattgttttctcctttttgttagtttgtaaaaactaaaattactgtgtaacagtgtaaaatacatcatccacattttttttcttcaagatgactttataaaaataaactcaacttaaattcagaagatataatcaaaactggcgatgtgggcttttgaatttaatgctatgaagttagtattttggatttaccatttctttttagagtttatgatatatacttaaggatttagtttagaatttatactttggaatatacttgcataaaaaagtataacacattccctaatagtgatatgaattttatgttatatgttcttacctcgttttttttcattttttcgtggaaatatatattcatccacaatgtgaacaaaatagagaagaagggtaatacgcgtgatcatatacaaccaacaaaactaaaccttattctcacttccactaattaagctgcttcgaaggaaacaaactaaaccacgagaaaaacatttttgaattttgactaacagcaagaaaaattcgttgaatccatatgattctgtgtactatataaacattactttagcacgaacttcaaaaagagaagagaaaaagaaagggggtttgtgttatg

SEQ ID NO: 11363 - DNA, 3000 bp, Unknown
  misc_feature (1)..( 3000): cDNA_ID_2686029_gDNA_ID_2214492_Annot_ID_133487 3000 nt of promoter + ATG
ttgctagtaaagcctaaaaagatatcattctgcttccaaataccttgcattaatttagaattagtattgctaaattgtaacaacatgccatcatatttccatcattgagttttgttatggatttggcaaacaacccaatctaagtcaaattcattgcatgcaagatcatactaaatgttgtactggagaaagcacgatattctatagcatttttttttgtttaaatgttaattccattgtagtaagaacaataatatatagtttagaatctgttattacaattcaataatcactacaatataagtagaattcaaatgaaagtgcataaatatttgtatacgtcatgtatataaaaaacatataaggcctagatatcttcataaaagtgtttcttgaaggcctccatgtgagccacctgtagacacgtcgcgagaatcaccgagccatcttcgttttgatccggcaagatcagcgagtcgccgtcaaagtcatgcgtgcctggtcccgtgtagaactctttgccccatccgaaatcaaggccgtacattggcaaagttaaccagctcaccactccaagatttgggtttccgtagaatggaccttccgtgcttcccaaggcatgtagatcttgaaacttcttcagatctttttggttcttaagatactctatcccaatcatcacgtattcgtttgttacattctttatggctttactgattaaactcgccgcgaaacccaattcattcgatatcagttcacctatatgcataacaaaattatcgaaacagactttgcattgtagaatcagtacgtactaacctacatttacgtggatgaaaagcaaccaagaaaagtttcatatatccaagttcttcagataattttaattgttcagcaatagtagaaattaatgataatccatcagtttcataaaagagtcgttttgacggtcttttgacacgaattctaagataaacaaattacaatattttgtaatatttttgaattgaaaaaaattaataaataaataatatatataattggaatataaaagtaatgaacaaaatcataatttttgtttagaggactaaattaaattttgaagaagtgtattcaaattcacaaaacaaacaaaatttctatggatagtaatagaaaagaaagaaaaaacacgtacctgaggtgcttgctgcgaccacgtcaagagtagcattgccgaagtagccgcgtggcagaggtggctccatccgactacgagtatctatacagattcctagagccgttggttgctccggagagtggccacgtgctttacacgcgcacctccacacgtgtccggtgacggtctcgtaccttgtaaaccctttcgccgggtcagagtgtttgcttccgttggctttacttcgtagcttctgcagctgagatgtgctcagtggtagcatcaccacaatcgttttcttctttctctcttctacattgtccgtttctccgatcaaaaacggtggctgatcaaactctttgtggtcgaactttgggggcgacacaaacggtgggagcggttcaccagcccagaggattttccggtctagaaatggaacggtttctaacggttcaccgcgcgcgagtcttccccattccgatattaagtgaagcgcgctttggccatctacgatcgcgtgggaaacgttgacgctaaggcttattccaccgcatttgaatttggttacctgagctaaaaatagaggaatcgtttcgatagggtttttatagtttacttgcggcataagattctcgaattccggcgtaggagagaagtctttgaaatccgaaagcttcccctcagattccgcttcaatgaattccactccctcggcgttacaattgagctcgaaccgtccccgagggagccatctgagacggccagccatagggtaaaaatggactagcacacggctcaacgaggtttttaggatttcgactacattgccttggaaagattcagatggcttgtcgtaaaagtaaagggtgggaatgtgagtaattgtaccaacttgatcccactcggctaagggaaacctaccgctccacgttggttcggccggtactatagtgtaagattttctaaaagttatgggagccataacacaaaccccctttctttttctcttctctttttgaagttcgtgctaaagtaatgtttatatagtacacagaatcatatggattcaacgaatttttcttgctgttagtcaaaattcaaaaatgtttttctcgtggtttagtttgtttccttcgaagcagcttaattagtggaagtgagaataaggtttagttttgttggttgtatatgatcacgcgtattacccttcttctctattttgttcacattgtggatgaatatatatttccacgaaaaaatgaaaaaaaacgaggtaagaacatataacataaaattcatatcactattagggaatgtgttatacttttttatgcaagtatattccaaagtataaattctaaactaaatccttaagtatatatcataaactctaaaaagaaatggtaaatccaaaatactaacttcatagcattaaattcaaaagcccacatcgccagttttgattatatcttctgaatttaagttgagtttatttttataaagtcatcttgaagaaaaaaaatgtggatgatgtattttacactgttacacagtaattttagtttttacaaactaacaaaaaggagaaaacaattccactttctccgagtctcctcctccagtagttttgtcttaatgggtaatttgtgggccttttaaagcccaaaatgagttatcgtattaataaaccctagttttaaacccgaccgactaaaccttaacccagacccggactcgactggatcttctcttctcgccccatctctctctatcgacgatcgaacttacttgagtacttcttcttcttttgaccagagctctcacacatacgagtcactata

SEQ ID NO: 11364 - DNA, 3000 bp, Unknown
  misc_feature (1)..( 3000): cDNA_ID_2706329_gDNA_ID_2214492_Annot_ID_133488 3000 nt of promoter + ATG
agtggcgtgggaagcaatttgtaaaccgaaacaggagggaggccttggactgcgatctttgaaagaagcaaatgatgtctgttgtctgaagctgatttggcgaatattatcccatggagactcactgtgggtaaagtggatagaaacgaatctcttgaaaaataactctttctggataataaaaagctccacaacgatgggatcatggatgtggaagaagcttctaaagtaccgagaagtggcaaaaacttttagtaagattgaagtacacaatggtcaacgcacatcgttttggtatgatgactggtcttgtatgggcagaataatgaacttcatcggagataaaggtattattgacctgggcattaaaagagataagttagtggctgaggtttgggacacacatcgcagccgaaggcacataacagactatttaaatcaagtagaaaacgtcatagctacatcaaaggcgaaccgcaaggagaaagcagatgatgtggtttggcgaggaagaaatgacatttataaaccacagttctctacacgagatacttggaacaatattcgaaccactgcgaccaaggttacatggtacaaaggagtatggttttatcaagcgactccaaaattttctttctgtgtttggcttgcagctttggatcgcctctctacgggagatcgaatggctaattggaaaggggtttcttcaggatcatgtgtcttctgcaatcatcccacaaaatctcgtgatcacctcttttttaactgcccctattcttctgaagtctggacagtcacagcaaagaacattctaacgacgcgtttcacaacggattggcacctcctccttaacacggtttctagtttacagcaaaatcgagttgaaaactttcttgtgcgttatgcctttcaagcttcggtttactcaatctggagcgaacgcaacagaagacgacatgggaacactctgcattcagcaactcggctaattggttggatcgacaaacaagtgagaaacattctttcatcaattcgaataaagggagatagacactacgatgcgggactccaaatgtggtttgatacaagagcctaatcacttctagtttctaaattttcatttcaattctaaactttcagcttcatttcaaacaagttgcacatgttgtaaaaaaagataatttttcttttgaatataatttaacattatattaaaaaaaaataaaaaaaattcaatcattctaaatgtaataaattacagtttcaagaaactacgttacgggctaagtctgcaatttaactttacgacaattatgtccattgtgctagatatgactgtaaatgcttggcccaataaaatagattgcggagaaattctagttctcaatattaatggcagttttgtggttacgtgaaattcccagggacaaaaaaaagaagaagtacgtatcaggtatcgaggcattttcatgatatcttttacaaatgtgggtccagatcctgccttttactttacaggccggtcctttctttttgttgcttttcctaaattcgtccaacgtattttcccactggcgacgcttattaagttactaaattgcccatgcttaactactcatatagattctccgaattgattccattttacacaaaacaatccaccatgcaaatgtaatttatataactcgacaaaaatatagattagtaaaactaaaaaaaaaacttatgtaatttagaagttaccaagtaaatcactatcggtaatatgatatactccctttatttatttttgtttgattttctagaaaaaattattattctaaaaaattgattttttagattttcaatgcaattcttattaattataattgataaattgtaaattttaataaaaattattaaatactattagtttagagttattaaaaattgtaaatcacaaagtataatacatttaaaatcaatatttaatatgttttcttaatatttgtatattttctagaaaaagaaaagaaaacagagagtataatttagttgtttacactatttgcatcgttatgtcattatattaatattcatgttattataagattgaaattaatatcagtataacaattgaggtatgaaaataaatgtaatgtaaacatcaatagactatgccatatataaactcataaacataaaacttagtacagaaaaaagacaagaaatattcagagtggcaaaatcgaaaataaacatgaaaagcgaggatagaaacaaaataagcttcgtgtcccgtctttctcttagccaatatatattcttcgtagctttattaaaatttagtttagctctaccattcactttatttattaattaatcatctcttttaatttcgatcaatacacacgattttagttctatcaaatgtttttttttggttttgttttatgtagcctctgtcttcttcttcttcaacttcttgattgcgagtgagtcttgacttctttctttcattctctctccttcaaaatccgacagtaattttgaccgttgttttctccaacgtctctctctctctctactgtgtatccctcacgctcctccagtctcttttcttttgactcattattaggttttttcttcttcttctttgtcttctctctctctttcttcaataacttcttttctggctttgctctttactttccttttgacattttcacaacaccaaatccaagattttacaccatttctcatctgggtttctgttatttctgagtacaatctcaccctttaatagaaaacaagcaaaatctcttcaagggttttaaggactaaagagctttgtcttgtatattaagcaaagaatcttcttattgtctttttctcagttaatgcgagttcagacatagttattatgtctttgttttgttctgttctcagttgtttcatagcttttgtatgagtgtcttgagctctggatttgagcttaggaaagaagagtagagagaaatg

SEQ ID NO: 11365 - DNA, 3000 bp, Unknown
  misc_feature (1)..( 3000): cDNA_ID_2706321_gDNA_ID_2214492_Annot_ID_133490 3000 nt of promoter + ATG
tattaaaactaattataaatgtattaatttttgtaatttatatttttctttaattataaattaacgatattcaattaattgttctaaattttaaaattcattaataataactaataaatagtgcatagaaaacaaaaaaaaaatcaatcattttgaaacaatagtttttctaaaaaatcaataaatgatcaaaataataaaaatgcaatgaacgcgacaaagcaaagtttgaataaaagcaattaatgaacctttactcaagagtacattaactggaaatatttgatgaaacaattaataaagttttacatcggtttggaaagccgcaccatccaaaatttgagatgaaagaaaaaaattacccaaactatggattttatagtttttgcgatcaagataccacaaacttaccgatcgggtatgccatgaaaaagcttaaagctaacattcaagatgtccttgaaacctataacgatgattattttgttataggtttaattacctacgacaatttgaaacttttttcccattctgactattgtactctaataaatgatgcaatcaaaatcttccatgcacagagaagagttggtaattgttgcaattgtaaaaacaaaaacccataaaatctcaagaacctcatgtcacacagataatgccacattgcttacttaaaaaatttgctttcttgtttttcttttttttttttttgccaagaaaccaatgtttttcttttctctttttttttttttgagcaaaaccaaaaaaccaatgtatatttgtactttaccaataataaaatctcaaaaacttgaagataagtttgatcaaggccgacccatgggtaaaaagcccaacaagcgaatgctttaggcaacaacgtttataaatgtttttagcagcctcactaaccatcaagagttttgctttatttgttatcatattctttttcgcagtatacactataaagatgcggtcatattatctatattttttgtaacgatttggctgggactgtttgtggaccacgacgtctatttttggttgatggatttctacaatatacgatactgaaaagagtaaaaatcatttattttattataaaaataatgtctccaactttctcttgtaataggttatggcttgtattcactgattcttaatgcattctagtataactttatgtcatttatttatttaatttagtggtttatcatttaagccgcatacgtctttactctatctctttctcctagagtataactataagttatactatgcaaacatgtgagattttattagaaagtataaaagatataggtagatattaagagataagctacgaaagtagacgacattggtgcgttgcgttaaaagaatttgtagttaattatttagaatgataaactaagaaaatcgtactaaaaacaataataaagaaaacaatgagatgaggaatcacacatggattccattttcgtgacattccacttttgggggtttccactaaattttttataactttgatttcgtgtctcttcctcacgagataaaatccccctttgaccatttgtttcgtccaatcaacttaaaacctagcaagaactattaatcataatataattattcagattcttagatatgctatatactaatgtgcctaaactcgtgacgtatcggaccagttttagtcccgccctactttcaaactaataatgttttgtaatctcaatacttttccttcaaaacaattttaagaaaactgccgtatttgttatgagctaattataatcgagcatcctaccttgaattaacttggtttcaagactaattaagatcgacttttccaaaataaagtcatgcataaaaattgatttaaatattatacatacgagttatgacaatttgtatataaaaaaatttgctggacgtttgagtaaaacgtttcataaaatataggaactgaatcttgaagataggaaccggaaacaaataactaaaaagatagcctacgagatttacgtggtaaaaaaataacttaaaaccccataaaaccttaatcaaagaaaaaatggtttaataaaggtttcaaaaatttagtaatggttctaaaatcatttggtaccccccttattaaactttcaacaaccttatacacctactagatttgtggtatttttaataattttgaatttttgtggtagttttggaaaacatgatttaataatttgaagcttttcgaattactctataatttttaatagagatcgatcattatccctaaatatatttataaaaaatctgataattactaaaatgttaaagaaaactaaccaatcatcttgcatctaacattcttacttatctgcctatataagcaacaactcccatttcttgacttctctatgttcctaacacttctctcaacctttatctgatcgcaccaaaccagttttttcgcatcggcttcttccttttgctactagctctcctctcttctccggtatttttgtctctcttcttaattcacacagatttcatgataagtgatgatctataacaagacgctaactcttctcttgcatttctcgtgttttcattttcttgttacgccaaatttatcccttcaaaatcatttttttatgcgtatagaatccaaataataagtaaaagctgattcgtcttcttccacttaacacaagtaagcaatgagagggtgaagatttttctttaggaaaaaaaagagagtgaagatattttttggcttgatctcaacattattttttcttaaaagtaaacattttcaataagaaaatacaagacccataccgaaagtttcttcttaaaaaaaaaaaaaaggttttgaactgtttcatgataatgataactaaaaaagtttttgctttcttgttttttttcctccgcaaaacagtcttaaagtataaccaaaaagcctataaatcaatataatttgttgttttgatttacgttttacagaaa

SEQ ID NO: 11366 - DNA, 3000 bp, Unknown
  misc_feature (1)..( 3000): cDNA_ID_2706305_gDNA_ID_2214492_Annot_ID_133496 3000 nt of promoter + ATG
ctaaaagaaaaattaaagagataggaagaaaacaaaaaaaaaaaagaatagaaaagtgttaaaaaaagaagaagatgtggaataatccgttagaagaatggatgtacaataaaatcgatccatacactaatcatgtatcatgtctcatcgaattatttggcaggtttgggacatttcatcgattttgcaaatagccatgcacaaaacagaagagggtcacatattcacatattcgtcaatgttttgtgacaaaaaaagggtcacaaattagagtcccgaaactgcaggttttcttctagaattgatcctcaaaatgaagtaagaaactacttcatatgatttctcggttacatttgtatttaccaatctctttaaatatcactttgtactttccatatttttggtaatacattggtagctttcaagttttaggttattggtaatttgtaagaaaaaatcttttacttaccatattttaggactttgaaatatacaagtttgagggtgatgatatcttggctaaatcactgaatcataaatttcatggttttaggtttctagatcttacaaaaagtgtcattttgaaatgtataacacatattgagatatatttatgatataaaatatatttacattagatatattaccaactaaatggtgaagaattaaacttcagactttttgagttttgaataaagagtaattaaattggaaattaagtttgcgacattctaattaaaacattttaaaaaaaataaaaaatctagaacaacatatttgtgatacagaaaaagaaaaaaagaaaaaaacgattttcatatatttaccctaaacatcaaatattaaactatttcaaacatatgattgagtagagtccctttagcagtataattgtatatcaatttttcataatgcttttgtaatgaagacgcctttctgatttgtaaaaggaactcttttctctggcgatcaaacatcataattgagttaaataacattggccctctaattatgaatttagatataacttttcaccagtgttaagactataaccaatttaagtcagcaatatatcatacttactcattaatgttccattgtcaactttctcttaattttctgtcaataatctttcatatttagggttttatttgcttagataaaaagtttaaaaaaaattgaaataaataatgcagcattgatcagataactaactattcactgaattgttattaatatatcatcatttatttttgtcacatattacatcagagatactatcaatccatataaacgactccaaatataactttcacgatgtgccacttttccggaatactcgaatttgtactatgccacaatatacagttttatacctaccatacaaaactacgataaaggctttgtatttacagtaacgatctctttacagtactaagaaattttcattaaattttagatttattacaatgcaagctaatacattatctggaaatcgaattttgaccatgagatcaaaggcgttaccattaccatttacatttctagaactctctagctagaaaggaaaaaataaataggattttgatatttctcggcatttaacacaaaacattgattttcatatctactttttgaggggtattaacgtcattacaaaacgaactgacagcaaatccggcgcgcgaatggtcactctcctccctccccaccttcggacaatcggacatttacgtaaatccgcaccacaccaaattttattgttggatttttgtaaaacacttttttaacattttaccattacacgaaaacattactacagtataaaactaattaaaaatttacatacgtaatcttcggttcgttgtctccttagcatttatagtataaagtttataaaaataattaaaaccctaaataacgacattttcttcttcatttctctaccaacaaacacacactcactgaaattacagtaacaagttttttattttttaacttcactttcgtactttttttttgttttctctctttggatactttgctagatctctattctacgaacaaacccagaaacaaaaatgtttctctttaatcactcaattagagagatctgaataaacttgttctcttgtttttcttcttcttcttcttcaaatgtgactaaatttataatctttcggttttgattcaatcgtacattcaccatttcgtctctcacagaaagctaactttttttttttgtgtgtgttctctgttccgtctcgtgaagcaaatgtaagttcgtacaacattattggctttttggatttactctattgaaactgctactggttctttctttctaaaaggatctttctttttgggttttatttgatgtttgattctttgcttggatgatttgtgaaagtgggttattcttacttagtcttgatactttttctttgattttggtgattttcattttggtttaagagagtagaagattctttcttctttgtttgtctcattaattgaagagcaatagtggttataatgtacttactggtttgctttttatataaatggtataagatggagctgaactttctttacttgattgttgtgtttagtcaaatttctctggagtaagttcttggtcttcaagctgtgatttgagtttcaagttcttttctttggtgttggttggattttggttactgctcttatgtgtttggttcttgttctttgtttttggtggttcttgtgtacttggccttggagatgattcttgcgtttctctatacactagtttgattatgcgttgtctgcattttgtgggaaagcttgatccttttagaccaaaagtaactatgtccttgttagctctgagaagtgtgtatgagattagatgatctatctggtctgagggagctaatgcattcatttgattttgatgctgcagttgaatctacagcaagaaattaaagttggagcttcactttgagtgaaaccaaaatg

SEQ ID NO: 11367 - DNA, 3000 bp, Unknown; identical to SEQ ID NO: 11365
  misc_feature (1)..( 3000): cDNA_ID_2706321_gDNA_ID_2214492_Annot_ID_183710 3000 nt of promoter + ATG

SEQ ID NO: 11368 - DNA, 3000 bp, Unknown
  misc_feature (1)..( 3000): cDNA_ID_3039720_gDNA_ID_2214492_Annot_ID_183709 3000 nt of promoter + ATG
tttcttagtttatcattctaaataattaactacaaattcttttaacgcaacgcaccaatgtcgtctactttcgtagcttatctcttaatatctacctatatcttttatactttctaataaaatctcacatgtttgcatagtataacttatagttatactctaggagaaagagatagagtaaagacgtatgcggcttaaatgataaaccactaaattaaataaataaatgacataaagttatactagaatgcattaagaatcagtgaatacaagccataacctattacaagagaaagttggagacattatttttataataaaataaatgatttttactcttttcagtatcgtatattgtagaaatccatcaaccaaaaatagacgtcgtggtccacaaacagtcccagccaaatcgttacaaaaaatatagataatatgaccgcatctttatagtgtatactgcgaaaaagaatatgataacaaataaagcaaaactcttgatggttagtgaggctgctaaaaacatttataaacgttgttgcctaaagcattcgcttgttgggctttttacccatgggtcggccttgatcaaacttatcttcaagtttttgagattttattattggtaaagtacaaatatacattggttttttggttttgctcaaaaaaaaaaaaagagaaaagaaaaacattggtttcttggcaaaaaaaaaaaaaagaaaaacaagaaagcaaattttttaagtaagcaatgtggcattatctgtgtgacatgaggttcttgagattttatgggtttttgtttttacaattgcaacaattaccaactcttctctgtgcatggaagattttgattgcatcatttattagagtacaatagtcagaatgggaaaaaagtttcaaattgtcgtaggtaattaaacctataacaaaataatcatcgttataggtttcaaggacatcttgaatgttagctttaagctttttcatggcatacccgatcggtaagtttgtggtatcttgatcgcaaaaactataaaatccatagtttgggtaatttttttctttcatctcaaattttggatggtgcggctttccaaaccgatgtaaaactttattaattgtttcatcaaatatttccagttaatgtactcttgagtaaaggttcattaattgcttttattcaaactttgctttgtcgcgttcattgcatttttattattttgatcatttattgattttttagaaaaactattgtttcaaaatgattgattttttttttgttttctatgcactatttattagttattattaatgaattttaaaatttagaacaattaattgaatatcgttaatttataattaaagaaaaatataaattacaaaaattaatacatttataattagttttaatatattttcttaatctgtgtgttttttctacaaaatcaattaaaaagaaacataaaaagtatataataaatttttaatttaacacaacttctagtttattattcacaatgagcaaattcttatttcctgtaatacttagataacaaagagtttataaacaacttgacaacggataataggactactaagatgatagttatttctaaaaatcttttggaaaaggcaaacaaaattagccaacactatagatattgtgagaaattacatagtgcgggtgaacaatagaatacgcaaacgtatactacatgtacatgggcaagaacattactacattagattgaatatgaatagaaattgtcataataaggaaacctctttttgtgtatcgaaaagtggtcgtacttatattcgttctaccacctaatcacattaaaattatagttcctgaatctttggaacttttaagaattgtaacttactattttcagttttcttcacccttttctcattatagtaaacatttcatttttagacttcgacatcaacaagaatttatctctctttcaatcatttctaatggatattctttataaaactctttgatacatgtacattagtggaagttttattctaagattagtttttagttattaaagaaatcattttcaccatgggatttatttcatagttgattttagtagaattgttaaatgcaagcatctaaccgatagatttcttaaagcctaagtgggctggaatctcttgatcggtctaaacttttaaatttattgtataaaatgatacacgaatatgaagtaaaatattgttcgatatgttatcgtgatgcattagaaattaaaaaagaaaatgatataggacacctattgtttgcccatatataatatttttgagaaaagttgctataagtgattatgaaagtgcaatgcaagaactaaattaccaatgaggaccatgaggtggtcaagcttaattgtatacttaactcgttaatattatcataatcatatctttacaaaagaaaaccatatcgttttatcaagaatatttataacatatttctcaccttcgagtaatatgatagaattgatgcaaagtaataaagtaacaaccatatctatatacacgtacacctagaaaaaatccaatacgtgcatcataatattgacctttggaatttaaaaaatggggacaaagacaagagacgagtgttttatcatgatatgtacacagtgaaaaacacaatgaggatatatgatatcatgaattcatgatagtggacattcgatcaacaactaacatgagctcaaactatatactgaatccgatccaaaccgacttgggtttgctatttttgtatatctgtttttacagataagaaaaaaaaacttgcattcaatcacataccatgaaccagaaacatgtaaatattgaacaaaaggcctagtacgtagttggtttaagcttttaaattagtcaaacatgtggtgtggctttgtcattgaaaaactcaatgattaaaagagaaaataaggcgatctagggttctttgcgtttctagcaagtatg

SEQ ID NO: 11369 - DNA, 3000 bp, Unknown; identical to SEQ ID NO: 11364
  misc_feature (1)..( 3000): cDNA_ID_3039724_gDNA_ID_2214492_Annot_ID_183708 3000 nt of promoter + ATG

SEQ ID NO: 11370 - DNA, 3000 bp, Unknown; identical to SEQ ID NO: 11363
  misc_feature (1)..( 3000): cDNA_ID_2686029_gDNA_ID_2214492_Annot_ID_183707 3000 nt of promoter + ATG

SEQ ID NO: 11371 - DNA, 3000 bp, Unknown; identical to SEQ ID NO: 11362
  misc_feature (1)..( 3000): cDNA_ID_2706333_gDNA_ID_2214492_Annot_ID_183706 3000 nt of promoter + ATG

SEQ ID NO: 11372 - DNA, 3000 bp, Unknown; identical to SEQ ID NO: 11361
  misc_feature (1)..( 3000): cDNA_ID_2717353_gDNA_ID_2214492_Annot_ID_183704 3000 nt of promoter + ATG

SEQ ID NO: 11373 - DNA, 3000 bp, Unknown
  misc_feature (1)..( 3000): cDNA_ID_3039734_gDNA_ID_2214492_Annot_ID_183699 3000 nt of promoter + ATG
aagtttggcccaatcgattattaacgaggcccatttaatcaaggaaatcatggaaattgaatttaccaaatttgggcctatgaatcatggaaattgaatttatcaaatttacgattgcattttttttttcttttatatttttttttttatataagaaaagaaaacgattgtatttgtaactaatgtaaattaaatatttgaatatcaaaatatactgtaatactatgatatttcactattgtcattaatattgttttttttctttgttgtgtgtttcgaccacaaatgacagatattgttttattctatatgaacgtatgatgtctagtaaacgtgctggtaaagatatttgggtaatattggcatatgtatgtttgtcctaagtttttcatttatataattgtagtagtcacctatgttatatcatcgaagtatagaggtagagttagagattgagagaacttgtatcctccgaattttttcgatattagtgaaatctgcagcagaagaaagtggacgtaactctttttgagtaaaaccactatatatcttgtgtgcacattattttttctactttaatttcgtgttcttgaaaaaaaaattagatccttaattcctgacatatatatgcaacaaatgctaagccacattagtcacctagtgggacataaaattaatacatcaataggggcattattagcaaaccttataaaattacttttaatttttaaaaaaaaatcatgtgtacaagtgaccctcccaaaacctatgtacgtcggccaatgtgcataatattacggacacgcttgcaagaaattttacacaatttcttagttgcataaaactactccgaccaattatctagctagtcctctacaattaatctaaaattagagagctttctcaaataattgtagtctacctaaattttctcattgcctctttctttaaatagcttaacaaaaatcactggtcacatatgtagtcagagtatgttatatatatgcatatattgaaacatcatcctattcaatctcacaacaaccaatctacacacaaaacaataacaacaacaacaacaacaacaacaaacaacaacaaacaacaacaaaatgtttacaaaatcaatccttttaccttttcttctggtaatcatcttcgtctcagcatctcaagctagtcgtcaactctgggatagtggaatcagcgagatgtttggttccaaatccgggtttcatcatggattttccgggttttcggggtcctctggaggtgctggaggtgctggaggatcattcggagatatgatgaatgctggaggtgcacatacatgctcggcgcaaggagcttgtagcggtaagaagctgacatgtcccgaggagtgctacaaatcaaccaacgttaacaaggatggttataaaagcaccagccgcagtggaggatgttcatttgactgtacgaccaagtgtgccgcgacttgttcaaattaacatgttaatttgcacatatatattatatgttcgtatagtatgttgttatgttatgttatagcattatatagtctatatatatgtcaatataataaaaccggcaaggtatatgggaggtttgtgtctccctttgtaattttgtatggatcttgattagaagctttctatgaatctatgtacataatatgattttgaataaaagaaaatttagtgtttcttataattgtgtgagtaaatctctatgccttatacatgccaggaaatttgagaccgtactaatgtacatagcgcgatcaaggaattttggcactatctatatagagttttagttcatgtctttttaagatcaacaagacattagcatcacatggctataatacttcagattattaaaataattcatctaatactttagattggtaagcatataatactaacgttttatgaatgttaaaacttaaatcccccaaaactttaaagaatcaaaacaactaacttatctgtataattataaacatcaattaggttcatttagagatcccaatgattataatcgatataatcaaattgaaaggaataaacatagatcttggtaatagttatagctagtattttaattcacattacggattggtgtttatctggcatctgtgatctactataatttcatttcattcgttatgcttattctaaactcattgcattcctttcttctccaattaaaatttatcatatgaataacatgcctttttcaccaatttaaaaataatgattacttgttatatttagatgtattataaagtaaaatatttttattttatttacataacccatattaattattccaaaatatatgatgaataaatgatgcatagtataaataattgtgatttgaatgattttgtcagcggtaaatgtcactagatcactatttgtgtttggtgaaagacgaattatactttttttgttgttcaaaaaagtacccttttcccccaaaacacatttttagactaagattataatttatcatttatcaaaaagtaataaacttaaatttgaatcatcgttgtaatattagtattatatatatcgaataagaagctatttaaattcttaaaattatattttttttttaaaaatcagatttttcatagcaacactttaagatagggggtactagtagtatgctttgatgatacaaatagcttaaacaaaatatttgcaaagaaattaaaatacaatcttagtagcatgattcgctatcacaaattctcaggttaactaaaattaaagatcctccccacatacaaaaagattgtagtctcccttattttgctcattaccctttcttttaaatagccttttaatattcttcatagaatcaatttcaaatctaaacttaaactctggcctctcttatatgacaactttaatgaataagatcttacttcttttcttcaataaatatttcctctgttcaatttcttgttttattttatttttgaagaat

SEQ ID NO: 11374 - DNA, 3000 bp, Unknown; identical to SEQ ID NO: 11359
  misc_feature (1)..( 3000): cDNA_ID_2992127_gDNA_ID_2214492_Annot_ID_183697 3000 nt of promoter + ATG

SEQ ID NO: 11375 - DNA, 3000 bp, Unknown
  misc_feature (1)..( 3000): cDNA_ID_2717337_gDNA_ID_2214492_Annot_ID_133498 3000 nt of promoter + ATG
aagtcttaatatcgttttttaaaaaaatttgaaattacatttacaaatcgaaaagtgttaaaaaaaacttaaagataccaatttgacctaacttttttttttttttggacctaacttttaaattagagaattggagacaatgagaaatcgctgtcgaacatacattgtcgcaaaactccgccgtcattgttccccgaatccctgacagtgaacttcattgttcaagcgaggtgagtttcctatttttcttcttctcctttcaattaaaatttcagggtttatgatctctagggtttaggttttattttcttaaactaaaccctaaattctttttcttcttctttttcttgtaatttccagatgcactgcgaacgctagaggaggtgcgatatcgaagaggaagcgttatacaggatcatgggaccaaaatatatcgtatagattcggttcttgttcttctataccttatgagagtagaagtttttctcttcaagagaaaaaaaaaaaaaagaaaaaaaaaaaagaagagtagaaatttctctgtgtttttttttaccaacaagacacaaatgaaactggtccaaaaggagtgtgtataatctctgtggagacataactaatacgttgatgaatttcaagaatacttggattatatagattaaccctgactcccttagatagagatcgaaatcgggtggtgatttctgagaccatacaagttctgatcagattactactaagtaaatcttaattattagactgtttttaatggatttttctgctctaatgataacgtaatgagattttttttttttttttgtatgtttggcttgcagacccgggtaatgagaagtttggtaagagcaaaaggcactaatctcacgtaagaaaacacttttttcatcaaccatgtatataatcatgtcggtttacataaaccgtatcgtctattcaagaatttagttttgtataattataatatttttttcagactacttttcaattaagcatctttttcttggatttttttttcacaaagggagagctttaactttttgcattaacttatatattttaaattatacatgcatgcataccgacttatataaatcatatggtcaatatgagacttttgatttatattatttgtcaactaagcatcttttcagatgaggttcatgcacctttgttagaattatcggaccagaagatcacatcaacgtttaccaaatcaacaaaaaaatccaatccgtccaaaaaatttggaaactgtttgaaagattcgaaatgttggagcaaggatactcagttccaatctctgagcagaatctgatatgactcatctactcataagactttgcgagatagaccggtacaaaaccgtttccaagggttcataatatatggattaatgtgagttattgtggacgttgtggttgtagaagccgcggtagtcgtggaaacactaattagttatctcctgtaagctatttttattttttttcctcacttcctcttcctcgcagctatgtataattttggttggttatctccaaaactttttatggtcaaacaattttgagaaagtaatttggaaagaaaaaaggtttaagaatatctttttatcgtcaagtcctcctccaaattacttccttaaaactgtttgaccataaaaagtcatagcaaggtattagttattctaatttaaattaaacgcctttttatcaacaacaaaaaaaagaagaagatttgatatgttgaaaagtattagggacgcttattagggcagtattcctagttattgcattttctttcggtcattcgaccttaggatcatacctcaatctgtatgactgtattcgccatgtgaattccaatattacatagtgaccaaatttgatatccaactaaaagtcgatctttgatctaaacgaaatgacaactatttggttagtgattgcaggttggaaagatttaccttctagacctgtcttacgaagctagtattctaaagtaatcttcataaaccgaattcagaaacaaaaaaagaaaaggagtccaaaattgtatgatcatacattaatatcagaatagtctcttttgttaaataaatatctgaagaatatatatctctttgattattttgtggatggcaatgaaactaagaatatatattcattgacttagaagtcgacaaaaaaaaataaaaaaattattgacttaattactagttgaccaatatatatattattaaaagaacatattgtatcgttgaaagcggatcatcgggttttaaaagaaaaacacatcgttgaaacttgaaagtgatgactaataaaaagatctaaacgtgtccggtcacctaccaatgtggttttgcaaattattgtcaagtaccttgactatattaaataaaaaaattcaccgtaacacattgatattcaactgattcctaaaaaaatatacaaactattgggagttgtgagattttttatatcagtgttggtctctttacatttgtgatgtggtgttatagcatatatagtaataaactcaaaaggaaattagatgtgttttgaccatttattaaaatgaaccttttcttgtcaaacatttgaaaaatactagtttttttttttggcaacgttgtaaataatagttaaaaatagattttaagtctcgtttttttatgcatatagtttcattcgctttattagactcaaatatacttttaattaaattttgcagagaattaaaggtaatcatttgccaaggaaaaaccatgcaaatatgcaataagtagaaataatgttaatgagagtaagcgttgacatatattacgtcctggtccgaacattcttaaagttgcgtaacactaataaccttagaagatggttggttgactatcaacatcttattgaccaaatgtttttttttttttaattataaaacagttgctcattgctctagcccagagaaagcagctcaattaagtaaatg

SEQ ID NO: 11376 - DNA, 3000 bp, Unknown
  misc_feature (1)..( 3000): cDNA_ID_2706397_gDNA_ID_2214493_Annot_ID_133501 3000 nt of promoter + ATG
tgtgatgggcctgttttagtggtagaaagcatgtgatgggttttgaagagattagttttgagagagattcaaattgtcttgatccaaattccaagcgatatacaaacttcgagagaattgtactcctaattagtcagatgcaattgttgagatagatagacaatgtgtactcagttataatttttataaaatgtttgtcttgagattttttttttgtaaaggataggaacatttcctttttaaacgggaatccaaattagggaacaaggaagtaagagccacgttttagaacttctaagtgaaaagacaacaaaacacagctcatgtttgttcctggattggactcattcataaacgttactttcatttctgttatattttatgtaacacatacacatatatgaaactataaaataaaacaaaatgaggtaatgagagaacggttaatgtaaaactgtatcggacaacgacttccttaggttggaggaatagtagaaggaagtcctcttcacgttcaccgcattgattgatagtgtttctctttttggtgaaaatatcaaaatatagttgtgtttttgacctttcaactgaaacgttggctcctcaagacaaagattccaccaactgttttatcaatttatcacgactccactctctaacctacatatccaaaaaaaattacatctttcgtaaatttgttcaatttcttgtcatttgcattgttgaaacatatatataggtattagattaaaaattgttgacattgtggatatctatttagccgtctttatgaaaacaacccgaaacgactaggttggcttttgttccacctaagaccatggtactacgtctaaattcaatggatttaaatataaataatattttctatatattagatggcgtttatcatgttatttgttttgttaaactcgttttatcatattatttagcattatcttgatatatatttggaagatctaataaggcgtttatcaaaatttgatttcatttcttttcaattgaaattgatggtttgtaataagaaacatttaacttgatagattttctttgtacatgtatgatctgtataatttattgatgatcatctatataaatatgatgtgcattttgtgtatggtgatatcatgcatagtatatacatcgtaacctaagatttggagcctagtatatactacacgaatatggtttgtactttatactttgcaactatatagcccatcactacaagtctacaaaattgttgaccaaaacaatcgttagcacttgtaattttgaattacagtgttgaaatcaagtaaacacctaatttcaaaatataaccgttcaagtcaactaacacgacccctcctcttatttatcacatgtacacttggacaatacattgatgttgattataaagatttaaaagaaagtttggtaagttgcaactatccatttaatcaacataaaggttcctttttgctatcataaaaacaattatttaaagtctcttttttctgaacctaccaagttagattccatggataagaaatgtagaagtaataatagaatgaatacatatgcatgttctacaaatctaattcctttatcaataattgttctactttcaatccaaaatacaatactatctttggtatctagcattttgtctatgtttaccaaccattctcagatttatatatgtaaataaaatagcatgaagaaaaaaaataatgcaataagtaactcatttggtaaataaattattattttttctgtctaactagagattgaatatgttgttctcaaatttgttatcagaaaataccttcaatatgaatatatattcacttacgtacactgttttttatcagaccaaatgtaaatggatggctcctttttaaacggctatctaaattggtggcgctataaaaaaattggtgggattaattaaagatttactatcataaccaaagaaaaaggacatgatcccaccagagcaaaatcaatacaattttttcgaatgaaagagatgtgttatgaagataattagttagataaacacggaaactaatattcttggcttaaagatttataaaatggtcgttaaagaatcataattacattccatcaaaacaattagctccgacggcgcgtgaatttcaaacgaaaagagagagcgcgtagtcactttccagcaaacaagaggcggaccagactgtgtcgaatttatatttaaacgttttttcttctctttaacgatgatgatggcgtgaaagaaagagagagagagattaaagaaatgatgatgagtcaagcgagctgtttttgggaagagagactaaagaatcagaagactaaaggtgtcgtctcctttctctctcttttctacttctgcattttcttctatcttcaatcttttgcagaagaaataaaactctgaagactaaagactcttctctgttttttttcttcctacttctgcctctctctgtttctggggttggcttaaaaacttgtaagaagaagttttatagaatctattcttcttgcattctcatgaattttgttgtctccatttttcaatggtaatttcttgttgcatgaattagataattcttgcatctgtaaactataatcttacatgttatattaattgctagcttttcatgtgtttgaaaaaatttcaaggtttagtgtcaccatttcttttttttttgtttgtttccgtgttcttgcatctttttctaattcgttgattccttaccgttgaagcaaaaattaatctgaaattaagtttaagattagtgcaagttccattttgggattttgtttacagtaatttcttgaactgtttcttttaattataaaagatatataaaaaaagaattaaatagatgcagtcacgagaatgcagagtttcaggttgatgattataagaagacatgtttgtttaattgttctttgttctttttgtaaacagacaagatcctgacaatg

SEQ ID NO: 11377 - DNA, 3000 bp, Unknown
  misc_feature (1)..( 3000): cDNA_ID_2706393_gDNA_ID_2214493_Annot_ID_133503 3000 nt of promoter + ATG
agtcgaaatacccactggtgtcacagatgtcagcgtgctgtccgccttcacggccaagagcctgtatgcttttattgcggaggtggatttgttgaagaacttgatatggctcaagccagcccctttgatatgtttagatcccacaggggtgttgtagaacgtgatcagacttttgatctcatggatgctttctctgtgtttatgaggaaccgcttagctgaaaggagccacgacagagaaatcagaggaagaaccatcagttcaggtcctgaaaactttcctggtctggcccctttgttgatctttggtggtcaagtcccttatagactaactggcgacaatgcagtcgaagccctcttcaatggcggctcccctggcattggcatcacacgtggtaacaccggcgactacttcttcggtcccggccttgaagaattgttcgagcagctttcagctggcactactcgccgaggcccaccacccgcaccgagatcagcaatagacgcattgccaactatcaagatcgcgcagaggcatcttaggtcatcggactcgaattgtcccgtgtgcaaagacgaattcgaactgggatcagaagcgaaacagatgccgtgtaaccacatctatcattctgactgcattgtcccgtggctggttcagcacaactcttgcccggtctgtcgccaagagctaccatcagctagcggaccttcaagcagtcaaaacagaaccacccctaccagaaactacagaagcagtagtagtagtagtagtagtaacagtcgtgagaacgggaatgaaagaaggaatcctttctcttccttctggccattccgttcgtcaggttcaagctcaagctccactcaaaaccgtggaggcacaagaaactcggatacaagcgatgagaaccataactaccatcaacagcaacatcaacaatcatatatgggttacagtggctggccttttgattactaaaagtctaaaagtgagctaaaacaaatctttggtctcactttggtctctttacttaaatatgcttgtgattctgcatatgccttgtgcttcactctctatctctctcactctcttttatcaacataaataatggagaactgtatttgttactgtagattttctttctctgttaaaaacgagttcatcattttctatatgctttgttaaatatgtcattttagttgggtttttgaaaatggttgaaatagatttttgagttgatcgataaataaataaatgaaaacgtctggacactcttgagcgatctatcagtatctcgtgatcttcttcaatactaataaaaaaagggaaaagaaagagaagagagtcgtgctcataaattaacggtgcagagcgattgaacaaaaacaaaaatatcttccagaaaaagccatttttgattgcgtataatgaatacacgaaattaaaatcattacttgccatatatagtacactatttctcagcttcactcactctcgagactcgtgtatgttgatttacggtttgttcaagcaaaggtgatcatcaattcccaattttttttacgtcactattttcgattcactccaatggcttgcgtgttgctgatttcttgattttgtggttcttgagttagtctccatctgataagtaagtaaattatgtgattgtgatctgggttttgctaaagttttgatttttattattgttgtttagagaatgatgaatctaggatctctttcgttgagtacgagcaagtcgagtaagccaatggttagcatcagcttttggataccgtatttcactcactggggagagagcctgctggtctgtggctcggctcctggacttggttccgggaatgtgaaaaaaggtttgctgctaaagccatcccagcaagatgatcagctcatctggagtggctctgtctcggttccacctgggtttagctctgactattgttactatgtggtggatgactcgaagagtgtgttaaggtcggagtttgggatgaaacgaaaacttgtggtgcctgagacattgaccggtggagagtctgttcatcttcgtgatctctggcaggtttgagttctttgtccttttcgagtgtattatacaaattttgtaatctgattttgtagtgttgtgattgatgttctgttcctttaattttagagtggggatcaagctcttccatttagaagtgcatttaaagatgtcatcttccaccacagtttcgatgtgaaagtagaaaaacctctaggggtctttatgaataagtcagatcaagatggtattcatttttttatctaatcctatcacaccattgtctctgagattctctagtttgtgattgatctctttgctaactgttgtggccttatgactttaccatgtaaacagattcagttgttgtccaattcaaaatctgttgtccagacattggagagggaacatctgtaagcctttctctatgatctttggttttctttcttttcatgtttgagcctgatgtggtgttgtggccatcattcttacccttgattatgacatgtacaggtgtatgttctaggcaccccagaaaagttggggaattggaaagttgaaaatggacttagactcaactatgtcgatgattccatatgggaagcagattgcttgatccctaaagcagactttcctatcaaatatcctttctttttactttcttccagactaattagttgaacatagttgacacttcacttctcatatgctttctgcatgttgggttcttaacgattctttcacatatagatactgtaaagttcagaaggaagatagcatagggtttgaatctggtggtaatcgggagctgtctcttcactccatcggtagtaaacaggaatacattgtcatgtcagatggcttgtttcgagtaagtaacagagacaagctatgaactagctctaatgtgacagaatcaatgttgtcttactattatttaattttacttgtaggca

SEQ ID NO: 11378 - DNA, 3000 bp, Unknown
  misc_feature (1)..( 3000): cDNA_ID_3039766_gDNA_ID_2214493_Annot_ID_133505 3000 nt of promoter + ATG
cttcgatgatgagtcatttgcttcaccattttgtttggacacctcctcaagggactaaaccggaggagattgacatgtctgaaaaccctggactcgttacttacatgcgtacccctgtgcaagcggttgcaacgcctcggttgccttcggatctgtacaaacgcgtgccttacgatatgtaaatgtcactctgatctaccttttgttgctgctgctcatgctcttgttgttgtttgtagacatgtttcttgtggtttatcatcgaaaaacttttgatgagatttgttgtatcaattctctcaaggagaagtaaagaagccatcttctttgtcattgggtttacgatctttcaatcagtgcaatgttgtaacttgaaacataagaataaacaggaaacaaacatacaaagatatttgcaggacataagaacaagtttcttgattacattaactttttaggtttcgcatatagcaaagtattttacacacatataattaattactctcagagcatttgtaatcattaacttgaacaagtgaaattcaagaagatgattccttgaactcctgcaactgtttgaagttcatccatggcttcacccacactttggcttcaaaattcttagtctgatcaccttcttttgcttctagggttaagtggtacatcgttcctgcaactacctgctcccttgctttgacaatcttcttgaactcaagaattttgttctgtacttacccggaaaaaacaaaaactaatcagataaagatatattcataggttattataatcagatcgaaaacagaggatttaaaaacctgttgtttgttatgttcttgaatggcaaatcgagcgagactctcgatctctccactgttctgatttcctcggagatcatgaacgcctcctagcatcatcgtcttctctgtgcttttctcttctgatctgcaaatcgctaattgaattgttccacagagaagaagagtaacgatccagaacgtctttgattccatctttaatagacaaacttatgcttcttcaaatttcagattcgtaggttttggccatgtcggtatcttttacgttacttggcgattaaggtatgaaagtgacaagtcaaggaacaaatgacacgtgtcttcacctgagaggctgtgcgtttcgttctctctgaaaggtcaaagagataagaaaaacaaaaagcggcacgctgtgtgtggtttatattaatttgagagcgttccaaacacatgaaaacggtatgcattctacgaggttactgttgaaactgcgaaattggggaattcgtcgtcgtcatcacgctcgatcggttctctgttcgtcgtttgtttttccggtggagaaaaatggtgatggaaattgtgaaaccaaacacatgcattagaggatgttgcaccagtgaatcgatccctcttcatctcccttcttcttccttcactcttctctccccaatcgctaaaggtactgtttcttctcttccccagttccccctctccctctcactcccgcaatcttcattcgtttgaattcgatttgtctggagaaattttcaggatcagagagtgttgtttatgaagcgattctcgatggccgaagagtagcagcgaagaagcctatcttgtctacttccgatgaccttgacaagttccacaggaatttgcagctctcatggtctctctttcattttccatttccattttaaatttcgtaccattttcaaaatgttgtttttttcttactttgctgtggattggtgaagcaatctcaatcatcctggtgtggctaagttactagcagcacatgcgaagcctccaaattacatgtttttctttgacttctacgagtctgggactttagctgagaagttacacgtcgaggagtggtctccgagtattgatcaagtgttactgatcacgcttcacttgggtatgtgactctacttgtctcaaaggaaccttcttttttgccattcgtgtgtgactctgacgatttcttcttcttgtcataaacttttcaatggttactaatttgaatatctgattctatctgtttcgtttttttcagcaaaggcattgcaatatcttcacaacaacgggattgttcatagggatgtgaaaccagcaaatgttcttgtaattctcttcttccattctctagattctctatcttgttatgtgcttatttcatataggataggtacttcttctgtttctttatgaaatttgtgtgtgatgcttaagtgagcttttgttgttgcagcttgacgagaagtttttcccatatctggctgactttggtttagctgaatacaagaagaatttgcgcgaagttaatctgcagaattggagatcgtctgggaagccaactggtggattccacaaaaagaatatggtcggaacacttatttacatggcccctgaaatactgaggaaagacatgtatactgagaaagcagatatttatagctttgggattttgatcaagtaagaattatctttgagtagaaattgtaaagttttttcttcgtattttcttacattcaacttttctttagatcttatatttcgtttggagtatatttagctttcttcctaaaagatccctgtggttatgaattttttttccatcttacattgcagtgagcttttaactggagttgttccatatactgatcgtcgtgcagaagctcaggttaaaattttctttcctcatttcgcattttgacattattatctctgggagaagcctttatatacgatatactgtattttcatatattcaggctcctgaattgcattcatttgccgttcaatgatattgctatatcttggcaagcccaattcttacgatttctgtgataaatatatatgattttatggacatatagcagtttatatgaatgcattcttgttcttttcattcatgacacatagtgtttccctttgcatatcttgatggcaggctcacactgttttagagatg

SEQ ID NO: 11379 - DNA, 3000 bp, Unknown
  misc_feature (1)..( 3000): cDNA_ID_3434303_gDNA_ID_2214493_Annot_ID_133507 3000 nt of promoter + ATG
aagggtgaccggcgcggcataaaattgccctggagtcaccaacattcgcaacgaaaagcttattctctactaggagagaggctatagcagtacaaccaggatgccagtctttctgactcaccctttttgactgacgatgggaatccagttcttgtctgaaagctaaatctgtcctaacaaatgcttgtgacaatgcctcgccagcgctgaaaatgaaacatgccaatgggtttttcgaacaaaccatgctgagaatatgaaaagattgaactgagcattaaccttgtggaacataagctttgaactagtcctggcaaaacttgagcagaaaattcagcagctgcagcgcctgcatgtcattcaagatgctattttatatcctatttgatggatagctaaagaatttggagtaaaaagagagagggcacaagtaagaatttggagtttaatgcgtcctggataaaattggcagttggtatacctctatgaccatcgaagatggcaaataagtggatgctttcctcattacacatgtgcggtatgatgaagtgtgtatcttccatggattctcttcttccacatgttgcaaaagacccacaagaaattactgggacatatcttgaaggttcatctgttgaactagaccataatttcacatcaaagacagtggaaacagacgatttcttggataaacactccccttgactaaaccaattaacggtgtccctgtaatctcctgaatttttaatgatgtccgccccatccgtatcactctgggaattagaagttttctcaaggagatgaccttgctgttttcctctcacttgttcccaaattgattctagttccaaaaccacattgtccgaagaaggtcgtttagacggatcagattcccagcagttttgtatcagagatagcaaactctttggaaggtgcaatccaatttcagcaagagctggtcgcagaccagaagacacaatggcaactgtaagttgctgttctgtgtaattcatctctaaaacagtgtgagcctgccatcaagatatgcaaagggaaacactatgtgtcatgaatgaaaagaacaagaatgcattcatataaactgctatatgtccataaaatcatatatatttatcacagaaatcgtaagaattgggcttgccaagatatagcaatatcattgaacggcaaatgaatgcaattcaggagcctgaatatatgaaaatacagtatatcgtatataaaggcttctcccagagataataatgtcaaaatgcgaaatgaggaaagaaaattttaacctgagcttctgcacgacgatcagtatatggaacaactccagttaaaagctcactgcaatgtaagatggaaaaaaaattcataaccacagggatcttttaggaagaaagctaaatatactccaaacgaaatataagatctaaagaaaagttgaatgtaagaaaatacgaagaaaaaactttacaatttctactcaaagataattcttacttgatcaaaatcccaaagctataaatatctgctttctcagtatacatgtctttcctcagtatttcaggggccatgtaaataagtgttccgaccatattctttttgtggaatccaccagttggcttcccagacgatctccaattctgcagattaacttcgcgcaaattcttcttgtattcagctaaaccaaagtcagccagatatgggaaaaacttctcgtcaagctgcaacaacaaaagctcacttaagcatcacacacaaatttcataaagaaacagaagaagtacctatcctatatgaaataagcacataacaagatagagaatctagagaatggaagaagagaattacaagaacatttgctggtttcacatccctatgaacaatcccgttgttgtgaagatattgcaatgcctttgctgaaaaaaacgaaacagatagaatcagatattcaaattagtaaccattgaaaagtttatgacaagaagaagaaatcgtcagagtcacacacgaatggcaaaaaagaaggttcctttgagacaagtagagtcacatacccaagtgaagcgtgatcagtaacacttgatcaatactcggagaccactcctcgacgtgtaacttctcagctaaagtcccagactcgtagaagtcaaagaaaaacatgtaatttggaggcttcgcatgtgctgctagtaacttagccacaccaggatgattgagattgcttcaccaatccacagcaaagtaagaaaaaaacaacattttgaaaatggtacgaaatttaaaatggaaatggaaaatgaaagagagaccatgagagctgcaaattcctgtggaacttgtcaaggtcatcggaagtagacaagataggcttcttcgctgctactcttcggccatcgagaatcgcttcataaacaacactctctgatcctgaaaatttctccagacaaatcgaattcaaacgaatgaagattgcgggagtgagagggagagggggaactggggaagagaagaaacagtacctttagcgattggggagagaagagtgaaggaagaagaagggagatgaagagggatcgattcactggtgcaacatcctctaatgcatgtgtttggtttcacaatttccatcaccatttttctccaccggaaaaacaaacgacgaacagagaaccgatcgagcgtgatgacgacgacgaattccccaatttcgcagtttcaacagtaacctcgtagaatgcataccgttttcatgtgtttggaacgctctcaaattaatataaaccacacacagcgtgccgctttttgtttttcttatctctttgacctttcagagagaacgaaacgcacagcctctcaggtgaagacacgtgtcatttgttccttgacttgtcactttcataccttaatcgccaagtaacgtaaaagataccgacatggccaaaacctacgaatctgaaatttgaagaagcataagtttgtctattaaag

SEQ ID NO: 11380 - DNA, 3000 bp, Unknown
  misc_feature (1)..( 3000): cDNA_ID_2706385_gDNA_ID_2214493_Annot_ID_133508 3000 nt of promoter + ATG
cgaaaatcgacgaagctgatgaggaggatgttgaaaccggaaaggctacgtcggagaaggagtcgtcagttccggaagtggtggtggtagttttttgtagtgaaaatgtgcatagcgtttcacgacctaactagatgggttttcaattttttttttactttttgttagaagcaaaattggggagaagagtaacttctttttttgatacttgtaagtttgaattccttttcccgtgcttcaaaagttttatattttatttatagttttgatttcttattgtaactaagggattcgattttgatcgttgactagctatacaatcccgtgtaatcactacatttggtattggtacgcatctgttacataccatttttacggcggttttagtgaactatattataaaaaaaaatcgtaagtttttttgtgtgtgtgttaacaatgtactcactactcactgttccatatttttgatgtacgtatatcgaaaacattctgccaacaaatgcaaacataacaaaagtcaaaaacaataacataaccgggaattaaaccaaaatgtaattgctttttattagtgtcaggccttctgcttaaaaatattctcggcccagagcccattaacacctatctcaattcatattgaagaaaatgactatattacttgacaaaaactttagtcagaaaaatatggaatctctttcggtactgctaagtgctaaccttaaatagtatagaattcttagttcattctcaaaaacatagctatatgtagattataaaagttcgatattatttcctgcaaaagatgttataatgttacaacttacaagaaaatgatgtatatgtagattttataaactggtaccgtaattcataaaagatggtggtgggtatgtatcagtaacggaacttacatatgcgtgtgtattactatgtctatatggtgtattcctttgtgtggaacaatgcacgtcagagttgtttattttcttatagaatttaaggaatcaattattggatttctcaaggtgaaagtggacttctttgcacgcaaggtctagttgccgacttgccgttgcatgtaacatgattgttgaaataaagtgaattgagagaagtttggccagacattttaaatttaacccaaaaaaagtagggcctaacacaaaatataacctctctttgttcaaaggaaataacacctacgtcttataattgaaccaaacattgaatcattgaactcacctataataattataataacacgaattcacaagacacctaaaagaaaaagttcacaaaaacaaataaaaatttacctctcaccaaacacactcacctacccgtctggtcccactgaccccaacatacaacaccgactctctcccacaccaatttttttttttggcgttttaaaacaaataaactatctatttttttttcttaccaactgattaattcgtgaataatctattatcttcttcttttttttgtgacggatgattagtgcgtggggaaatcaaaatttacaaaatttgggatgattccgatttttgccattcgattaattttggttaaaagatatactattcattcaccaagttttcagatgagtctaaaagataatatcatttcactagtcacttaaaaaaagggttaaaagaacatcaataatatcactggtttccttaggtgacccaaaaaaagaagaaaaagtcactagtttctttttggaaattttactgggcatatagacgaagttgtaatgagtgagtttaaatttatctatggcacgcagctacgtctggtcggactataccaagttaccaactctctctacttcatgtgattgccaataaaaggtgacgtctctctctctctcaccaaccccaaaccactttccccactcgctctcaaaacgcttgccacccaaatctatggcttacggggacatgtattaacatatatcactgagtgaaaagaagggtttattaccgttggaccagtgatcaaacgtgttttataaaaatttggaattgaaaacatgatttgacatttttaatgatggcagcagacgaaaccaacaacactaagtttaacgttcgtggagtatacttttctattttcgaagaagacatataactaagctgattgttattcttcatagatttcttttcactgcgaataaaagtttgtgaacatgtcaccgtttgaacactcaacaatcataagcgttttacctttgtggggtggagaagatgacaatgagaaagtcgtcgtacatataatttaagaaaatactattctgactctggaacgtgtaaataattatctaaacagattgcgaatgttctctactttttttttgtttacattaaaaatgcaaattttataacattttacatcgcgtaaatattcctgttttatctataattaatgaaagctactgaaaaaaaacatccaggtcaggtacatgtatttcacctcaacttagtaaataaccagtaaaatccaaagtaattaccttttctctggaaattttcctcagtagtttataccagtcaaattaaaacctcaaatctgaatgttgaaaatttgatatccaagaaattttctcattggaataaaagttcaatctgaaaatagatatttctctacctctgtttttttttttctccaccaactttcccctacttatcactatcaataatcgacattatccatcttttttattgtcttgaactttgcaatttaattgcatactagtttcttgttttacataaaagaagtttggtggtagcaaatatatatgtctgaaattgattatttaaaaacaaaaaaagataaatcggttcaccaaccccctccctaatataaatcaaagtctccaccacatatatctagaagaattctacaagtgaattcgatttacacttttttttgtccttttttattaataaatcactgacccgaaaataaaaatagaagcaaaacttcatg

SEQ ID NO: 11381 - DNA, 3000 bp, Unknown
  misc_feature (1)..( 3000): cDNA_ID_2706381_gDNA_ID_2214493_Annot_ID_133509 3000 nt of promoter + ATG
cgcccatcatccgggtttgattcctggccattaagaaattaacatgcgtacttgctctagtgtctcagaccattagttccagcggatttttatgtggaggtttaaaaatccctaatcgcgggtttaggcccagtaagataataagattactgtgtggtctggatatttagttataaaaaaaaaaaaaaaaaaaaaaatgtggagacagacgtccgacaccgtgcatggttcagctcgtcacattgattctatagtttggtaaaaatatatgaatcatattgaaaactcaaagttatttaattagagttacgaatgatttttacgtgacaaatcaaaagtcagatacatatgccagattttgtcagaaggattttgtgtaagcatataattcccaatcgcagagacgtaaaatattcgattcgttaactaaatcgtaaggagttgacacttgtctccgacagcggccagagtcgatttacgtggaatccacacatccgcacttgcatgacacaaactgcaccttttcatctgtttttttttttttttaatttgaaagttttacacccaatggtgctaattttagtagccacatacataactataatattaaaatgtgcaagagatcattacataattggaacgaaattttgatcatgaaacatatggtttacactaatacacgaatagaaatcctattatgatgagttcatgcatgatacagtggttggtatacttcactataaatttatatgatcttgaactcgaatataacatagaatgatcatatatatatatatatatatatatatatatgaagacattccaatattgttactattgttaaataatcaacatcatatcatttgtacaacactagtcagttggttcaatcataatacttctaaagtacttatgtttttatacatgcagacgagtgagcgtgagacatttcctctatttggataagtatattgaattattaattattaacataatggatagtttaaatttcaaaaaaataacaaaaaaaataatgatggatagactagaacctccaattaaaacaatgcaaatcaagatgttgaaccgatcgaaccatcaaactttttcggattgcataataaaataattcgtctttgttctcattctcaccgtgcatatacatatcaacaaagtcatgcgacctaatataatacagttgaatctatctaatttttttaaaaaaaattaagatacgaattccacacaaaccttctccaactaagtaaagtagccactattgtcacttaaagtgacattaatgcatattctataaaagataatggatgcccaactaaacataagtgaagtatttgggatatataataaaacaaaagaatccaatgagttatgctatgtggttagcttttgttcacgaatttatatattgtataatatatgaggtttacatttcggataagcaattctaggcagatcgatgatatgtacgcaaacatgtatagatgtattcaagaattgagtatataattgcttatccgaaatgtaaacaacaggtatgaacatatataattaagtgcccaaaacagaacatatattcaagattttcttgtactaataatattcttttttttggtaaggtgttctaataatattctgattagattaacttttaaccatatataactcataattattttgttacgtaactctaaaaatatctggggttttatttctttgtgaagagatcgataacagacaagacatgtaacacatattttgtccaccttaaatttctaaacatgaaatgtagttttgagatattggccggtcccaatgtacgtaggattgaacccaattgattattgctgccacgtggaactcaatctgtccacttatgcttcttcattgatttaacctcttattaaagatcgatgatttatgaccatgaatgtagtaattaggatagaggtggacatacgtcagattccacacgtatataaccccatattagcattacaatgagttaatctttttgcagaggtcggtcgatttgtcaaatttctactatacattaaccaaaagatattctactatatattaaataaagcaattagcttatgatggtgatgagtcatgagaccacatatatcgaaaaccacggtagactaacaatcgcaacaatttttctgtggctttcaagtttcttttaatcttttaacaatacgctaatccgatccggctaattttagttcagtttggattttgtgattttatagacaagtccacagtttaaaaaaaaaaaaaaccatgtttaaagccaattgcatgaataaaataatttacatgcatgttagaattacgttttagtgtccatatgtacttattagtttttttgttttttttgcaactacaacatatactaatgttgttgttttttgtgcaactaaaacatatactactataaacatgtaaattttgattgttaagaaatgaggtgatgttaattaatcacttgttccacactgatcacacttttaacctcgacttttagtagccacaagttttatttaaaatcctaatatgattggtttcacgaagtcatataaacagaatatatatatgtagaatgttttatccacttactttagagataatgaattcatgacacccaattcttatgccgaatcaaaccggaataattaacgctaacgtcaccgaaaaaaaataaaataaaaataacaaaaatacaaaggaagaaatcagagaacactgaacatatccgaataatatgctatatatacaaagaacctctcaccacttggttctcaggaaaaagcacattctccaagtgtttctctcctctcttttcctaactcagttttcttatatacataacactaatttgacaatttttttgtcctcgaggatcctaaaataactccaaaactttgattggtttttcttgctctaaaacaaaaacaaaaacaaaatattaagatg

SEQ ID NO: 11382 - DNA, 3000 bp, Unknown
  misc_feature (1)..( 3000): cDNA_ID_2706369_gDNA_ID_2214493_Annot_ID_183740 3000 nt of promoter + ATG
agaaacgttgcggtcgaccagaaggttaaagtggaagaagctgctacgacgacgacgtctattaccaagaggaagaaagagatcgatgaggatttgactgacgagtctaggaacagtaagtacaggagatcgggagaggatgctgacgctagtgctgttaccggtgaagaagatgagaaaaagagagctagactcatgagaaaccgtgaaagtgctcagctttctaggcagaggaagaagcattacgtcgaggagcttgaagaaaaggttaggaatatgcattctacgattacggatttgaacggtaagatatcgtatttcatggctgagaatgctactctaaggcagcaattgggtggcaatggaatgtgcccgccgcatcttccaccacctccgatgggaatgtatccacctatggctccaatgccttatccatggatgccttgtcctccttatatggtgaagcaacaaggatctcaagtgcctttgattcctattcctaggttgaaaccacagaacacccttggaacatccaaggctaagaagtccgagagtaagaagagtgaagctaagaccaagaaggtggctagtattagttttctgggtcttctgttttgtctatttttgtttggtgcattagctccaattgtgaacgttaattatggaggaattagtggtgctttttatgggaactatagatctaattatattactgaccagatttacagtcagcatagggatagagttttggatacatctcgtagtggtgctggtactggggtttctaatagtaatgggatgcatcgtgggagagattctgatcgaggagctaggaaaaatatatctgcaacagagagttctgtcactcctggaaatggtagtgagcctctagttgcatcactctttgttccgaggaatgacaagcttgtgaagatagatgggaatttgattatcaattctatattggcgagtgagaaagccgtggcttcgagaaaggcttctgaatcaaaggagaggaaagctgacttgatgatctctaaagattatacccctgcactgcctctacctgacgtgggaaggacagaggaattggctaagcatctctatagatctaaggctgaaaaacagaaagctctatcctctggctctgctgatactctgaaagaccaagtcaaaacaaaagcagccaacggtgaaatgcagcaatggttccgtgaaggtgttgcaggtaatcatgggtttttgatcttactttctgttcccttgacttggttatgtaggcaggcattgtaggtatactagtccttatcatatcttgatattagacacaagaacattttaatgaggcttaacttaccttcagcaaatctctggtcatgagtagatgtattgtataatctggattagatactaaacactaataaggaacatgtgaaattgttactcatattgtatatttttcttcatctttctcggcagaagctgtaagcgcagtagtagcgtttatatctttcttgttcactaaataataacaccttttttgtttgttaaatgactatattgtaggtcccatgtttagttcagggatgtgcactgaagtgtttcagtttgatgtatcctcaacctctggagccatcattcctgcagctaccaacgtctctgctgaacacggtaagaacaccacagacacacacaagcaacagaacagaagaatccttcgtggtcttcccattccactcccaggatcagattttaacctcacgaaagagcaccaaagaaacagcagtagcaaagaaatcaagcctgcttcatcaatggttgtatctgtgcttgttgatcccagagaaggaggtgatggagatatagatgggatgattgggggaccaaaatcactgtctcgagtttttgtagtcgtgcttctggacagtgcaaagtatgtaacatactcctgtgtcctacctcgatcaggagctcctcatcttgtgaccacttgaagacatatgaggattgaaacatatatcagcaggtcttctctcatataggctttgtatgtaaaagaataaatacctgctctctggtatcacgtaatatccttagctaataccgttgtccggtttttgtttccagatgtagaatccgaatgctgtaactttttttttttaccttttataaactcatagccttagaaagttttatcaaacctctcatatacattgcaaaagtcgatgaccaaaaaatgtcattctacaatagaagctgaaatccaagtagacaaaagtgatcagttagttgattccatggtttgagccaagggggcatcggtgatagcaggagaatatgagcacacaagtgacagaagaagaagtctttacctgaaggtcgacggagagagaattggattagcatgaaccctcagattcatgaacctgagctcacttttaaaatttctttatttcattgtcagaaaaagagagctaataatattattatttaaatgtaacaagtaggcctataacacgtgaacttccctctttgcaaaaaaaaaatcatcaaaaacttttacctctcattggtttcttctttatcacactgttacgcttggattctcatttcttcaagttcataacgctcggatcaatcaggaagacgaacttgaactttctttttttcatcattacccaaagctatgaggctcacaccaccaatagctccgccgtcatgaatccttctcttccaggtactgtgccgtctcgggataacaaactttctatttattctcttctgatcggatctatctatcgatgaagattgatttcactactttagtaacatttcatctgatcgatctgtgttgtgttatcgaggaatcaatctcattttgtagattcaattttctggatagattttgtatctcttttccatagctctagtccaaatctagtctccactgatatctgagttttgttgaccaggtcaacacaagtcagagctccaaaaatg

SEQ ID NO: 11383 - DNA, 3000 bp, Unknown
  misc_feature (1)..( 3000): cDNA_ID_1383322_gDNA_ID_2214493_Annot_ID_183739 3000 nt of promoter + ATG
tatcaaaagattgtgaaacttctacactaccagttctgaatgcattcctgcttgaagagaaccctcctgcggcagccaagctcgatttagaaggctcaatgagaatagaagtagagtctccatccaccaatccgttctcttgagcagattgaatgtgagcacttgataatgtaccattgatgtcaagcacctccaccaaaatctgtttttaaacgacagacacaaaatcagtgggaaagttaacgagtcagtaagaacaccagaaaagataaaagtcagagagctataaaaccttaagcttaggctaactaaacaatcggactgaagcataaaaaatttatattcaaatagctaataactttgaaagcaaaaagaagaagaagaagaagtgaactcacatcctgatccatttgtaggttagcatcgtccagtgtcttatctaagtcattcatcaaagaatacttttggtggccgtagtaatcccaaatgcgtacctacatgatagaaaatgctcatgtaagaaagagaaagggaaagaaaagaataccaaaagtattattgaaacgggctgtttaataacataggaatatcagatctttacatgctctgagtcgaggtcaaaaatttcacaggctcttcgatggagctctctgatagtttcctgcacaacaaagtttgatagttcaatgaagtagcagactaaacgagttcagattttcaagtaatgaacaaagaaaaaaaaagaacagaaaagaggataacctttttgctaattcttatggcactatggtcactttttggcatcagaagtagctgaagacgtaaagggtaaacctctacagccaattctgtttgagagagacctgagctaatgactctccgtgccagagttggaccacccccgtaccttataaaacagaagcaatagtccataagaaccatataatcagtttaagtgaaaaaagccaaactatagtgtagtaaataagaaaaccaagagattgcgttattagtttcatattatgcattacaaatcaacataggagagaaagcaactaaataacatcaggtgcatacaagatgaacttggtagagctacacatctgacttaaccttagcattatccatttgaggaatgttagataaacatgacccaacataccaaagataaccaaggaaaatcaaaagcactagaatagggataaaaataagtctagcccacataagatgaagagacgtaaaatttaatatcagttcaattcttctacacttaaaactcaccatgaacgcaattggttccacacttcttgagggagcaaaacataatcacgaccttcctgaagtgtttcaataatctcactggtattactcgggtcctccagcgaagaatcatagatcaaatcagagttatcaatcctagaaggcttctttagagtgcttgaaccaggagagtcgcaatgctctgacagtgaagacccatcatttgtgttacatggttggtcttgattcacatactcaatccattcttgccaccatctggacagaaaagagagagaatgttctcagcagaagtaccataagagaaaattcaaactttatcacaatggttgtaatctaatacaatacccataaacatgagtcaataaaagacagttctttggaaaaggttatgaaatgctcaaactaatctcatcaactactacagataacccaatccctaatcgtaactctaaccctaaccaagtccgaaaccaaggcaaccaaacaagacgaacagatagatataactcttgggaatttgataaattcaagctacaagtgaccatagggagcaaaaatcaaagctttataaacctctgagtgatgagataaaatgtatcgccttctttactattagcctcagcagcaatagcaatgtctctgatgaaaactcgctcttcctcgggagacagatccgtgctgctactgctgcttcccatcgatacctccgccatatctcgaaaattaggagaaattcgtttcagctaaagtcagctttcgcgaattctagctatgaagagaagaatctaaagctgagacaacgccgaacaaccgtgcttcgccgtacgactccggcgagagtaaagcaaggcggtggatatgataaaccctaacggcttttttgggggagacaaagtagagtgagccgctcgctaacaaaaagtcggaacctcttttttttctctctgaaacagatccttgctggcttcgctccttagatagtcatttcgaaataggtccccaaaaaaatccaccaccatttataaatttaagaaaaaaaacaatttttgttgaccaacattttttttttttgctcttgcactaattgaaaaggttgatttaaaaagatatcttaaaattgttagatttttttttttttgtaacttttattttctcaaattgttagatatgaaactttaaacaatggttggaaagaaacattttactaataatgaaaaatttattaatgcgtaaattgatgttttgagattaatatataaataacatgttgataagaggcctggtcaatttactcaacgtggaaactccatctctcttcttctggaaccaataaataaaataaaagtaagctctttctcgtgaatctctgagttaatgcgctaaactaatctctccgttgagctcaggtaaagagttgtttctattcacatgtatctgattatttcttcttgggtttaaagtttactcttttatctcgttttcgctgattcgtcttgttctctcttccgatcctttttttgtctctgcttcttgctctgttcgttcatttacttatcttctccatctcactacctttttgatttagctgctgttgtagtaattgtatatatgttcattttgatgcaattcaaggtacagatgtgtttcttggtgtcaattttcaggctctgtggtaaataaagtcctgttcttgatattggtggtttcatcagaattagg

SEQ ID NO: 11384 - DNA, 3000 bp, Unknown; identical to SEQ ID NO: 11381
  misc_feature (1)..( 3000): cDNA_ID_2706381_gDNA_ID_2214493_Annot_ID_183735 3000 nt of promoter + ATG

SEQ ID NO: 11385 - DNA, 3000 bp, Unknown; identical to SEQ ID NO: 11380
  misc_feature (1)..( 3000): cDNA_ID_2706385_gDNA_ID_2214493_Annot_ID_183734 3000 nt of

SEQ ID NO: 11386 - DNA, 3000 bp, Unknown; identical to SEQ ID NO: 11379
  misc_feature (1)..( 3000): cDNA_ID_3434303_gDNA_ID_2214493_Annot_ID_183733 3000 nt of promoter + ATG

SEQ ID NO: 11387 - DNA, 3000 bp, Unknown
  misc_feature (1)..( 3000): cDNA_ID_3039766_gDNA_ID_2214493_Annot_ID_183732 3000 nt of promoter + ATG
gtgaagatgaagtcaccgccatggttgaatccgtcttcagagactgtaaccttcctggtacgtcttcgttgtttaggtcaaactttttcgatgaaagagaggaacattatctgccattaaagaagttttaagtttatccatataaaatacgactttgtagtaaaatgctctgattaaggaaagttcgatttatacaaaatcggaaagatttttcttttttactcaaaatcgtaatttatgttctttggaaagaacgaaatttatgccagatttgtctttttatacaaaattacgcaagccacacgttgcctttactaattatcgtcagaaatgatgaaatctatgcttaatgtcgtcaaattagttttatttaagtacatgaataattttcgacttttatttaaatctttctatggtaacaataaatgtttttggttgagtaggtattaagtaaatgacttttttaaaataataattagttgttatttaatagtactactatagtagcatataagtgatattttttattaagaaaatttatttcgaaatagtataatttgatagtgttatattttcaaaaattataaggtccataattatttacctagttcaataaaagtttatgttcattagtacaaaaaccctaattgtttttcttaacactgaatttggttatttatcttttcagaaaacagagcaaaaggtttacaactgaggaagtacttaggagcggttgcgttcaacaacataacgcggctagcctttgggaagcgttttatgaacgctgaaggtgttgtggacgagcaagggcttgagttcaaggccatagtatccaacggtctgaagctaggtgcttcactgtcaatagctgaacacatcccgtggctcaggtggatgtttccggctgatgagaaggcgtttgctgagcacggggctcgtcgtgaccgcctcactcgagctatcatggaggagcatactttggcccgtcaaaagtctagtggagcgaaacagcatttcgttgatgcgttgctaacgttgaaggatcagtatgatcttagtgaggatactatcattggtcttctatgggtgagttttagtgcttttatgaaatcagttgacctaatttgtgtagatttcttgtttctcacgtttggtaaatggtgtgtgcaggatatgatcacggcagggatggacacgacagcgataacagcggaatgggcgatggcggaaatgatcaagaatccaagagtgcaacaaaaagtgcaagaagagttcgacagagtggttggacttgaccggatcttaaccgaggcagatttctcccgcttaccttacttgcaatgcgtggtgaaagagtcattcaggctgcatcctccaacgcctctaatgctacctcaccgaagcaacgcagatgtcaagatcggaggctatgatattcccaaaggatcaaacgttcatgtgaatgtgtgggctgtggctagagacccggctgtatggaaaaatccatttgagtttagaccagagagattcttggaagaagatgttgacatgaagggtcatgattttaggctgcttccgtttggagctggaagacgggtttgtcccggtgcacaacttggtatcaatttggtaacttcgatgatgagtcatttgcttcaccattttgtttggacacctcctcaagggactaaaccggaggagattgacatgtctgaaaaccctggactcgttacttacatgcgtacccctgtgcaagcggttgcaacgcctcggttgccttcggatctgtacaaacgcgtgccttacgatatgtaaatgtcactctgatctaccttttgttgctgctgctcatgctcttgttgttgtttgtagacatgtttcttgtggtttatcatcgaaaaacttttgatgagatttgttgtatcaattctctcaaggagaagtaaagaagccatcttctttgtcattgggtttacgatctttcaatcagtgcaatgttgtaacttgaaacataagaataaacaggaaacaaacatacaaagatatttgcaggacataagaacaagtttcttgattacattaactttttaggtttcgcatatagcaaagtattttacacacatataattaattactctcagagcatttgtaatcattaacttgaacaagtgaaattcaagaagatgattccttgaactcctgcaactgtttgaagttcatccatggcttcacccacactttggcttcaaaattcttagtctgatcaccttcttttgcttctagggttaagtggtacatcgttcctgcaactacctgctcccttgctttgacaatcttcttgaactcaagaattttgttctgtacttacccggaaaaaacaaaaactaatcagataaagatatattcataggttattataatcagatcgaaaacagaggatttaaaaacctgttgtttgttatgttcttgaatggcaaatcgagcgagactctcgatctctccactgttctgatttcctcggagatcatgaacgcctcctagcatcatcgtcttctctgtgcttttctcttctgatctgcaaatcgctaattgaattgttccacagagaagaagagtaacgatccagaacgtctttgattccatctttaatagacaaacttatgcttcttcaaatttcagattcgtaggttttggccatgtcggtatcttttacgttacttggcgattaaggtatgaaagtgacaagtcaaggaacaaatgacacgtgtcttcacctgagaggctgtgcgtttcgttctctctgaaaggtcaaagagataagaaaaacaaaaagcggcacgctgtgtgtggtttatattaatttgagagcgttccaaacacatgaaaacggtatgcattctacgaggttactgttgaaactgcgaaattggggaattcgtcgtcgtcatcacgctcgatcggttctctgttcgtcgtttgtttttccggtggagaaaaatg

SEQ ID NO: 11388 - DNA, 3000 bp, Unknown
  misc_feature (1)..( 3000): cDNA_ID_3039770_gDNA_ID_2214493_Annot_ID_183730 3000 nt of promoter + ATG
aatctcttcaaaacccatcacatgctttctaccactaaaacaggcccatcacatgctttctacctctaaaacaggcccatcggatatgttcctatattttttgtccgataaagttataagaagcgcaaggcccataatatttttagttattaaaaaaattagcagacgtagggttgacttaaaaaagactcttattacattagtcgacaagtaaaaaacacgtggcatatattgtgcgttcgtagagactgtaataaagacggagagattcttctagagtcagttcttcttcttcatcctcttcttccccccaaatcctctctcgctagggtttctcattccgatccataattctagatgtcgaggtattcttttgattgagctccgcttttaaccaaaccatcttagattttgttttcatgattggatcactgaattgaaattcttctcttctgtctttagatttcttctcaggtaattttgctctgctttgtgaagcgttttcattgatcggattttagcttctcgtatttaaattgatacttgtgtgcatctgaaattcgtttggattaagccattccgaattttgagttacttgtgagttgtgagttgttacattaccctctcatttattttcccactccataaattggtttcagttagaaattgtagtagctacaaggtgattgattgcatcattatttgaaccttcgttggtttgtgttggcttatataagcaagttccgtcaaaagattaaaactttgggttcagtctctgtgtgtttattagcagctagactttgtattgcctgaaaattcatgattgagggatatgctttatgtactattataagttctgagtttgtagaaacaatattttgtgttttggggaaaacaccacaataactttctattaatgtattagaaaaagaaagttggaacctatgttttagaaaattttttctctatatattgaagtatgacctataattgaatcttctgatgtgcactaaactgaggcaagcgggatttcctggagtctttggtttgcttacttggaaaaaactgtagataactgattactaacttatacccacttttgcaggtttttaactgagacctgtcaaataagctaaagcttcttctaagagcttcaaggaaagcattgcattgttgtggtcttgtttgtgtccacagaaggaaagaagagtgagaagctcaggatgtcaagcagtcgaaatacccactggtgtcacagatgtcagcgtgctgtccgccttcacggccaagagcctgtatgcttttattgcggaggtggatttgttgaagaacttgatatggctcaagccagcccctttgatatgtttagatcccacaggggtgttgtagaacgtgatcagacttttgatctcatggatgctttctctgtgtttatgaggaaccgcttagctgaaaggagccacgacagagaaatcagaggaagaaccatcagttcaggtcctgaaaactttcctggtctggcccctttgttgatctttggtggtcaagtcccttatagactaactggcgacaatgcagtcgaagccctcttcaatggcggctcccctggcattggcatcacacgtggtaacaccggcgactacttcttcggtcccggccttgaagaattgttcgagcagctttcagctggcactactcgccgaggcccaccacccgcaccgagatcagcaatagacgcattgccaactatcaagatcgcgcagaggcatcttaggtcatcggactcgaattgtcccgtgtgcaaagacgaattcgaactgggatcagaagcgaaacagatgccgtgtaaccacatctatcattctgactgcattgtcccgtggctggttcagcacaactcttgcccggtctgtcgccaagagctaccatcagctagcggaccttcaagcagtcaaaacagaaccacccctaccagaaactacagaagcagtagtagtagtagtagtagtaacagtcgtgagaacgggaatgaaagaaggaatcctttctcttccttctggccattccgttcgtcaggttcaagctcaagctccactcaaaaccgtggaggcacaagaaactcggatacaagcgatgagaaccataactaccatcaacagcaacatcaacaatcatatatgggttacagtggctggccttttgattactaaaagtctaaaagtgagctaaaacaaatctttggtctcactttggtctctttacttaaatatgcttgtgattctgcatatgccttgtgcttcactctctatctctctcactctcttttatcaacataaataatggagaactgtatttgttactgtagattttctttctctgttaaaaacgagttcatcattttctatatgctttgttaaatatgtcattttagttgggtttttgaaaatggttgaaatagatttttgagttgatcgataaataaataaatgaaaacgtctggacactcttgagcgatctatcagtatctcgtgatcttcttcaatactaataaaaaaagggaaaagaaagagaagagagtcgtgctcataaattaacggtgcagagcgattgaacaaaaacaaaaatatcttccagaaaaagccatttttgattgcgtataatgaatacacgaaattaaaatcattacttgccatatatagtacactatttctcagcttcactcactctcgagactcgtgtatgttgatttacggtttgttcaagcaaaggtgatcatcaattcccaattttttttacgtcactattttcgattcactccaatggcttgcgtgttgctgatttcttgattttgtggttcttgagttagtctccatctgataagtaagtaaattatgtgattgtgatctgggttttgctaaagttttgatttttattattgttgtttagagaatgatgaatctaggatctctttcgttgagtacgagcaagtcgagtaagcca

SEQ ID NO: 11389 - DNA, 3000 bp, Unknown; identical to SEQ ID NO: 11376
  misc_feature (1)..( 3000): cDNA_ID_3039778_gDNA_ID_2214493_Annot_ID_183728 3000 nt of promoter + ATG

SEQ ID NO: 11390 - DNA, 3000 bp, Unknown
  misc_feature (1)..( 3000): cDNA_ID_2706397_gDNA_ID_2214493_Annot_ID_183727 3000 nt of promoter + ATG
acattgtgttttttgtttgctggaatatttaaggcaaagttaaacgatgtgacttctttggaaggacatgttatgctaaagaaacttagggatgctttagaaaccatgagaggtcgtatggatggaagaaacagagaagcagtggaaaaagctatctccatggttagcttttcttactgcagaatcactttctttacggttttacgcctttacaatgacttgtatgattgtatcaactgtgaagggtgtgaataaaactatgcagtgttttgtgtcttgcaggttgaggcactagccgttaagttaactcaaaatgaaggtgaactaattcatgataagtttgaagtgaagaaactggcaagcttcctcaagaaggtcttataagtttccttttcatgtttaatacattataattttgttagacatttgtagacagtcaagctaaggctgattcattgtgtttcctcaggcttcagacgacgcgaagaagttagtaaaccaagaaaagtcgtttgcttgtgctgaaatagagagtgcacgggctcttgtgatgaaacttggaggtgcatttgaagaacaggagctttgttctaaagcttctagagatcagggaccggtatgtatcattttgagttcagttttccttttcatatgttatgctctgacttatgacataggagtaggattctgaatcaaacttatgttccattttcacagaatgtggagaaattggttgaggaggttcaggaggctagacgaattagacggttgcataaaccaaccatggtccaactccatttctgtgctctacataaattttccattataagactttctatctctttcattagtcatctttttgacaatggaatccaaaatgttcaaacaaaacttctgattttgatggtttataatctaggtgatcggtatgcaacatgagcttcgtgatttaaagagtcaaatccaagagaagtctgcatattccgttaaacttcaaagagaggtaggttttgtgtcttgtttacttcttgttattctttcatcaacaaactgtcttgactctaaaaattgcaaatatccatatagatagcaataattaagaaagctgaggggtccaagtcatgtccgtatgttctggatggtgcacaaagtcttggctcgtgcctaagaatccgtgcctcctcagacagtggtatagatatttccaaatgctcaatccattggtaccgtgcagcatctgagtctagtcgaagagaagctatatctggtaattcgcattctctctttccctgatcatttggcaaatcttattatgttctcaaaataacttataggacatgagcttttagcttgagcactgagcagttcacatttttccaatcttaggtgccaaccggtcagtatatgctccagaaccatttgatgtcgggcgagtgatacaagcagacattgtttcaaatggccagaagttcaccgttacaaccgatggtccaattaatactggttggtgttacaagagtttgctattattatgtactttctgcaaagtccaaatacagattataatggagatatgataaacaaaatggctaactgaatcacaatttctacagctgctggcttgcagtcacgcgttgaatcactcctgcgcaaatctaacagtgaattcaccgtatgtttacaactttccttttccccttggaagagaattttgcataaaacagttgttatttcttgctctaacaaaactagaaatgttgaaattcttcgcaggtggttatatcacagatgaatggacaagaccatgcatcacgatcccatgtatttactgttggaaaggcgaggataaagctgtcccgaggatggatcacaaaggctagagaaatatattcaacctccatgcaggtaatctagagcctatgattgccacttaattcactctctgtctcttcctttagctttatttgaagttttctttttcttcaagtttaaatggtttggtaacatttcagctctgtggagtgagaggcaatgctaacgttcctgcaaaggcattgttctggcaacttagaaagggtctaactttcttactaactttcgagtcagagcaagaacgtaatgcagccatagtactcgcacgaacatatgcatatgattgtaatgtgagtaaaagtaaccagaaaaagatccattttctttttctgatccttctatcttctcttgttttgcattgcccttttaatatgcagttactccattatatagttttggtgtaattaagcaaccattttgaatcaatttcgcatcctgcaggtcactctagttggtccagatgattgaggtagtgaaaggagtagttttgtgatatcgactgttatgtatttcagtgtttgtgtgtggttgaaagaagaagaagaagaagaaacacaagtgttgctgcatagttttagacagaaaacacattttgtgtttttttttggcatgatcactggtttgaggtggttggcattttttctgatttgattttatttgtttgtttgtttgatttgtttggaccattattggctaattaggattattttttggattgtgaaaaattgtaatcaagatttgttggtatctaataacagaacagtgtttcaatcaatattacattctactcttcaatcttaattaatgtaataaaatgaaaatttcttttaaataaaaataataataatgaatggccaatttcatatatttaattttgcactatccaagggtgcaaaattatccaaatgttaaagaaacttgaatatttttgggacatcacagatatgtagatactttaagttaagcttattatgacaaattaatactttaacatatagagaaatagatggaacattatctacctttatagttgtccgaatttcttgttcctcttttatttttcacactctttcagtccatcgtccgaccgagattttgtcttctcgtgagttcaaatccaaatccatg

SEQ ID NO: 11391 - DNA, 3000 bp, Unknown
  misc_feature (1)..( 3000): cDNA_ID_2706377_gDNA_ID_2214493_Annot_ID_133510 3000 nt of promoter + ATG
ggctcaaagcataaatcgatgtgtcattattatctgcaaatccgagctttggccaactgcttataacagaatgaaccaaaccaattataaattgtggtttagcatgtgattatgtaaatagaaatatgaaaaatcttttctatataaaaatgtaactattctcataaaatctatttaaaaataaaaaaacgaattttattttgtttttcctattttttcgtcgagaaaaacttcataaataacgaggcctatattggcccaacaatattatataacatgctaacaaaataaataacagcccacgtaaaagagataagaaggcccatcgtggcccaaccgtaatatatatatatatatatatatatatattcttatcaacaaactgtaatgcgttgctcttccaactgcacaaattcgaaacccctaatatcgtcgatttccgtattcaaaatccaaaagcacacaagaataagagacccctttgctcttttggttgtaattttggttttgaatagaattgagctgaagagttaaaagagatgaagagaagaaggaaggatctgaaacaagcggcggagtcagagcaggaggaatgtcagagcattgcccaggtcgtctctctcggagattccgatcaaattcaggtataaatacgccaattcgtagcgattattttctttggcttaaagtttgaattttgacttgtggttttcatgttataagtttaaaccgttcttatttgctactatttttggtctagccgccacccaacaagaaagaagaagaagatatatgtgaatacttactgcagaattttgatcttgatcatgtgatggaaattcttatgagatttcctttaacctccctgacgaggttcaagtgcgtctctaagcagtggtcatccctcatttctagtcgatatttttgcaaccttttatatactacggtcacacgacaacaaccacgcctatacatgtgtttaaaggatgacggcgggcaccgtgtactgctatctatatcatcaccgtctcgaggcaacacttctttcgtggtggtcgagcaagatttgagcatcccagggatgggaggcttcttcttgaacgttgttcgtggcttgatgtgtttctctcgcagaaaaaaggcgcgtatctataaccccagcaccaaacaactcttgaccttacccgccataaagtccgacattgtagctcaacaaggtcaaacgaagcatcatccccggtattacatcggacacgaccctgttagtgatcaatacaaactagtctgcacggttgcgatatcctcgctattgccacgtttgggtaatctgaagtcagagcactgggtcttcgcactagaagctggaggttcgtggaaaaaggttgttccactggaaaattatcgtcatcatgccccttccacggaaggacggtctaccagtggatcagtagtgcgttatatggcctggcctgataattataattgtgtggttgtgagtttcgacattaggtctgaacagttgactatcatcccagtacctagggagatccaccttgacgaggttgtgcctgcagttacgatgatggcggatcttatagagtatggtgggaagatagcaattttctatcatacaaaccttaaagacgagggttccgcggatttatgggttttggaagacactgggaagagtgaatggtcgaaaaagactctggttctgcagccttgtcaaaggcatttagtcgaagacattgaattgatcgtaaaaggtacaactcaagacggcaaggtgatcttggcaccggtggagatgcattctcgattctacattctgtattacaacttgcaaagcaatgacttgagaaaggttgaaatcaaaggagtaccagactcttggtttgataaagaatgctatttcgacttgaattctatggataagagtgagagcttcatctacttggaaacttgaccaagacggcaagacgtttgatttccttttttttttttttttttttttctgtttgttgtttaagaatacaaccgagttaaatgatatttctagttacttgaataaattttatcttcatgctcttgattttattggtctcctgcttaaatgcttttttcaagcagtagcatattgaggatagaatcttttttgtagaagtttggattttggaattagcagattatttttaacgttatctccattctctttcattatcagcacgatgtgttcagtcagttgtttggtattgataatgatctccatacttcaaaactcattttgttaaaataatgaatgaagaaacttttttccatcaagcaaaacacaaaagagaagcagacgttgtttttggacttcatccattttcttaacccaatctctccctgtagttgctatagtttcttctgtcttctcagcttgtatttgaaatgggtacatcacgtctgctgattcgaatttagccttgatagttaatgcttatcttggtttcatgaatggctgttgtaaaagggactgctttcatttttcaccatcttttgttgagacgagagacaacaagatgatgtcagttctaacaaacaagcatgtgccaacaattaatcacttatacacactaatgttgtaaaactcatcaaggctcatagcataaatcgatgtgtcattattatctgcaaatccgagcatagaatgaaccaaaccaattaaggatagtggtaaattagcacgtgaaccaagcggttagcttgtgaattgtgattatgtaaatattaatttattacttccttaattttcctttttattttccttttccttttctaccatttattatgttacctttgtctttggtcataaagataaagactacacaaagtaggtctctcttccgactgcgcaacttcaaagccctaatatcgatttcttttgtttggtcgtaactttagtattaaagtttggatttttttgaattaaatttgagctgaagagttaaaaagatg

SEQ ID NO: 11392 - DNA, 3000 bp, Unknown
  misc_feature (1)..( 3000): cDNA_ID_1831217_gDNA_ID_2214493_Annot_ID_133512 3000 nt of promoter + ATG
atcatgaaacccgagtccttacaagaattaccatctccagaattttttccagttctcagtgacagtcacttctacctatgtgtgcaggttagacccaatctacaaattactaaactacaaagttaagcttcttactgtgttcttactgttataatcatggtgcaggtgaaggacacagggtgtggaattcacacacaagacattcctttgctctttaccaaatttgtacagcctcggaccggaactcagaggaaccattccggtggaggactcgggctagctctctgtaaacggtaacaacccaaaagtatatataagttataagcagatggtgttacaaatagctaaaaggcaagtttctgttgatggatgtctctggttaggtttgtcgggctaatgggaggatacatgtggatagaaagtgaaggcctagagaaaggctgcacagcttcgttcatcatcaggcttggtatctgcaacggtccaagcagtagcagtggttcaatggcgctacatcttgcagctaaatcacaaaccagaccgtggaactggtgatacattacgttggaaagacttgtattgaggtgagactttttaactacacagcagcaagagaaagaagaaaatacatgaccggacggtgtgatctaacttattggattttgttggatgtaatatgtaaaataaaaatcctatatacggggagaggtaccttatctgttctcactatattttattgaacattactttagagaatatgttttggaattcactactaaataaacgatataaatcttcacgaaaagagcaacattttgtggttgtggcagattcacaaattcttttttatatatgataaattaccttagaaagttttacttactcatcaaacttctcaaatacattgcaaaagtcgatgaaaagaaaaatgtcttctacaaaataaacaaggaagctcaatgagacaaagtgatcagttagctgattccatggtttgagccaagggggcattggtgatagccatcttcatgtcaagaggatatgaaccactgctttgttctcgaatctctctgtattcttggcaaatggcacacaagtgacagaagaagtgtgttacaaaatccccacatggagcctcctgaatcaaagaatgttaaatcagtcagaagcgccacatacatacctaatggtattatccacatatgtgtcgtttgagaaattctaacctgtaaattgtacttggctcttaatgatttgcggtacccgcaagcataacatgacacaaagcatcccggtagaccgagcaatgcgccattagttgcaaagcagcaaatggtattgaccaaagcccaggagatgcaatgggttaagcagggtcctgcaaatgttccagaccccagaagctctgcgtttttgccaaagatataacaaggacagaacaaacctacacaacctgtgcatacgaaacaaaccacagtaagttgtaatgttcatttcaaaccattgtctaaatgatcttcagcataaacaagaaaacagaatcaagtcctagagaagtaacacaaggaagctcaaaacataagcaatctaagtttcttcctagcctattcaagaaatgcacttggttattcttctaaaccaaaaaaaactctgcaagaactatcaaccagaaccacacttatctttatgaacatatctgaacacactaacacatggcaatttcacaggtcaatgcaaagaggcacctttaacaaatttgattcgtgtagtaaaatgaagaaggtttggatgacagagagtagtagcatacagctctgcatatcgtcgaagcaagcgcatataccagatgaccattgtctcggatcatcttttgtgctttcagaaacagcaatttccagatttggagtagtggtctctacttcagtatcagcatctgactgtgttaatggaatataagatggtggcacgtaatgacccttcttctctttcatcctaattctgatgaaaccaccaatatcaagaacaggactttatttaccacagagcctgaaaattgacaccaagaaacacatctgtaccttgaattgcatcaaaatgaacatatatacaattactacaacagcagctaaatcaaaaaggtagtgagatggagaagataagtaaatgaacgaacagagcaagaagcagagacaaaaaaaggatcggaagagagaacaagacgaatcagcgaaaacgagataaaagagtaaactttaaacccaagaagaaataatcagatacatgtgaatagaaacaactctttacctgagctcaacggagagattagtttagcgcattaactcagagattcacgagaaagagcttacttttattttatttattggttccagaagaagagagatggagtttccacgttgagtaaattgaccaggcctcttatcaacatgttatttatatattaatctcaaaacatcaatttacgcattaataaatttttcattattagtaaaatgtttctttccaaccattgtttaaagtttcatatctaacaatttgagaaaataaaagttacaaaaaaaaaaaaatctaacaattttaagatatctttttaaatcaaccttttcaattagtgcaagagcaaaaaaaaaaaatgttggtcaacaaaaattgttttttttcttaaatttataaatggtggtggatttttttggggacctatttcgaaatgactatctaaggagcgaagccagcaaggatctgtttcagagagaaaaaaaagaggttccgactttttgttagcgagcggctcactctactttgtctcccccaaaaaagccgttagggtttatcatatccaccgccttgctttactctcgccggagtcgtacggcgaagcacggttgttcggcgttgtctcagctttagattcttctcttcatagctagaattcgcgaaagctgactttagctgaaacgaatttctcctaattttcgagatatg

SEQ ID NO: 11393 - DNA, 3000 bp, Unknown; identical to SEQ ID NO: 11382
  misc_feature (1)..( 3000): cDNA_ID_2706369_gDNA_ID_2214493_Annot_ID_133513 3000 nt of promoter + ATG

SEQ ID NO: 11394 - DNA, 921 bp, Unknown
  misc_feature (1)..( 921): cDNA_ID_1833057_gDNA_ID_2214494_Annot_ID_133517 3000 nt of promoter + ATG
aagctttgcagaagagagagatagagtgagtgagagggagtgattttgtttctctctcttgaagggtaaaacggtcataaaatgtagaagaagaaggagaagaagaacatgttaatggcagtggtgaataaaggaggtcgctttcgttgcccaatacttacgagtctttgtctctctgtggcttgtttcacagatgacccatatcaataaatccatcttatgggtacttttgtaattatgtatttttatatgattttagtgtaatttttttgtttgcttaacatgttcttcttcatcttcttacttcaattactaatttaaattcaggagtttacaaaaagtttggttcagttttctcttctttaattattagtatagttgttgtgtttttgtcaacgttttttagtatagtgaacgtgtgatttctaagtgtttttgtttattactaaatttagaaatatgcatgccaatgatttttggtttagcatcaacacaaaacttaataaaatatgattggttttaggatgttaaccggtttggttggctccggtcggtttgtcacaaaattaatattttgaagctttgagaacgaagtggactaaaactaaaagggtcacaggcccaacaaaagaaggaagaacttaaaaaataataattccttttcattttaacttctctttttttttttgttaaatcatttatttgtttcaataaaaatacacataatattatcttttctcaaaaagtactatatagttagaaaactacatatttattttaacccaaattattatttttccattccttacacactgtacgttacactttttattatcatttgctgtacaacgttaatatttttaaccatttctgcaattgtttacctctttttcatccgcaaatttctaattaaattatatg

SEQ ID NO: 11395 - DNA, 3000 bp, Unknown
  misc_feature (1)..( 3000): cDNA_ID_2706468_gDNA_ID_2214494_Annot_ID_133518 3000 nt of promoter + ATG
aaattctcaaaagcttgactcttgtttccgtagaaaatcgaattcagatgcgtgtagctttatagttagcttaaattttgcaaaagttggaaattttacttcaagatccaatgaaattgctccattgatcaatgaagctgttgctaaaggcaagaactttgatactgggtgaggacaagaaccttgtagatactgtttttctttaaaacatttgtgtctaaactacatgttttgttaggacaagagttggattagatgttggtcatcttcttaaatctgcattagctggaggaatctcatgtgctttctctgcttttttgatgcatccagtggatactgtcaaggtataatggtaatttcatttcaggttcttcttttgtgtttatgagattgttctgattacttacatttgtcttggatcattaagacacaagttcaagcatcaactacattgtcgtttctcgaaatattgtcaaagattccagagattggtgctcgaggtttatacaaaggctcgattccggctgttgttggtcaatttgctaggtttcatctcttatgctttgccttgtggttattggttataagcattatcatgatttcatctcttgtttaaacatttttcagtcatggtttacgaacaagtatatatgaagcaagtaaacttgcgttaccgctcgttgctcctactcttcttgatattcaagttagtaattgtaaaaagctcattgccaactttattgctacataatgtttcgttctttgaatttttttgcttcttgattattttaggttcagtcaatcgcgtcttttattggtacggtattggggacaacgttgcgaataccgtgtgaagtgttgaaacaacggttacaagccaaccagtttgataacatagtggaagctacagtttcgacttggcatcaagaagggctcaaaggactctttcgtgggaccggtgttacccttctacgtgaggttcccttctacgttgctggcatgggactttacaaccaatcaaagaaggtaatcatgatagaacagaacaatgacatgtctttgtgtaattaataagacgtggttgcgattgagtttcacaggtggtggagagacaattaggaagagagttggagccgtgggaagccatcgcggttggagccttgtccggtggtttcactgcagttttaacaacgccattcgatgtgattaaaacaagaatgatgacggctccacaaggcgtggaattgtcgatgttgatggctgcttattcaattctcacacatgagggtcctcttgctttctacaaaggagctgttccaaggtttttctggactgctcctctcggagccttgaacttagctggctatgaacttcttcaaaaggctatgatcacacctctgaatcaatcagtgcatagtgagtaagattggaaaactagaccaacattttgtgttataataatttatttcatgtttatgtattctaaatcttgagaaaaaaaaatatattctacaaaaataacataatttacttctttttttttttctcaagtgtagtattgtattaaacgtaacccgatcatacacgggctacactaaaagccccacgaaaagtttacagaaatatttgaggcccaacaagagcctatcggataaccgcatactgcataagaaaatttgtttgtactccacctaagcccacgtgtcagcaactggatacaaccacgacacatgctggatgagtaatcgaaagatttccgacatcaaccttcgccgttgagcatcgatttcggtgagaagattatcgccgaaatataatcggtcgttgaatcctttgtttgtcaccgttgctaagctaatcgaaactccaaaaagaaactaacagctttaaggcaatcataatatgcttcgaaagattcttctttccttatgtctctggaaagatttctgcaaaccaaaagctcaaaagaaacaagtcggagaaatccattctttaagtgacacaacacctaaaacatcatcaccaactcagatctaatgagattattgaaacaaaaaaacttaacaaacccaaaactggccgaagacaccgtaaacaagacggcaaatcgccagacataagccagccaacactactttagaagctagtcgatgctggacaggagccggataaaccggacggcgaggatagaacatgcatatgagatcacgatcggactttaccaaaaaaacaaactctctctctcaaaagtttttgagagagaagagagaaagttttcgtcaaggttaatatctcctttaataatttaattatggaaacactttgctcggatttatttttaacataatttacttaacatcatgtattctaaaaaactaatcagctcacccgaatcgattgactattacaaaatactgcttaatatagacaaatatttgatcataaaaataattaaaaagattataattaataaaatattattgatctcatatataaatggcatcgatacatttgcaaatatttatttttcctttgaattaaaaaaaaatatcaaaggccgaataaaaaacatcattcggcaagttcatcgatccacgaaaaaaaagaaacgatgaggcttaatggggattcgggtccgggtcaggatgaacccggttcgagcgggtttcacggcggaatcagacgattcccgttagcagctcagccggagattatgagagctgctgagaaagacgatcaatacgcttctttcatccacgaagcttgccgcgatgccttccgacaccttttcggtacaatttttccgacaccaaaccaaacaacaacaactgtctactttaattgcttcatcgttattgtccaattaataactaatttttatcactcttaggtacaagaatcgctcttgcttaccagaaggaggtaatatacactaaattatatttgtctgagtttccatgagatttttgattatttgtttttattgtttttggatagatg

SEQ ID NO: 11396 - DNA, 3000 bp, Unknown
  misc_feature (1)..( 3000): cDNA_ID_2717386_gDNA_ID_2214494_Annot_ID_133519 3000 nt of promoter + ATG
agtgtcatatgaagaattgaaaacatatttccataagccaattggatttaatcaagcagagaccgatgttgtagttggagcagggttatcgaactcaacacacatttttagcagtggcacttcagcgtcatcaccatattcatcaacaagggatatgacaatcttggacttatccttctaattagtttaaagaaagaaaaaaaaaaccgtcaggcaaaccaagtaaatatactattgtggtttttagattgttcggttttaaaatacatttatcaaagtgaaaccgtttgtccaaaaattaaaataaaaaatacttacatgagggagtgactgcaaaccaggaactttggaaagagttaacacaaatttttcgccaggttcaatagagcatggatcctcacccatcacatcactgaggtcgtaatttattatagtgctattcacattttcatatttatacaacacatgtatagttgctctatagatgatgtagcctgtaaacacaaatatattttcttacaagataagatattggaaactataaatgaaaacaattaaaagaatagaaaatattacgtactatcatcacttgtaaagccggatatggtaatggttggctcgtcgtaaggcccaacagggtatggagagatctccacacgtgtgacgttcgtaataccgtaattgtagtcaataggtgcatctttagtcgcaccgatttagagcatgttaacaattgtagaagttatcagtaagtcatggcaggtaaaaaaaaaacttggatctacatcctaatttcttacaaaaataaatcctaaatttctttatttggaaatttggtatgtcaaatgatagggtcataggggtaagtgtttctttatttatttatttgtaggattaacaaaagataaatctattttaaatttcgatcagatttcaaattgtttgatctatctttgaatattggaggaactctggacctgcaatattttagttataatactcagttcttgacttatacaccacggctctcgaaaaccacactgaaggaaaaaaaaaagaaaaaagtcttcggtgaatacttcacaattattgggttattttatagatgggagtactttcatagtttcattgatctgttctttctatataaacgttttcacagtagcaaaatactctatttctgttttatggaattgacgactaatgtgagttccggttcaagatttatttggtaaaacaaaaaacagagataggagcaaaccacaatctatgaaattcaggcatattcttttcattgaattgacttatcaagtaacaagaattgatgttctatataacaatataagacttaacaaaaacgatacttacttttgcagttttcaaaattgtatgcgccggcgccaaaagcagataagaaatagagtgatgataggagaagcagaacaggttgggcgtgagatatcgccatgggttatatcttcgaaagataaaaaagattaatgcctgttttgttttgacaaacaagtctgtaatacgtatgcttaaattcattcatgcctagtattttatatagtctatataatataatattctgcttaactagtggatgattcatccctatataataatcttccacgttatacttattcctatatgatataatcctaatttatacgtgagaatcttaaaaaaatgagtgttgcctgaaatctcaatatttcaaatattaccaccttttatatacaaggacgtgaattcttttagataaaaaaaaatcccaaagatggagttgtttgactgcgaccatgtctgttggttcggcgtgatttccaaaacacaactgttattagcatcatacaaaatttaaaaccgatcacaaaccgaaaaaacaaaaatgtatgcatagatatacattgcgcttaaaccatatactggggaactaaatggtcaacgttaacgcaacatggcatacaaatcttatttttgagataagatgaaatagtaataaaataaaataaaccatacccgaaccacatggtcgaagctaaacacaacctggcaaatactttcattattagaggtttttgtttccccactttgagatgcaccaccggttaaataggtgaatctttaatttcttcgacatgaactcacacatgcctgtgaattgaagaatttggtcatagttggcaataccaatgacattttatttatattttggttaaaaatacaaatgacatctaaagtcatattctaaaatctcgcttttaacgaagcatataaatatatctggatattactttgattcggtccactaattaagcaaaatattttaatctaatagactataaaaatagtaggcatgaataacatgttttatgatatatatatatatgattttgtgtttttttggatttgtggttttaggactttaggattttaagatgttttttttttttaatatctagatattttttaatttgttactgaaattttttcttggttttattataatatgttttttagatttttattacttataaatttttcttttatttttatctagatatcaatataaccaattaaaccaataaattttatggttgtggatttgagtatataaattcaacttatataaatacatgggttgggtcaaactcgtctattaaaatctcaaatccatgtgggtttgggtaaggttactcattttgacatctttggttaaaatagttacctctagttttgtttcagtcccacatctcaatttgttttaacacagtcatttcgtcgaacacctcatatgcgttgttgttgtatactaaattactaatactttaaacaaagactaacaaaaatggcttaattcgataatcaaaaccactatttggatcaaacgttgactaatctcacttaaatcactcttctgttttcctctaatgacggatgaagaacagagttagttttcaaggtttatccacagatccactgaaatcaacaatg

SEQ ID NO: 11397 - DNA, 3000 bp, Unknown
  misc_feature (1)..( 3000): cDNA_ID_2706401_gDNA_ID_2214494_Annot_ID_133523 3000 nt of promoter + ATG
cttgcatcggctgttgcagccgaagcagctgtggtagctgcacatgctgccgcggaggttatacgtctcacgaccccatcaacacctcaaattgaggaatcaaaggaggaaactgccgcaatcaagatccaaaatgcgtatagatgttacacggtatacaaaaaaatcacttttttttttttggacaaaatacaaaaaaaatcactaattcctcttattatgaaagacttagtctaatattttgaaatttcataggcgagacgcactcttcgtgcgctgcgaggaatggctagactcaaaagtttgctgcaaggaaaatacgtcaaaagacaaatgaatgcgatgcttagctcaatgcaaactcttacacgtttacaaacacagattcaagagaggaggaatcggttatctgcagagaacaaaactcgtcacaggctgatccaacagaagggtcaccagaaagaaaaccatcagaatttggtaaatctcgttacattttttgttgaatgaatgtaaaatttattcaaccatgtttacaatatatgcaaccgttcatctaaaaatatgacaaaatttaaaaagagtcatcccattgttatgtggtaaaatctccctacattttaccacactgggtgaaccaaaattctgaactggagcatattttgttgtaggttaccgcgggaaattttgattccagcaataaatcaaaggaacagatcgtggcaaggtcggtgaatcgaaaagaagcttcagtaagacgagaaagggcattggcgtatgcttacagtcatcaggtaaatataaattaaagacaacatcattgtgaacttagtcatagttgtttatatattgatgttggaaaataaaacagcaaacatggagaaactcttcaaaacttccacatcagactttgatggacacaaacacaacagattggggttggagttggcttgagaggtggatggcttctcgtccgtgggatgctgaatccattgacgatcaagtttccgttaaaagttctcttaaacgcgaaaactcgatcaagagttctcctgccagatctaaaacacaaaagtcagctagccaaagttctattcaatggcctgtaaacaatgatacaaagagtagaaagatcgaggttactaatcgcaggcacagtatcggtggtggatcatctgaaaacgctaaagatgatgaaagcgttggtagctcatcctcgcgcagaaattcgttggataatacacaaactgtgaaatccaaggttagtgtggaaacaacaagcaacgtgagtaatgcacaaactgtgaaacccaaggctaatgtgggagcaaaaagaaacttggataacacgaaaactttgaaatccaagtctagtgtgggaacaacaggaaacttggccaacacggaagctgtgaaatctaaggttaatgtcggaacaacaagtatgccaaagaaggaggttgttgctgataagaagaaacctccacagatggtattgccaaagaagaggctttcatcttctacttctcttgggaaaacaaagaaattgtcggattcggataaagcaacaactggtgttgcaaatggagagaagaagagaagaaatggtggtagcagttaacctaaagtaatagccttatctagaccaagatattgctttggtggcggtttgatagatttagcatctcaaatgtgagatttgttttctatcaacgcaaatagaaaagagaaagaaaaaacaaaaaaacaaagagtgtattttgaagaccttattttgattgttttctttgggtgagtacaaatgatgtatgtctgtttcggtttggtgtttatctggtggattatttgtttacattttttaaaaatttaaaccatttatttcgcgttaatgtttgaaaatagtcgttgaaatcgattcaaaatgacatatgcaatggttacaaaaagtaaacgagagtctacgtgaactggagctggtttgtgacaaagtttgttatcaatttaagagtttgttaaaaccaaaaaaaaaaaacaagacattgtatcgggattgtaaaaatttggattgtggagctctcaatgaatatgtacaattgagtctattgctggattacgttctggccgagacatatcaatcaatcagacaggttgctatgaattagtaaacttcatgtagtggatcattcttcctctttctctgtaatttgtccgtaataacatcatcaaactcaagtttctcaaagttaattttaattcaattaataacttcgaatatcacacatatatgattcatgccgttaatatttttcttagcatggtcttactgaaaataaaatttaaatattactatgaaaaattatataaatcacaaaactagtttggttttcttttgtgtagaaaagattatcggaaataatttcatgtttatttatttatttttacatcaaaattttaaaatagaaacacaattttccattaaaaaaattcataagattccaatgagcttccaaagtaatttttttggaagcctatatagtcttagattttgataatatttatgaaaaaaaagctaattctgaagtacactgaaacaaataacaaatacatgacgcttccatttttatttttttctaacatgaagcttccttacacgtagaaagttaagtacatcgaaacaaataccaaagacctgagaaagtggatagaagtcttattattaagaacaataattgataagaacaaagcatcttattatttaacaaatgcaaatagagtaaatagaagtcgtgagacttcgtgacgtcatcacttcttcgtcatctccttgacacttcgtgacgtccttgtcttctcgataaaggtgcctaagaaatggaaagagtggttttgtgttcttactttacatttttgcacacagaaaaatgctagcggtttccttttttatctatataaatggtttctttctttcttcattttgaacacaaaagaagaataaccatg

SEQ ID NO: 11398 - DNA, 3000 bp, Unknown
  misc_feature (1)..( 3000): cDNA_ID_2706457_gDNA_ID_2214494_Annot_ID_133524 3000 nt of promoter + ATG
agtaatggacccttaatgagactaggggaaagtacaccggcaaaagcagagcaggtgagcagatttgaggaagagacgtgggaagaagatgcaattgacaactcaaatcctaagggtacaaggaaagaagccgttgaggtgatcctttatttcggtgttattgacattcttcaagactatgatatcaccaaaaaactagagcacgcctacaagtcactccacgcagatcccgcgtccatttcagctgttgatcctaagctttattcccgaagatttagagactttataaacaaaatattcattgaagacaaatgagaatgaatttaagtaacgtgcaacacctacacaagttcaaagaaaaagaattttacggtacatcagaatctcaggcatgggtttggcatttaattttttgggttttgaatgtcaaatttttaaacccttgaggcccctacacacgatgagatcgcacggcaccccgcaatgttgctcgaatccaggatgttgaagaggttgccggctgttttgatgaatttttggggttcactcattttttaaagaggaagagagttttggtgcttcctcaaaagatagtgtagatattaggataatgtttcttcattttattgttatatatggcgagccgagctgagaaatacatggacaaaagagtaaatgttttagcattttgtttctgcttatgattcattactcttaatctttatatatatatcgataggctttttgtaaatagtttctttttgtaatattgttttctactaggatgatccaagctaacgatctataatacctacgtttttcataaatagttgttcaaattataattatacaatttctgttattgcttcaagccatccggcaacatgaaattaacaagaggaagtccttataggaaaaaggttaagtttgtccaccggcagcttgcacataaaataaaattatcaggtgaatttcaaaaatccgtctcgaacatatacaaattttagcaaacggcatgatccatcaataataaaattaatgttttggtgagtgaacctaggttgtgcaaatgtgtactactcaagtagcgcataattttagtgaggggataaattacactagaggaacacgagtacgtagggtggtacaacgagtacaatccaaattggagaagtcatcattgttagagaattaggcagttggtaccacaaattttgtgctgaaacttttcgacaaaaacgataaagaaaacacacgttcttttaaaattattttatgacatgatcttgaatcaattcccgtttaggctatatataatgattcaaaccacacttgaaattttatttttcctacattaaatcaaaatctccatattgataagattgtgaggctggtttacacgggattgatgaaagcctcaagagtaaaaaggtcacctctctcccttcaaaatttttaggtgccaaataggtgcctcgagggaaaaccatttcggcacctaaactacaagctgacatttgtatattcttgtgtctttagcgaggaaatcatcacaaactgaattatgacgtagaataaaacaaatttaaacaaaatacaaatttcgatataaaactagaaaattcatctaattcattggagtcaaatcattttaattagctttaaacaatctgtcttcaattgaactttggccgtatgacgtggtatgagtgagttcatggccatagaagcacctctaacttagtgtgaagagtagaaagaggagagagacgacaagtattaagaggttcgcacgtactctctctgccgacttctaaataattaaatagaattaaaagtaagctacacaaagttgttatacgttataatcctttttgtcttaataaagataaataattgttacacgtacgttataatcttggattcattatggagttgaagagttatatcatctttattttttttctctgaaaaattaccttcaaaagtcatttttttttgtaactttactttcgatatccacaaaatacagagaaatcctgtgaagtcaaaataaccttcaacataactctcatatatttatttatgaagagtatttatttatttatttacatacattagattttaaattataagaatttattttagtctcctcatcgcgagaaatttgatttaatattttatttaggtttcataatttataaacttgacgatggtgatgacatgctatattgcagagtattttttatttaaggggaggtaaatggaggtaatggataaagttacaaaacatggtgatttggtttcctgccgaaaaacattttcctaatttttttcaaattttcgaataaccctttgtttataactgcaaaattgggatcttgaaccaactcttttacctatgaatttttgggtttctaacgtaattatatttgtagcttgacaaccaatctctcaagtagccccttctcttcaaccaacctatgaattatttaagttactatgtgttcttcattttggttttgggatttggttttataacttatttcttgttgattaagaaaactctcaaccaaacaaaataatggagggtgagagtgagaatcaaacccagagtggaatggataaagagcattagcatcatcaaaactttaaactcaattttctaaatttgtctaacagataattgttataaaaaaagctgtaattctaaaaaccacaacaccagaaatattaaaaaaaaaaaaaaagataaaaataacatatagaaagaacaactaagcagagaatgaaaataaaaaaaaacaactaaaaagaagttataatttataacgtatctgtcgttaaatctgttgaatcgttcttacaaaacacaatcgttacaaaagtcaattgggttcccacgaatcggtggggcccatcacgacgaggtctcttcacataatctcatctcttcttattgatttcacataaagtgttttgtaagaaaatgtttcaatg

SEQ ID NO: 11399 - DNA, 990 bp, Unknown
  misc_feature (1)..( 990): cDNA_ID_1833057_gDNA_ID_2214494_Annot_ID_183750 3000 nt of promoter + ATG
aagctttgcagaagagagagatagagtgagtgagagggagtgattttgtttctctctcttgaagggtaaaacggtcataaaatgtagaagaagaaggagaagaagaacatgttaatggcagtggtgaataaaggaggtcgctttcgttgcccaatacttacgagtctttgtctctctgtggcttgtttcacagatgacccatatcaataaatccatcttatgggtacttttgtaattatgtatttttatatgattttagtgtaatttttttgtttgcttaacatgttcttcttcatcttcttacttcaattactaatttaaattcaggagtttacaaaaagtttggttcagttttctcttctttaattattagtatagttgttgtgtttttgtcaacgttttttagtatagtgaacgtgtgatttctaagtgtttttgtttattactaaatttagaaatatgcatgccaatgatttttggtttagcatcaacacaaaacttaataaaatatgattggttttaggatgttaaccggtttggttggctccggtcggtttgtcacaaaattaatattttgaagctttgagaacgaagtggactaaaactaaaagggtcacaggcccaacaaaagaaggaagaacttaaaaaataataattccttttcattttaacttctctttttttttttgttaaatcatttatttgtttcaataaaaatacacataatattatcttttctcaaaaagtactatatagttagaaaactacatatttattttaacccaaattattatttttccattccttacacactgtacgttacactttttattatcatttgctgtacaacgttaatatttttaaccatttctgcaattgtttacctctttttcatccgcaaatttctaattaaattatatgttgaatgttcatagccataataataatttgtccaacggagataagacgcctctggtgttatccccaatg

SEQ ID NO: 11400 - DNA, 3000 bp, Unknown
  misc_feature (1)..( 3000): cDNA_ID_2706446_gDNA_ID_2214494_Annot_ID_133529 3000 nt of promoter + ATG
tatatatttctgtagtttaatgctcggtctgaatctgtggctgagaaagcgtcttttcgtcgattgcttcccaagaataggtgccttgttgcagttgatgggtatatctatgatctcatctcgtttttaagtgttctaatttatgttcaatctgtgtatgaatcccagtttagtggcagagatgttttaaattctgatcagcaatgttactctttccactcaattcatggttactcttttggctctatctaaacaatctcaaggatcagattgtttgtaaatgtttgcttccattttatcttccatctgcattacaatacgtattgtttatcaatgtatagtgttggatcaaaaaactcatacaaactttcagctagatattttaatttttcatgttacacagatgtgaaatttttctttatacatataaatatacatgcttgtgttgtgtctacgcgaaaaaacttacagtgtgattcgttttgaaggttctatgagtggaagaaggaaggttcaaaaaagcaaccctactacatccattttgaggatgggagacctctcgtatttgctgctctttttgatacttggcagaactcaggaggtgaaccgtttatcttcgttatattaagctctgagtgtctatattcttattgaagccgatcctgaaacatttcctagccttccttttaagagatgtttgaattgcttactatctttctttctcatcacttttaacctccatatatttaggtaggaagttttaacgtgtattagaaaattgaagcaaaacttgctgaatgaatttaagtctttggttttatgtcctttttggtagctacaatatctcgcctgttttcaatttaagtaacagttactttttttttcttgcaggtgagacactttacacctttacgattttgacaaccgcttcctcttcagccctccaatggctccatggttagtaatatatacactggctacatcgtgtgacattttttcttattcagtaatgattctcagtagcacaatgaaacacatagcatatgaagttgggaattgtatatttgtctatggacgcttgaagcttgtgttcctcgttgtttaaaatgaggtttaatcaaacccgcacattaataaagatacaaacttatcatagtagtatgagttgtttctgttttcgtattacatctgatttgataagctcttttagaaaagatacatatgtaattgcatgagaatctttaacttctttaagtactggaatagaacaagcagtggctgtttaaggtagtttaatattgagagtagcgtttcttatacaatgcttacattattagcggctgttgatgattgttttgttgatttgcagcagccctgaatttttgtgttaacacgtgagtttgtttatttttcatgtaagacagaatgcctgtaattcttggtgataaggattcaatcgacacatggttagatgatccctcgacaacgaaactgcagccattactttcaccatatgaaaaatcggatttggtatgcaattgcttacttcctcgcatataagagtggtctttcctttttcatttacttgagattgaagtttgaactttcaggtatggtatccagtaacctctgcaattggtaaaccaacgtttgatggaccagagtgtattcaacaggtacggttaacatctttccctttcttagtagtgtacaactcaaatctcaagtttgatctcaagtcgcattaaacatattgtcaggatcactatgtatttgtacagtctgtatgcttattgtcatttcaaataaggattatgccacctgcagataccgctaaagacttcacaaaatagcttgatctcgaagtttttctcaacaaagcagcccaaaacagatgaaggagacaaagaaaccaaatcaacagatgcaaatatcatagttgatttgaaaaaggaacctacggctgaaaaggacacgttttctgacagcattaagaaaattgaagaactagacggggagaaagatatgtcgaatgtagccaaaaatctggagtttcaagagattgtgaaagcagaaccatttgttgaagataactcagcagttgcgtcacttcctgaacctgtaaagaatgatgttcaggagggtacaaaggaagaaggcaaatccctaaagactggtcttactaaagaaacaggtgagagcagtgccagtataccggctgagtcctacatccttgatctccaaagaatctcaaaagaagaacccgagactcaaagccatcatttctttactgcagatgagagattgaatcagctgcatgaggctgtcgaagatattccaggaaatgaaaaccagaagacagttttaactagcccgacgacgaaggaaggtggcttagtgtttagcgaaaagagtgggacaaagcgagactatgaggtattctcagctcaagaaaagccacagaaacactatgagaggttgcaaaatgttaaaagcagtgggaaacaaggaaagatgcatggaatggggaaatctaacatcaagaaatctaaggagacgcagtctacattacatttctttttcgatgagaaatagttttgagtctacataacatctatgaggaccatgttggcctacttttgttgtagataatgttagataagaccatcgttttgggaatgttgcttgtattgtatgtgtagtgtttgatctttgatctaaggtaatattattatgaatgaattgggtttttaatgtccttggtggatggtaaaaatttgtgaaccaggtttcgataatcaaacccggtcgctaaacgattttatcggtttaaattagatccggtttctaaattaaacatcgaattctaatttcccctgaccagaaccaccaacgctttgaaatcgaaacagacacagatatcatcagaacgaagaacttcagccaaaatctgatttttctctgtttcacgacaagaaatcgaattaacgaaatctaatg

SEQ ID NO: 11401 - DNA, 3000 bp, Unknown
  misc_feature (1)..( 3000): cDNA_ID_2706438_gDNA_ID_2214494_Annot_ID_133531 3000 nt of promoter + ATG
attggagggctgaagaggaagcggttgtcaaaatcgtaaaggtgtaaagtgtctcacctgcaagaaaaaaaaagtaactgttacttaaattgaaaacaggcgagatattgtagctaccaaaaaggacataaaaccaaagacttaaattcattcagcaagttttgcttcaattttctaatacacgttaaaacttcctacctaaatatatggaggttaaaagtgatgagaaagaaagatagtaagcaattcaaacatctcttaaaaggaaggctaggaaatgtttcaggatcggcttcaataagaatatagacactcagagcttaatataacgaagataaacggttcacctcctgagttctgccaagtatcaaaaagagcagcaaatacgagaggtctcccatcctcaaaatggatgtagtagggttgcttttttgaaccttccttcttccactcatagaaccttcaaaacgaatcacactgtaagttttttcgcgtagacacaacacaagcatgtatatttatatgtataaagaaaaatttcacatctgtgtaacatgaaaaattaaaatatctagctgaaagtttgtatgagttttttgatccaacactatacattgataaacaatacgtattgtaatgcagatggaagataaaatggaagcaaacatttacaaacaatctgatccttgagattgtttagatagagccaaaagagtaaccatgaattgagtggaaagagtaacattgctgatcagaatttaaaacatctctgccactaaactgggattcatacacagattgaacataaattagaacacttaaaaacgagatgagatcatagatatacccatcaactgcaacaaggcacctattcttgggaagcaatcgacgaaaagacgctttctcagccacagattcagaccgagcattaaactacagaaatatatataaacaaaaaggatattcagttcttcactatataatagcctcacgtcaacaaaaacagattcaataaacttgtaataagtcccaaatcagaaatagtaaacttataccattttgaagaaatcaggcttatcagttttcttagtgaaacttggcactaatccccacttcatacaatgaacaacaacaccatcaccaacaacttcttcattgtctctccgtagaacaggtatataggatccaggggcaacattgtaagatggacgataactgatttgacaacagaaaggaacagttttagactttgcaaaggttaaaaattggaacttgaaattgattaaagagaaaagagaaataaaccggtcgaggtgaagaaatcgggtaggaacggtgtggcggtgagaagctctggggacatcgtcgggtcttaaagtacatcgagtcctaccgcacatctttactgcttttggtctggacaagtaaaaccctaataagaccgctcaaagtgaaatacgaaggatttggtttgtacggtagtactcgccagagggaagacaacagttctctttcactccggttctgtataaataaatggtcaaccgaaccatagtccttgccttgactagaaaagtaattaaaataaatattccagtggaaacagtttagttttttttttttttcgagtgttttagtttaagttaagaagactagttttttttttttttttaagctccgacgaacaaaaccactgcgaaggcaaaattgaacaaaccccctaagacacaaaacgatcgtctcttgcatgtgatctagaggagaaaggatcttcgatggtgtcttcttccaaaaccgagacggtggtaggagctccgcttaggtagactagttaaaatgaatttttcgatagaatccattttgatttaagatatgtctaatttatgtcatggtttgtttgtttcaatgttcatgtttatgtgtgtgtttttaataatttccgcggttttagtgttgatgtttttcttcggtttgtttcgttggatctttgatttataaaaagaatcaaagaaacataagtcaagtaatgagatttttaggtgatgaattgtgtatcccttgataacaatttattttactcttcataatatacataaaattttcacatttttttagagtcactatatacaactaaaatgttaaaattataactagaaaaaacgtaaataatctgctaaatcagctgtttaatattttataattgtttggcggaaatctttatcaaattcagttctttttgctcgtaattatgtagttattcgttatgtgacaaataaaatgatacaaataattttaaaatcaaattagatgacaatatcttcggatccaaaatagatgatttcatcgtgaacctgaatatcttttttttgtctaaagaacctgaatatcttactcatctttttatcaaagaaaacgtaaaccacacgatcagattaaactatataattatgttaacattttctttttcaacatttttttataaacttcaattaagtcatatactcacaaatgaccttgtgtaaatcatctcaaagaaaaattaaaatttcaatgtgtgtttaaatatatatcacataaacgtactagctatgttgttgctagtgatttgtagtatgttgttgctagtgatttgtagctatgttgttgctagtgatttgtagctatgttgttgcgtcaacataaatccatatagtggctggttaacaaaagaaacctcgttttcaaatttattagatcacatttatttatttagaatattctgttctgtggatggagtatatagtcaactttatagattcaaaaaacaataatatataattgtaatgtcttgtttccacgaagttactcgatctaccaaatcaacaagcaaatcatttttgtcttctcaaaaaagacaatcaaacttcaggattttgtcttcattaaagaaataatcatatttgtctatataagtaaacaatcaaactcgagaataaggtagagacaaaataaagaagtacc

SEQ ID NO: 11402 - DNA, 3000 bp, Unknown
  misc_feature (1)..( 3000): cDNA_ID_2685717_gDNA_ID_2214494_Annot_ID_133534 3000 nt of promoter + ATG
aattaaaaatcattgctgttgcatttttaatgaaactcttagcacgaacattattacagttagaatactaatcgttagttgagtaatatgagggagcatccaggatcaaaagcatcttgattgagtccaaaaaagttgactcgaaaaaacacaaactggatgatgtcattaacaaaatccctcataaagtactactagaaaacttagcaactttttcagactaacgggcgagtaaagtgataaactctgactggccacaaccgtaagcggctagcttgtaatcaagacagactatgaggactcgcatatatgcatcactctagaacgcatccttctttggttgatatgaaatgattcaagcagtggagataacattaaatgtgcatcaacactctcattcaatgctatcgagaagcatcattgcgcttttccattgattctagtaaaatagtacccatgcctcttttttggtaactcttctcacttacggtcagagagatcacattatcaagtctcaccaatcccgtctaattaaagttgtaaataatactcattccgttcctttaatttagagggcagaagcaagagaaaattttagggcctttacttaaactatttttcctatgagaataaattttagaatcttgcaaaaatatggacttatttgtataatgatgtttaatttgtaggagctaaaattagcaaacactacgtaaagacaattgaaatcgatatcataaacgtttaaggaaagacaagagaggagtcgagctgatgaactctttctttaaccctttgaatcactcgtagtgtgacggtttttgtgtgattcaaggatcccatgatacaacctctataaactgatgtcgcaccactcgaaaacagctctaacgaaccaagtttctacgatcctctcaaatacttactttcttaacaaagagagattgttggatatatgtgtttctatatgaacggtgaaattctcaatatgttaagaagaagacatcaaacatgcatatatagaggtttgagattggtttgattcttaagatcaatcaaccacaaccatcgcaaatccaggagaggtggatgataggatgaggcaactatctcacagtgaaaccgagtctcaaagagacgtgaaacaaaaaagactgattctcatggaagtattcaactcgacccaacacacttttggaggtccaatgatagtaaagccaaatcattgtgacccacttctcattcgcacaatttaattttataaagcccacttaactttaaaataaaatttggtccaacataattgagccttacaaaattgtggtctaaaaccatgtttcatctagctagtggctaggcttagaggcaaccctgataatacttgatctaagatccactaacacgatattccaactttgaaatgtatgcacatcattagatgctatatgaccaagaaagatatatttgacagagaaatttgcttagatttgtctaattaattatcttcgctcgagactaaggcaaaacagtccaccaacggtaagcctaataagtcaatgcatttgtttttttctaagacgtcaatgcatttcgttctttttttccattgtcccaaaatactcatccttttatattagaagaatttgtagccaaattttcgtttttaagtgatgttataaattttacattctacaaggttaattgttattctttattgttactgtaaatattgatgcattttattgttattttaatattatgataactttctaaaattttgtatgcataattatgtataaacatcatctaagcgacataagaaaataattttttcgatcttgttatttacagaaaaataaagaaaacaaattgtacaaaactcaaggcacgagtcctaatcttatatttggagatactataggtcacttcgtaggtggtgtttcgagatcaagttagccattgaagaagtcataattgtcatcaaagcagtaaacaaacgtaaaatgaggataaacaattgatgaaatcatagaaaaatcacacataatacggatattgtattattcaaacgtagttggattgtactgattttgagtataataacatcgaatatagattcaattattgagatgcgtattgctttattatcataaattaataaggttctgccattctggtcagttctagttggtggctttaacttgaatgtacaacagcctaagatttaatacggtaacaaaaagaagtgtacttgtacctgacccaaattagcaagaaaagatttgtagtatgatttattttgatggaaccttgaaccttcgaataagtaattaaagtgaaaagctctattacgtatgggtcaattcatgttaacatctcaaataaaattttaattagtgatttttttcctaatatcttgcggattgatgtcaaaatggctttcgagtttattttttaaaatatatttattcctaattccaaatttaagaacatgaaatcaattcaaatgaggttgtacacttcaaaattcgtaataacatcactagacggaaaaagagtgataactgataagaaaacaacatataataagggatgataaaggacaacaacacgatgacaaaaataaacttcattattccaattaataatgaagtacatttccaaataaacaattactaaaacttatacctaacggagaattaatactttattcttgaagtttgaacaaaaataaatatactttatttactcaaatagtagataaataaaaatcctctgttccttccttctcccacaaatcaaacaagtgactttttatatttatcttattaattctgtagtctcgagattcgctttttctcctgcttacttctttttatcatcttctctttgtcggtttgatttggaaaaactttctgcaaaaaaaagagagattcttaaactttttatctcaagatcctttcaaaaaatctgaaaagagaagatttttaataaaaaaga

SEQ ID NO: 11403 - DNA, 3000 bp, Unknown
  misc_feature (1)..( 3000): cDNA_ID_3039833_gDNA_ID_2214494_Annot_ID_133537 3000 nt of promoter + ATG
gagaatgagaatgtgagaagatttccattcttcttcattgagactcaacttacaaatagaactgtgataaagaaacactcagatcctaaaccaaaaccaaccaacaccaggcttgctcaattagtttaaagcttgccccaaaagaacttgttaaccgactgttagttaggttaatgtggtattaaccaacgggtgaactatgcttttgtctttatttttgagatttatcataactgtacattctttttgttggttctgttgtgttctggttcttacttttatcaatatatcccatgatttggactgtcataattgtttggtaacccttatatgcgaggtgttcaaatgtaactgatcagttgattcattaaggtatctgagaaacttctggaaggaaaggagctggagttcaataggtgggaaggggatgcacaagacttgcttaaaggcgtccgtgagaagcttaacgtgcttggggaggtcagattgtcaatgaaaattataactcttcattccaccagttgctaaaatctgatgttttggtgatgcttttgggaaatgaagcactggagtcgggacgagaagaacaaatgcttgaaggaaacggcaaaggcatttaagtatatggggcagatagttcgcttgatcatcttgtaaatatctaggttttaaagttaacagtttccggcaccagacctgtgttcactacggtaagtctggaatagtttcaaaactttcattgtcaactgtctcttcactgaaaatcaaatctcccctgcagattgcattgctccaatatgcataccgcaagcattgtggtctcgctaattcagggcagtgctggaaatgaagctgatgaccaccagccagcctacatggctggaagagtaactttctgttatttgttggcttaagtcagcagtaaagataagtcaccaaattacttattgaaaaatgtagccaaaggttgtggccttcgtctcatgattgtttgataagatattgttgttcctcagttatatatatttgaattttggtgatttgcacactaatcattgcttctaattatctgaataaaaagatcaaatatgactcactagctattttggttgctacatcaacataatagttcatttggctttttacctttttgacattttgaatttaatttatcttcgaattatctaagactctagtatatatcaatctaacccacatccttagcttggaaggccaagggttgtagacgacattaatcgctcatttttatatatatatttgatatctattattcaaaaccgaaaatgaaattttggtcttattcggcaactttataatgaatattttcaaattgtagttttcttataaatatactatcattcgaagttttatttttgaatcaacaattttagttaaagaaaccatgcaaaattgaaagtaaagagacatatagttggcttaatgtgttcgtaaagagatttgtgcgtagtgttaaagagcatacatacttcaatattaagaaatatttggatgtaaaaacacaattttagtggtaatatcagtagtaaatttttaagtaaatgtaaataagatgataatttgcatgtaaaacatttctaaaaaatttgttgaactatatttattacaagattgcaaacctaactttttttagattttgaaataataaataataatatttaacaaattttggtgattcataatttaactttactaaatttttattgggccgtagtgtgtaaacaacttgaatagactaaaaaacactattgggctgtagtgtaacaaaattgggctcaaatgaaaaaacaaaaaacaaaaaagagagacattaaaacgcacgtggagatagaattgtattcaactattcatcatcttcgtttggatttggtttctttctgtttctgacaaaaaccaccggcaaaataaagcgactacgattccattttcaccggcgcttccgtgagacaacatctctccatcttggaactttttctaatggcattattactcctttctcactgctctatcttatcttttcaacctccattatcgtcttcttcttcatttcattcttcacatatccaatctctgagcaaaccagttttcgcttctccttccccaattcgaaattcaatttcttcgtccgtctcttcatcttcttcctccgttagtagctccaattcgattcctcaggtcgtcgtaacacgagaacgaggcaagaacaatcaaatcatcaaagctttggtatgcatttcacagtgaattagatttgggatcatgaaattttctgaagttattcaaaattctgttctttactatggtgaaattgcaggagaaaaatggcatatcatctttagagcttccgttgattcaacatgcgcgaggacctgatttcgatcggcttgcttctgtattaaatggtgatttctgattcgtatacagataatggaggaaaactcttgcttcttcttatttctatgttatgcttaatatatgttgttggatggctatgtttactcttgcttctgtttactttttggtattctgatatgtttagtttcgttttattttgctagataagagctttgactggatcatcataacatctccagaagcaggttctgtttttctcgaggcgtggaagtaagccctggttcttgactcgttttgtgaattttgaactgtttcagtaagctatgtgttgtcagaagaaagctatggaatgtgttgctagtgagttcacttcttgtgttgtcattgttattgttattgataggcaatgggactagtctagcgttttatttagatattcagatatatgtgtaatcttcatggatatttctaacacaactatgtcaatagcgaggtttcccttgagttaaaccccattggtctccattcctcaggacagctagctccccagaagtgcaaataggtgtagtaggagctggaacagccagggtatttgaagaggcaatg

SEQ ID NO: 11404 - DNA, 3000 bp, Unknown
  misc_feature (1)..( 3000): cDNA_ID_2717375_gDNA_ID_2214494_Annot_ID_133539 3000 nt of promoter + ATG
tgttttagttcgtttaaatcttctatttttttttaatttaaggaattttagaccaaaaaattcagaatagtaagattaaatcaaaaacaaaaaatttgtttctttacaactaaaaacgatggtcatactcagtataagaaagaatttgtttggaacttagtgtgattggtttaaacgcagccaatgtggataaaattacaggagtatacaaaagtggacggttgcggttttaaatgttatcaagcagtttaaacgattggtttagcggttgaaaatatatgctttgtaaaaattatataattgataaaatagcggatgtgagaacgatataaagaaaagaaaatttgttaatcaagacggtcaaaaccaaaaagtttcgtccttcgactaaattttaatatgttatcggcttcaattcgaagtgaaaaccctagagaaccgaaagaaatcataaactctagtaattaatgttctaaaattataaaccaagaagggtgaggcccgtgagggatagatggagaggagacgatcataaactaagaagagtgtttataatgacgttttgaatttcctcaatgaaaccttctcacgttttgagaagtaggaaagctttgcaggtacacgtggcatttgagaattagctatcagagtgtttgtctacgtggcatcttgagagagtagtttaccaattgatgagattgatggtttgagaaatctcaataaattttttttcttaatagtaaattttcttaatttatattttaaattaaattatcaaaagtggttagttttgcaaatcatctttcttgattactcaataaatttctctctcatcatattatatatatatatatatatatatatattaaaagcattcaaattcagaaagcaaaaattgaaataataattctgctaatcggataattgtaataagatgatgacgacgacgaattaaggtgtcatttttggtacacattcactcacttactaatcatattcgagattgatgatttgccgtatcaaaattattcattgattttgggttccaattggtcttaataaaatataacactttgcaaatgttcaaacatacaaatttgtatgaaatgcaagatctatttaattctaaaagtattacattaaatcaaatgtaaccggtgaaaaagaataagaaaaaaaaacaaatgtaaccatttctttgcattatagttttaaatagacaaacttaaatataattacaagtacaactcttgattttatattgggatacagggataatagtataggtttgattggtgattatcaaccgcagttttttttcttgtcatcatttcaactgcaatttgggatccaaaaaacaaccaattgtaaatacttcacattggtgggtgagaataaaagtgtcaacttcattttccatctctttatctatctaatcaaagaattctatcaactcaatgatgaagaaacttcaactttgcatgtcttgagaaaaaaagatattccagcatatcaatgtcgaatcatgtgatttgaaaggataaaagtatattgctcacaaaatttctaagtgttttcgcggaaaataataataatatatgcgattctattcttttctttgtcaattgttccaaaaatacattacgaaattttacggtagagcaccacaaaaaaaaacgatattgctcaataaaacattcacatcaagaagttattgctcaataaaaaaaaattgttttgtaataaaaaaaacttttcttttaatatatttttatttttgtaactgtgaggttcaaccataaattttttttttattaaaaccaataaatatagcttaaatctctttcaaacttttttacatatgtgactaaccatcagtgacaattcgaatttaatattactcacggtctagcagatgtgttataaattttgaaatcaattataattttacaaattatatcaaacttggactttgagtatgtctctatttgccttaaatgatcaaatattacataaacaaaaaaacttgaaattaaggttattaataaataatttaatatttatttttgaattttggtggatttagaaagaataaaagtattttttctgggaaaatatgcatatttatattatttgaattgagtatagtaaactaagggtgttaaatgaaaaacaaattgttgtatgtacaaattgacttcatttggtcaatgaaagaaagttgcagtgttgggggataagtattgagcggcggctaaaatactaaagattttctaatattgccataaaagatattttttgtaactttctatttgtcacggcactgattttttcaaaactcccatgacacagctgtctttaccccataatatattgaacgtaaagtaacttctttgaccaattgaccatgcttagttgcttacgttgtttatacaaaagattcattgttggaagtataagtagcagtaatattacatcgtaggttgttttctctcattaacatcgtctctaggtgactagaagaacgatcctttgtgtgtgaactcgtgagcagaatctaaacgaaaattatataaagcttagaattcattagaaaaaagtgacataccaagaaacccgaaaatggggaagttaatttcatttgaacaaaaaaaaacattgtagttttgtaataaaagggttgacatggtcttaatgtggaagaagtaaagaggctcacgaaaagtccatgttgtctacaaaggaagaaacaagaaccaatagaattagagttcaaaccaaaggacgaagtatgcaagttaatttgacaagctaatatcctaagaatgaagacatggtctaactttgaaacagcagccactagtgtcctataaatacatagagttcattaacctctcataatatctcacaatcaaagttctatctcctcaagtatcaatacattgatatccattaaaaaaaagaaatatcaatacattgctttgcttgttctgtaagatg

SEQ ID NO: 11405 - DNA, 3000 bp, Unknown
  misc_feature (1)..( 3000): cDNA_ID_2706409_gDNA_ID_2214494_Annot_ID_133540 3000 nt of promoter + ATG
caattcaaataatataaatatgcatattttcccagaaaaaatacttttattctttctaaatccaccaaaattcaaaaataaatattaaattatttattaataaccttaatttcaagtttttttgtttatgtaatatttgatcatttaaggcaaatagagacatactcaaagtccaagtttgatataatttgtaaaattataattgatttcaaaatttataacacatctgctagaccgtgagtaatattaaattcgaattgtcactgatggttagtcacatatgtaaaaaagtttgaaagagatttaagctatatttattggttttaataaaaaaaaaatttatggttgaacctcacagttacaaaaataaaaatatattaaaagaaaagttttttttattacaaaacaatttttttttattgagcaataacttcttgatgtgaatgttttattgagcaatatcgtttttttttgtggtgctctaccgtaaaatttcgtaatgtatttttggaacaattgacaaagaaaagaatagaatcgcatatattattattattttccgcgaaaacacttagaaattttgtgagcaatatacttttatcctttcaaatcacatgattcgacattgatatgctggaatatctttttttctcaagacatgcaaagttgaagtttcttcatcattgagttgatagaattctttgattagatagataaagagatggaaaatgaagttgacacttttattctcacccaccaatgtgaagtatttacaattggttgttttttggatcccaaattgcagttgaaatgatgacaagaaaaaaaactgcggttgataatcaccaatcaaacctatactattatccctgtatcccaatataaaatcaagagttgtacttgtaattatatttaagtttgtctatttaaaactataatgcaaagaaatggttacatttgtttttttttcttattctttttcaccggttacatttgatttaatgtaatacttttagaattaaatagatcttgcatttcatacaaatttgtatgtttgaacatttgcaaagtgttatattttattaagaccaattggaacccaaaatcaatgaataattttgatacggcaaatcatcaatctcgaatatgattagtaagtgagtgaatgtgtaccaaaaatgacaccttaattcgtcgtcgtcatcatcttattacaattatccgattagcagaattattatttcaatttttgctttctgaatttgaatgcttttaatatatatatatatatatatatatataatatgatgagagagaaatttattgagtaatcaagaaagatgatttgcaaaactaaccacttttgataatttaatttaaaatataaattaagaaaatttactattaagaaaaaaaatttattgagatttctcaaaccatcaatctcatcaattggtaaactactctctcaagatgccacgtagacaaacactctgatagctaattctcaaatgccacgtgtacctgcaaagctttcctacttctcaaaacgtgagaaggtttcattgaggaaattcaaaacgtcattataaacactcttcttagtttatgatcgtctcctctccatctatccctcacgggcctcacccttcttggtttataattttagaacattaattactagagtttatgatttctttcggttctctagggttttcacttcgaattgaagccgataacatattaaaatttagtcgaaggacgaaactttttggttttgaccgtcttgattaacaaattttcttttctttatatcgttctcacatccgctattttatcaattatataatttttacaaagcatatattttcaaccgctaaaccaatcgtttaaactgcttgataacatttaaaaccgcaaccgtccacttttgtatactcctgtaattttatccacattggctgcgtttaaaccaatcacactaagttccaaacaaattctttcttatactgagtatgaccatcgtttttagttgtaaagaaacaaattttttgtttttgatttaatcttactattctgaattttttggtctaaaattccttaaattaaaaaaaaatagaagatttaaacgaactaaaacaattgatacaaatttattttctattaaacaatattacattaaagatcgaatccgggtcgggtaatgtaactcaaaacttgcttggtgcgaccctctccactttgccagcctcattcatctctaaaaataaacaaaaaccagtttttttgttgttgttcaggtcaagtagtttggtttaactactttttatacgtggaccaatgaaacaccaagaagccactaattttctttattaaaaactaaaactgaataacaaaataactaaaaaaaaaggaaaaaaaataaaataaacaaacaaaaccgaacattatgaaagagagagaatgccagatggatgatgaagatgagccgatgagagatagcttcatgatttgtctccgcgaccgcagttatctctttctaatttctgtctgaaataataaattaaacttcttctactacctccgatcatcataatcctccggtaagacttctcttctcttcttgaatcttcttgatgcagcttttttttgtcggcatacaacttttgtatttttcatattttttttttctccagctgataaactcagaattcttgaaattcggaaacttttcatttttctttgaattgtaggaaattatcattgttcgtatttatcttcttaaaaaaacactattaaatcctggaattggtaattatttactcacgtttccgaatttgtttacacaaagatgaaaatccgatgatcttgattaaagtatgtttgattcttgtataccatatttgtttgattagagtaatttgatcatcaaagatgttttgtattcaattttttctcaattagtctttatgttttgtagcaatttcaggttacagggga

SEQ ID NO: 11406 - DNA, 3000 bp, Unknown
  misc_feature (1)..( 3000): cDNA_ID_4359853_gDNA_ID_2214494_Annot_ID_133542 3000 nt of promoter + ATG
agcatcttgcaacgccatgtaagcagcatcaatctgagcatcaagcatgttatcgtaatgcaaatcggttttcgggtcatatatcccttccgttggcttgaaaagagcatagttgatatcaatctccttcggattataagtgtacgccaaaaaagggtaagcattcaaacaaaaaggagacccaatctgctgaaaaaactccaacaatggcttcatgaactgaacaacattctctttaaacacacaagacgaaggcgggtaggaatcagaaaacacagcctgtgaatgagccgtagtgatctgcacagtgtcctccagattcattttcttcaacgcattgtacacatttttagcagcaccaagtaaagctcccgcgagctcagaatcaccgcctccaagaacttcgttacctatagcgataccgcgaatccgagtcttgggtaagaaagactgaatattttctttaacccaagagaaagcatgatcagcatttgaactcatctcttttaaaaacccattaggaagtccaacaacaaggtctaaaccagttccactaaaagcttcaagaacagtgtgatctacatcgtatatacgcacattccgaattttagcttgctttagaagtaaaactactttctccggagatggtatgttgtcagctatccttccataatttatcccatatgttccaacaaatgctccatcaacttgatactcttaaagatcaaaaaaaaaaaaaaaaaatcatcagaaaaaaaacaaccagaaattcaaaatcataacatttaagattcaactatgtttgatcaatcaacgaaattagcaaaacccaacatcgtaataagagttgaaaattgaaatttaaacttaacctagaattttttttttagcaatagaattaataatagaaagacactgtaccaagcgaagtcagattgaagaagaagaagaagaagaacttgagaagaagtaacttagaacttctcatctgagaagagttatcagaaaactgtggaaaaaaagtggaagaagaagcaaagggtcatcgagagtaaacgggaatctgattcgacagcgacatcgaagcaatcagatacttacgatcaaaacagtttttcaggtaaacgcaaaaagtctagaagagattgatgaagctggagaagaagaagaagatgattgtgcttcacttgaatgatttgcaaaaggagaattttcaaaagagagattttttgttcttctgggttttgggcttttgggtttgattggagtttcttgttttcgtcactgtcgaatatatgaataacactttactttttttttattcttgttgaaacttttttatttggttattaaaataagaagttaaattgaatttaataagaaatgataaagaagaataataagatggaaatttcgtagtggttaagtagtgatgtggttggacggtgagtttctttggacgtaccaacattacagctaaatcagacgtgtatggacctcattgtattactttttctcaagtgctttttttctgtttgtaaaatgtatgtttgtttactagggttccaacttttcttgtagactttataatttaactttttagttttgtatagaaagatggatgattgagaatttagcagactatttagatattggctgcgttaagtgatatgagagaggtttggtagagaattagcctaattagattatggaataatcaagtgattaagtttgcaataaataatgtgagttttctaagttaagtgatctgatcattcacttgaactgaatatattaaggctgcaaatggttggataacgatgaaaaaaaatagaaaatttgagttgaaaaaaaaaagttgaatactattcaactcattcctctgcgatattcaactcattcctctgcgaaatatgagatgaacaagttataactttatttttaataattagttcatttttccaacttgaaatggttgtattatttttccaacttattcattttaaatggtaaaatattagatgaatgctcattcaattctttcaacttcttaattctaggcaatcatttgcaccttaaaatttatataaaaaagatagttatttcgaaaaaccctctaaatcaatttgactctcttaatatagattaataatatgacctcaatcgaaccactctgtaatctaagtggatcacgataccatcatttcccatatcgaattcttccaaatgaactactctctaaaccttaatgtttcccccaaatcgatatttcaatggatattttctttaattttcatgtcattttttgttatgttttatggcacaagaaactaatgaaattcatgtcctttttagcgatgtcacgtcatcgatatgaccgaagtttattttgcggatgactttagagttcatatgattaacttgtatagttcggatatgaatggtagatttgtaaacgaaattgacttacaggttttgtttgcagcaaacccaaaaattaaaagcctaatgaagaaaaattcggattgggcttggagttgttcggatgaattgttgtttgtagccttataggggcccttgtttatacaagaagaaagaaaaaacacaagagacgacgcaattgaaagaaaaaaaaaaacgagaagcgttttctttctctccaaaatccattactcgcgaactttcctctgctaaggtattctttaaccttgtcaacacactagccttaaggttgtaaatctctctctctctctctctttttttcaatttctacgaagattggtaaccctagcgttttgttatcttcgcttcaatctgctctgttcgagatttggttttgcaattttcacggatttcgttatctttagtatacatatgattgttgtcaataaactttgcagaagaacttgttttaagccttgatctaagagcaccaagctgaatttattctgatttctctgtttactgaatagtgttcactagaaagaggtggtgattatg

SEQ ID NO: 11407 - DNA, 3000 bp, Unknown
  misc_feature (1)..( 3000): cDNA_ID_3039813_gDNA_ID_2214494_Annot_ID_183780 3000 nt of promoter + ATG
ggttgattgaggtattgattgactgaagagcacaattctgcatcaccttcagctcttggctcctgcaaaataatttagaaatagagttctgagagacaaacaagatcaaagatataagtgattaaggtgaacaaacatacaaacatatctttaagaaaacaaacaagtaacctgcatccagaagaataacttgcggtcatcactgttgaacttcagaatatacaccctgtctgaggattgattaaccttttcaaatagagcttcatctgggaaaacaatttgatcctataaataggtatggtcaaggagaaaacttcgtaactggaacatctggtagcaacaattaataaatccttcagtttttgttctattcatgcatggcaaaaaataaaaaaacctcctaggtggatagagctaagaaatttgaccgtcttgggtcacgaatccactggtatagcaaagacttgatactaggagaatctctagtccttttctaaaattcaaaaaaacaagtgcagaggatacatcttctactgtattctggtttcgatcaagccactggaaatgaatcagtccctcgtcaccctaaaagaaaggataacaggattaaaaaacctaggttaacatttacagagaaccagtaataaacgtgttctgacaccaacaattagattccgatatgctttaacttcaataggaaaagctgatacactccaacgttcaatggaaacgaataaattcaaattactaaatggaaactaaaagcgtcgacattactctagctatgcggacaagtccttttcgtgcatcagggacaactcttgttccctgcaaagacatcttcccagcacgaaactcaagcatgatctcctgccaaaattagtccaaacataagtgtaagaaccttcgtaattagtctaagaacaataagagaaagataaacaccacctatagttacctgcatcacgggaaacgcttcgcttgaactcataatcaccacctctttctagtgaacactattcagtaaacagagaaatcagaataaattcagcttggtgctcttagatcaaggcttaaaacaagttcttctgcaaagtttattgacaacaatcatatgtatactaaagataacgaaatccgtgaaaattgcaaaaccaaatctcgaacagagcagattgaagcgaagataacaaaacgctagggttaccaatcttcgtagaaattgaaaaaaagagagagagagagagagatttacaaccttaaggctagtgtgttgacaaggttaaagaataccttagcagaggaaagttcgcgagtaatggattttggagagaaagaaaacgcttctcgtttttttttttctttcaattgcgtcgtctcttgtgttttttctttcttcttgtataaacaagggcccctataaggctacaaacaacaattcatccgaacaactccaagcccaatccgaatttttcttcattaggcttttaatttttgggtttgctgcaaacaaaacctgtaagtcaatttcgtttacaaatctaccattcatatccgaactatacaagttaatcatatgaactctaaagtcatccgcaaaataaacttcggtcatatcgatgacgtgacatcgctaaaaaggacatgaatttcattagtttcttgtgccataaaacataacaaaaaatgacatgaaaattaaagaaaatatccattgaaatatcgatttgggggaaacattaaggtttagagagtagttcatttggaagaattcgatatgggaaatgatggtatcgtgatccacttagattacagagtggttcgattgaggtcatattattaatctatattaagagagtcaaattgatttagagggtttttcgaaataactatcttttttatataaattttaaggtgcaaatgattgcctagaattaagaagttgaaagaattgaatgagcattcatctaatattttaccatttaaaatgaataagttggaaaaataatacaaccatttcaagttggaaaaatgaactaattattaaaaataaagttataacttgttcatctcatatttcgcagaggaatgagttgaatatcgcagaggaatgagttgaatagtattcaacttttttttttcaactcaaattttctattttttttcatcgttatccaaccatttgcagccttaatatattcagttcaagtgaatgatcagatcacttaacttagaaaactcacattatttattgcaaacttaatcacttgattattccataatctaattaggctaattctctaccaaacctctctcatatcacttaacgcagccaatatctaaatagtctgctaaattctcaatcatccatctttctatacaaaactaaaaagttaaattataaagtctacaagaaaagttggaaccctagtaaacaaacatacattttacaaacagaaaaaaagcacttgagaaaaagtaatacaatgaggtccatacacgtctgatttagctgtaatgttggtacgtccaaagaaactcaccgtccaaccacatcactacttaaccactacgaaatttccatcttattattcttctttatcatttcttattaaattcaatttaacttcttattttaataaccaaataaaaaagtttcaacaagaataaaaaaaaagtaaagtgttattcatatattcgacagtgacgaaaacaagaaactccaatcaaacccaaaagcccaaaacccagaagaacaaaaaatctctcttttgaaaattctccttttgcaaatcattcaagtgaagcacaatcatcttcttcttcttctccagcttcatcaatctcttctagactttttgcgtttacctgaaaaactgttttgatcgtaagtatctgattgcttcgatgtcgctgtcgaatcagattcccgtttactctcgatgaccctttgcttcttcttccactttttttccacagttttctgataactcttctcag

SEQ ID NO: 11408 - DNA, 3000 bp, Unknown; identical to SEQ ID NO: 11405
  misc_feature (1)..( 3000): cDNA_ID_2706409_gDNA_ID_2214494_Annot_ID_183776 3000 nt of promoter + ATG

SEQ ID NO: 11409 - DNA, 3000 bp, Unknown; identical to SEQ ID NO: 11404
  misc_feature (1)..( 3000): cDNA_ID_2717375_gDNA_ID_2214494_Annot_ID_183774 3000 nt of promoter + ATG

SEQ ID NO: 11410 - DNA, 3000 bp, Unknown
  misc_feature (1)..( 3000): cDNA_ID_3039833_gDNA_ID_2214494_Annot_ID_183772 3000 nt of promoter + ATG
acccaggagaaaacattggtataactgaggaaatgagattcgtcgccatgagattacgcaatgttaatggtaaaaaattagatctttctgaagataaaactgacaccgagaaggaagaagaagaagaagaagaagacgatgatgatgatgatgaagtaaaggaagagacttggaagcctagcaaagaagggtttcttaagtacttagttgatagcaagcttgtcttcgatactattgaacgaattgttgacgaatctgagaatgtgtcttgtaagaaccctactttggtctcgaatttgacagtttggtaatgatttgggttaatggggtttgtgttcaatgtacagatgcttactttaggagaacaggattagagagatgtgaaagtattgagaaggatctacaatggttaagagaacaagatttggttataccagaaccaagtaatgtaggagtttcttatgcaaagtatttggaagaacaagcaggagaaagtgctcctttgtttctttctcatttctacagtatctacttttcacatattgctggtggtcaagttcttgtaagacaggttagtttctttggaaagctttcataaagtaacatagaagagttatataactgcataaggtcacatccagcatattgaatggttaaagctagttcgatatattaaagattagtatcgatataaatggattcaggagagttcgatttatcgggagttttgctggtttttagtatacttttcacacattgctggtggtcaagttatttgtaagacaggttagtttctttgataagtgttcacagagtaacatagaagaaattttcaactgcataatgtcacatctaggatattgaatggtaacagctagtttgatagagttagagattgatatagatatagtggattcaggagagttgggtttatcgggagttttgcggttatggtgggtatgagagagtggcgataagaatgagaatgagaatgtgagaagatttccattcttcttcattgagactcaacttacaaatagaactgtgataaagaaacactcagatcctaaaccaaaaccaaccaacaccaggcttgctcaattagtttaaagcttgccccaaaagaacttgttaaccgactgttagttaggttaatgtggtattaaccaacgggtgaactatgcttttgtctttatttttgagatttatcataactgtacattctttttgttggttctgttgtgttctggttcttacttttatcaatatatcccatgatttggactgtcataattgtttggtaacccttatatgcgaggtgttcaaatgtaactgatcagttgattcattaaggtatctgagaaacttctggaaggaaaggagctggagttcaataggtgggaaggggatgcacaagacttgcttaaaggcgtccgtgagaagcttaacgtgcttggggaggtcagattgtcaatgaaaattataactcttcattccaccagttgctaaaatctgatgttttggtgatgcttttgggaaatgaagcactggagtcgggacgagaagaacaaatgcttgaaggaaacggcaaaggcatttaagtatatggggcagatagttcgcttgatcatcttgtaaatatctaggttttaaagttaacagtttccggcaccagacctgtgttcactacggtaagtctggaatagtttcaaaactttcattgtcaactgtctcttcactgaaaatcaaatctcccctgcagattgcattgctccaatatgcataccgcaagcattgtggtctcgctaattcagggcagtgctggaaatgaagctgatgaccaccagccagcctacatggctggaagagtaactttctgttatttgttggcttaagtcagcagtaaagataagtcaccaaattacttattgaaaaatgtagccaaaggttgtggccttcgtctcatgattgtttgataagatattgttgttcctcagttatatatatttgaattttggtgatttgcacactaatcattgcttctaattatctgaataaaaagatcaaatatgactcactagctattttggttgctacatcaacataatagttcatttggctttttacctttttgacattttgaatttaatttatcttcgaattatctaagactctagtatatatcaatctaacccacatccttagcttggaaggccaagggttgtagacgacattaatcgctcatttttatatatatatttgatatctattattcaaaaccgaaaatgaaattttggtcttattcggcaactttataatgaatattttcaaattgtagttttcttataaatatactatcattcgaagttttatttttgaatcaacaattttagttaaagaaaccatgcaaaattgaaagtaaagagacatatagttggcttaatgtgttcgtaaagagatttgtgcgtagtgttaaagagcatacatacttcaatattaagaaatatttggatgtaaaaacacaattttagtggtaatatcagtagtaaatttttaagtaaatgtaaataagatgataatttgcatgtaaaacatttctaaaaaatttgttgaactatatttattacaagattgcaaacctaactttttttagattttgaaataataaataataatatttaacaaattttggtgattcataatttaactttactaaatttttattgggccgtagtgtgtaaacaacttgaatagactaaaaaacactattgggctgtagtgtaacaaaattgggctcaaatgaaaaaacaaaaaacaaaaaagagagacattaaaacgcacgtggagatagaattgtattcaactattcatcatcttcgtttggatttggtttctttctgtttctgacaaaaaccaccggcaaaataaagcgactacgattccattttcaccggcgcttccgtgagacaacatctctccatcttggaactttttctaatg

SEQ ID NO: 11411 - DNA, 3000 bp, Unknown; identical to SEQ ID NO: 11402
  misc_feature (1)..( 3000): cDNA_ID_3039843_gDNA_ID_2214494_Annot_ID_183769 3000 nt of promoter + ATG

SEQ ID NO: 11412 - DNA, 3000 bp, Unknown
  misc_feature (1)..( 3000): cDNA_ID_2989965_gDNA_ID_2214494_Annot_ID_183768 3000 nt of promoter + ATG
agatatagaggctgtggagatggccatgggatttgtccagagtaatcaacccttcttgtgggtgatccgaccaggctctataaacggacaagaatctttagacttcttaccggaacagttcaaccaaacggtgaccgatggaagaggttttgttgtgaaatgggccccacaaaaagaggtattaaggcatagagcagtgggagggttttggaaccatggtggatggaactcgtgcttggagagcataagcagtggtgtaccaatgatttgtaggccgtattctggtgatcagagggtgaatactcgacttatgtcacatgtttggcaaaccgcgtatgagatcgaaggtgaattggaaagaggagctgttgagatggccgtgaggaggctcattgtggatcaagaaggtcaggagatgagaatgagagccaccatattgaaggaagaggttgaagcctctgtcacaaccgaaggctcttctcacaattctttaaacaatttggtccatgcaataatgatgcaaattgacgaacaatgataagtggtaaatttggtgagaacgaaattacgtgtgtggtgttttaatttttaaataaaaatatgtgtttgaagtaatagcggtttttgatgaataaattttacattcatccaaaaaaatacagcaattttgtattgttcttaagttcttaatggttgaagctaattttaggatacaatgatattttcattggtgttaataacaagccagtttttgacatgtgccaagtgtgtatttgcgtacgtaggatccaatcttctttgcaattttatttgtagctattaaggaatatttgtaaataatttatagtttttataaaataaacatgtaagagcatactcactaaacaattcttgatcggtatctttactatatattagtaaataaaatttaagacattatctttccagtgtctaaaatgtcttcctaaagacacaaatgtaatgctaaaagacacttcccattttttaatagggaaaaatgtcaaaaaaagcgcgaactttaaaatttgggacgataaaagcatgaactttcgaaatgtcatttaaatcataaaatttcatttgactttttaaaaaaattgtcaagtttcgttgacttgaccattttgggcacgtcgttaaatttccgttaacagcattaactttctgttacaaatttctgttaaatcgaaacgacgtcgtttttagatctccaaaacgacgtcgtttcattagaaaataatgatgcaaaatccgcgtccgcaatggctcgaacatatgacctattggattcatatagggcaatataccgctgagctacgacaataatttacaataataacaaacattgcatacatatactaaccaatataatatactattaattaaaaatatatgcaattaattaaaaataacaaaattaaaaaatatatattaaataaacttaccataatatattttaaatttcaaatatttaattatatatataaagacatcttctatatttgaaaaattatagatctctctagaattcacataagtctttgcaattgtatttttggaatagataaaaactgaaaaactgaaaattgaaaataatttgcataagtcttttctattgtattttctaaatttggaatacttaaaaattgaaaactaaaaataatttctcaaatataaaaaacatctatatagaaatttaatatttcaaatttcaaaatatatatgtatggtaggtatatttaaaaactttgtatatatttgtttttttgtagttttgtaatatataatttattgtatatattttaaattaattgtatagttttatttgttagtatatatatgctatgttttttttttatcaaactgttctcgtagctcagcggtagattgtcctttaggagtccaataggtcagatgttcgattccatgtgaatgcggatttagcatcattattttctaacgaaacgacgtcgttttggaagctccaaaacgtccaaaacgacgtcgtttcgatttaacagaaatttctaacagaaggttaaccccgttaacggaaatttaacgacgtgcccaaaatgaccaagtcaacgaaacttgacaatttttttaaaaagtcaaacgaaactttgtgatttaaatgacaattcgaaagttcatgtttttttcgtcccaaatttgaaagttcgcgcattttttgacatttttccctttttttatcatattttttattagttttttatttaaagacacccacacataatgatcaatgtggatgctcttacatgcctacaaaacaaacctattttatagttcttctttgggttttcaaatgttcttataatagagattgtgtatagattgagcattatcgatccaaatatataaaaagagaaagaaaaaaatatatatgatttatacccattcattgttttataatgatcggtagacgttgaaaacccaaaaatgataaaattagtagtagctaattgagttctagaaataaggtttgtaaacctcattagtttttttgacatgggatacgacttaagactactaattattaattgttctatttctgttgacacttattttaagaggaaatcgaccctgtttctatttttagggaagaaataaatagtaaaagattgctaggagttagaatattaattttgtaagatgttagatgtgaagtaacaaaagaatgccaaatatagattaagttgacggacacggtggtgaaccaatgaattttcacatcaataatcaaaaaaaggtttaaccaatcattcatctatttgcttcctgccacaactatatttgcatcaccccattgttcttaagctaaaaccaaacccctttcaatctcaaatctaattttaaatctaccttttcttttgtttttttctctcctcacaaattactcaatttatagttgttaattttttgaggagaacaagaaggtggtagtattatttcaaa

SEQ ID NO: 11413 - DNA, 3000 bp, Unknown; identical to SEQ ID NO: 11401
  misc_feature (1)..( 3000): cDNA_ID_2706438_gDNA_ID_2214494_Annot_ID_183767 3000 nt of promoter + ATG

SEQ ID NO: 11414 - DNA, 3000 bp, Unknown; identical to SEQ ID NO: 11400
  misc_feature (1)..( 3000): cDNA_ID_2706446_gDNA_ID_2214494_Annot_ID_183765 3000 nt of promoter + ATG

SEQ ID NO: 11415 - DNA, 3000 bp, Unknown; identical to SEQ ID NO: 11397
  misc_feature (1)..( 3000): cDNA_ID_2706401_gDNA_ID_2214494_Annot_ID_183757 3000 nt of promoter + ATG

SEQ ID NO: 11416 - DNA, 3000 bp, Unknown; identical to SEQ ID NO: 11396
  misc_feature (1)..( 3000): cDNA_ID_3039869_gDNA_ID_2214494_Annot_ID_183753 3000 nt of promoter + ATG

SEQ ID NO: 11417 - DNA, 3000 bp, Unknown
  misc_feature (1)..( 3000): cDNA_ID_3039872_gDNA_ID_2214494_Annot_ID_183751 3000 nt of promoter + ATG
gggtaaggttactcattttgacatctttggttaaaatagttacctctagttttgtttcagtcccacatctcaatttgttttaacacagtcatttcgtcgaacacctcatatgcgttgttgttgtatactaaattactaatactttaaacaaagactaacaaaaatggcttaattcgataatcaaaaccactatttggatcaaacgttgactaatctcacttaaatcactcttctgttttcctctaatgacggatgaagaacagagttagttttcaaggtttatccacagatccactgaaatcaacaatggtgaataaagctccgaagaggaaacatgtatcacctgaatctctccttctctctattctcaatgatttgttgtttctaaattctcaaaagcttgactcttgtttccgtagaaaatcgaattcagatgcgtgtagctttatagttagcttaaattttgcaaaagttggaaattttacttcaagatccaatgaaattgctccattgatcaatgaagctgttgctaaaggcaagaactttgatactgggtgaggacaagaaccttgtagatactgtttttctttaaaacatttgtgtctaaactacatgttttgttaggacaagagttggattagatgttggtcatcttcttaaatctgcattagctggaggaatctcatgtgctttctctgcttttttgatgcatccagtggatactgtcaaggtataatggtaatttcatttcaggttcttcttttgtgtttatgagattgttctgattacttacatttgtcttggatcattaagacacaagttcaagcatcaactacattgtcgtttctcgaaatattgtcaaagattccagagattggtgctcgaggtttatacaaaggctcgattccggctgttgttggtcaatttgctaggtttcatctcttatgctttgccttgtggttattggttataagcattatcatgatttcatctcttgtttaaacatttttcagtcatggtttacgaacaagtatatatgaagcaagtaaacttgcgttaccgctcgttgctcctactcttcttgatattcaagttagtaattgtaaaaagctcattgccaactttattgctacataatgtttcgttctttgaatttttttgcttcttgattattttaggttcagtcaatcgcgtcttttattggtacggtattggggacaacgttgcgaataccgtgtgaagtgttgaaacaacggttacaagccaaccagtttgataacatagtggaagctacagtttcgacttggcatcaagaagggctcaaaggactctttcgtgggaccggtgttacccttctacgtgaggttcccttctacgttgctggcatgggactttacaaccaatcaaagaaggtaatcatgatagaacagaacaatgacatgtctttgtgtaattaataagacgtggttgcgattgagtttcacaggtggtggagagacaattaggaagagagttggagccgtgggaagccatcgcggttggagccttgtccggtggtttcactgcagttttaacaacgccattcgatgtgattaaaacaagaatgatgacggctccacaaggcgtggaattgtcgatgttgatggctgcttattcaattctcacacatgagggtcctcttgctttctacaaaggagctgttccaaggtttttctggactgctcctctcggagccttgaacttagctggctatgaacttcttcaaaaggctatgatcacacctctgaatcaatcagtgcatagtgagtaagattggaaaactagaccaacattttgtgttataataatttatttcatgtttatgtattctaaatcttgagaaaaaaaaatatattctacaaaaataacataatttacttctttttttttttctcaagtgtagtattgtattaaacgtaacccgatcatacacgggctacactaaaagccccacgaaaagtttacagaaatatttgaggcccaacaagagcctatcggataaccgcatactgcataagaaaatttgtttgtactccacctaagcccacgtgtcagcaactggatacaaccacgacacatgctggatgagtaatcgaaagatttccgacatcaaccttcgccgttgagcatcgatttcggtgagaagattatcgccgaaatataatcggtcgttgaatcctttgtttgtcaccgttgctaagctaatcgaaactccaaaaagaaactaacagctttaaggcaatcataatatgcttcgaaagattcttctttccttatgtctctggaaagatttctgcaaaccaaaagctcaaaagaaacaagtcggagaaatccattctttaagtgacacaacacctaaaacatcatcaccaactcagatctaatgagattattgaaacaaaaaaacttaacaaacccaaaactggccgaagacaccgtaaacaagacggcaaatcgccagacataagccagccaacactactttagaagctagtcgatgctggacaggagccggataaaccggacggcgaggatagaacatgcatatgagatcacgatcggactttaccaaaaaaacaaactctctctctcaaaagtttttgagagagaagagagaaagttttcgtcaaggttaatatctcctttaataatttaattatggaaacactttgctcggatttatttttaacataatttacttaacatcatgtattctaaaaaactaatcagctcacccgaatcgattgactattacaaaatactgcttaatatagacaaatatttgatcataaaaataattaaaaagattataattaataaaatattattgatctcatatataaatggcatcgatacatttgcaaatatttatttttcctttgaattaaaaaaaaatatcaaaggccgaataaaaaacatcattcggcaagttcatcgatccacgaaaaaaaagaaacgatg

SEQ ID NO: 11418 - DNA, 3000 bp, Unknown
  misc_feature (1)..( 3000): cDNA_ID_2717367_gDNA_ID_2214494_Annot_ID_133543 3000 nt of promoter + ATG
aagaaaacaaacaagtaacctgcatccagaagaataacttgcggtcatcactgttgaacttcagaatatacaccctgtctgaggattgattaaccttttcaaatagagcttcatctgggaaaacaatttgatcctataaataggtatggtcaaggagaaaacttcgtaactggaacatctggtagcaacaattaataaatccttcagtttttgttctattcatgcatggcaaaaaataaaaaaacctcctaggtggatagagctaagaaatttgaccgtcttgggtcacgaatccactggtatagcaaagacttgatactaggagaatctctagtccttttctaaaattcaaaaaaacaagtgcagaggatacatcttctactgtattctggtttcgatcaagccactggaaatgaatcagtccctcgtcaccctaaaagaaaggataacaggattaaaaaacctaggttaacatttacagagaaccagtaataaacgtgttctgacaccaacaattagattccgatatgctttaacttcaataggaaaagctgatacactccaacgttcaatggaaacgaataaattcaaattactaaatggaaactaaaagcgtcgacattactctagctatgcggacaagtccttttcgtgcatcagggacaactcttgttccctgcaaagacatcttcccagcacgaaactcaagcatgatctcctgccaaaattagtccaaacataagtgtaagaaccttcgtaattagtctaagaacaataagagaaagataaacaccacctatagttacctgcatcacgggaaacgcttcgcttgaactcataatcaccacctctttctagtgaacactattcagtaaacagagaaatcagaataaattcagcttggtgctcttagatcaaggcttaaaacaagttcttctgcaaagtttattgacaacaatcatatgtatactaaagataacgaaatccgtgaaaattgcaaaaccaaatctcgaacagagcagattgaagcgaagataacaaaacgctagggttaccaatcttcgtagaaattgaaaaaaagagagagagagagagagatttacaaccttaaggctagtgtgttgacaaggttaaagaataccttagcagaggaaagttcgcgagtaatggattttggagagaaagaaaacgcttctcgtttttttttttctttcaattgcgtcgtctcttgtgttttttctttcttcttgtataaacaagggcccctataaggctacaaacaacaattcatccgaacaactccaagcccaatccgaatttttcttcattaggcttttaatttttgggtttgctgcaaacaaaacctgtaagtcaatttcgtttacaaatctaccattcatatccgaactatacaagttaatcatatgaactctaaagtcatccgcaaaataaacttcggtcatatcgatgacgtgacatcgctaaaaaggacatgaatttcattagtttcttgtgccataaaacataacaaaaaatgacatgaaaattaaagaaaatatccattgaaatatcgatttgggggaaacattaaggtttagagagtagttcatttggaagaattcgatatgggaaatgatggtatcgtgatccacttagattacagagtggttcgattgaggtcatattattaatctatattaagagagtcaaattgatttagagggtttttcgaaataactatcttttttatataaattttaaggtgcaaatgattgcctagaattaagaagttgaaagaattgaatgagcattcatctaatattttaccatttaaaatgaataagttggaaaaataatacaaccatttcaagttggaaaaatgaactaattattaaaaataaagttataacttgttcatctcatatttcgcagaggaatgagttgaatatcgcagaggaatgagttgaatagtattcaacttttttttttcaactcaaattttctattttttttcatcgttatccaaccatttgcagccttaatatattcagttcaagtgaatgatcagatcacttaacttagaaaactcacattatttattgcaaacttaatcacttgattattccataatctaattaggctaattctctaccaaacctctctcatatcacttaacgcagccaatatctaaatagtctgctaaattctcaatcatccatctttctatacaaaactaaaaagttaaattataaagtctacaagaaaagttggaaccctagtaaacaaacatacattttacaaacagaaaaaaagcacttgagaaaaagtaatacaatgaggtccatacacgtctgatttagctgtaatgttggtacgtccaaagaaactcaccgtccaaccacatcactacttaaccactacgaaatttccatcttattattcttctttatcatttcttattaaattcaatttaacttcttattttaataaccaaataaaaaagtttcaacaagaataaaaaaaaagtaaagtgttattcatatattcgacagtgacgaaaacaagaaactccaatcaaacccaaaagcccaaaacccagaagaacaaaaaatctctcttttgaaaattctccttttgcaaatcattcaagtgaagcacaatcatcttcttcttcttctccagcttcatcaatctcttctagactttttgcgtttacctgaaaaactgttttgatcgtaagtatctgattgcttcgatgtcgctgtcgaatcagattcccgtttactctcgatgaccctttgcttcttcttccactttttttccacagttttctgataactcttctcagatgagaagttctaagttacttcttctcaagttcttcttcttcttcttcttcaatctgacttcgcttggtacagtgtctttctattattaattctattgctaaaaaaaaaattctaggttaagtttaaatttcaattttcaactcttattacg

SEQ ID NO: 11419 - DNA, 2675 bp, Unknown
  misc_feature (1)..( 2675): cDNA_ID_2706425_gDNA_ID_2214494_Annot_ID_133545 3000 nt of promoter + ATG
cttttgtgatttattatatgaaaagggttctgtcttctgagattggggcttcgaactcttgttgctgctcgaattcgatctagagaccaggtacttagtttttgttttgtcagattaataagagtttcacaatttgtagttttgtttttgtttctgggctttgaactttttatcaatctctgattgttttaaaatggttttgttgtgataaaatagtttcacttatttctacttctctgcacacaaaaaaaacttatttcttcttcaaattttcatttatttttgttgcaatattcctataaaagaaccgagaacttggaaaagaaataagtaaaactgattgataagagtgtacgaaatcgactaagtaccttggtagtgacggattcacccacttttgaaggccagctattatattggtttagcacccataatcgctaatgatccttttatgtttagtctgttcgtttgttcaccgcaggcggcagcggcagcggcggcgggaaactctaccgcagcttgttgttcgtttcgttgtcgctgccgctgccgctaccgctgccgctgacgctttatttatgttcgtttggatgtcgctgctgttgccgctgccgcaagtctctatgttcgtttcgccgccgctgcgttagttttaaattttgtgagaaatcataagcataattataacaataaagtagtacaccacgttataagcaaaaaagatagacaaagtcgtaagcataattataacaataaaccaagtcaataaaaaaaacatatctaataaggtaagcgacttttattacattcgttcgtgatgttgtcacgtaaagcttccatcgctctgtcaccggtaggctcatatgcaacatgttcttcttcttcttctccttctccttcttcttcttctccttcttcttcttcttctccttcttcttcttcttcttcttcttcatcatcaacatgatattcttctatgctttgccattgtaaaaaatcatgatcttcccgatgtgaatcccttataaaattgtgtagtgccattgtcgctgttacaatcttaatccacttagccagaccatattttggatgcttacgatctacaatcctccattttgctttccatactccaaatgtcctctcaatcacagatcgcaaacctgaatgctttcggttgaacaactctcgtgcagttactggtggtcctcctctaccaaactgaccaagatgatatcgcatcctacgatgtggaccaagatacccagtcctggtgggatatccggagtcaacaagataatacttcccattaggcggatgtgagaaataaggttcattcgtcgcacaataattcaaaacctttgtatcatgtgctctaccaggtacaccgacatatgcatatatgaatttcatatcgaaattacatatagcaagaacattcattgtaggttctagctttctacctttatatttttttgcagtttgacttggagggcgaaccggaacatgagttccatcaagtgctccaacacaatctctaaaaaaaggccaatatcgatcatcattcttcaacacgtctcatgatatgtccctataagttcaacaaacactacaaatttgaaaccaacttggaggaaatagctatagagacctcaaatcaaaattaaaagagaagagcacaaagtaaatcaaattctcagaaccgtttagatttgagctaagcagagaacttcaacaaaaacccataaacataagatcaaaagagaagagaagaatcaagagaagagaacccatttcgaaaattatcaatctcacaagaacaaacctgatttcgtcaatgtttaagcttgatgaacagaggagcttgatgaacagaggaagctcgacgaacagaggaaggtgatgagcagaggaagctcgtcgggatcaagctgcaaatcgccgagaaaaatttgttgattaacaaatttgtggatgaaaaaatttgtcgatgaccaagctgcgtctgccgcaaccatttttaggtttagacttttgtaatttctcaaaaatattaagggtattattgtcattttcacgtcaatcgcaacttaacgctgattttaattggcgttaataatttttagccgcaacgacttgcgtttgccgcagcgtttggtcgcaacgacgtgcgtccatcaaacgaacaacacctcttgcgtctgccgctgccgcaatgacatgcggccactaaacgaacacactagttgtaacagaacaactgaaatactaaaatttaatatccatttaaattggaacagatagaaaacagtgcattaggaaaacagtttggttttatacaatttaaattaaaacaattacttggtatatgacagaatgtgattgtcacattcaccaaattgaaatttctgttttaaaggagaaaacaaaaaaataaccatatacaatcaaaaacctatatagcatactaaccaatcacaatcattaccaaaaacaactctatttcagttgttaattagtaacaataatcaaaaaaatttcctgacaggtcatcgtgccaagctaactctatataagcagattaagtaggccaacactttcattatctcttagaacaagtattgataaacaacaagttttcttatttctatatataccttaaacaaaagaataagatg

SEQ ID NO: 11420 - DNA, 3000 bp, Unknown
  misc_feature (1)..( 3000): cDNA_ID_2708237_gDNA_ID_2214495_Annot_ID_133548 3000 nt of promoter + ATG
ttttcattgtcaatactaacaagtatatgaaaactttgacacttatgtgcggcaactagtcatgaaggggtatatgaaaacaacaactgagtttttatttagtaatatatatcacatgtggcagacactttccctttcataagtttgaattttggatacaaagtaaagggggaaaaaaggtttgaaagggaaacgaaggccaaggccaagtgatccccttagattagtgacaatgaccatcttctgcatgcgcagcttcaagatttgagaaactcttacatcactaagaaagctacatctctacacagttagagagtcttcttcaacaactcaagaactgttttaatgtcttagagactcaatcagtttgtgacaaatcagtctcctctggacccttattatgaagaaacagccaaatagataagcatacatttgcataaagtttgtaacacaatcatttcagaggcataatgttacaccccatataacaagttttgtctatacaattaaggtgatgaaactattagattagacttaaaaatagaataaaaacaatgatcatatcatatgtgaacgagtaatttaaagccaagcttgtgtgttagtggacacaaatgataatagtaaaaatgaggaataatattaaaaatggaattatcaataagtacctcgtagaacaatttcttatggagtagggacactttagaagatacgctgtgagtgcttttctgaaagaacagtgaaataaagaggcaaaatttattaataagattcaaagtatagagcatctttgcaattaagttcaatgaactagcaagtaaatctttgaaatctccatcttaggattaagataagtcattcaaaacaaggaatgattaagcatcaaagttccaagtatttcaaacgatagcgacaagtgagttattgtctatagagggttatataaaacatagaaaaagggttatcttcaagctatcttcacgtggtaagtggagccatttcctcacccactgcactagatagaaagtaagtaacaaacacggggaagaaaaggacttgagataacacgaaaagacatctaaatgacttagaaatattgagcagacaagatttaggaaccagaagtagtagaagaagttgaagagcaagtcttagtggctgagcttgaaagtctcaacaaagtggaaccactttttgggaaaacaatgtcacaggccatatgaagtaagggacccctcctctaagccatgccttggcttgcgccacgtggaatctaatatgatatggtaggatcaatatcttgaatcttagactgactcatttgactgattgatagataccattcaccaaaaaaaactaactacactgtctgagaaaaagattgtggggttggccaacttttgaaacatcagaagaaaccaacactgtggaaaaaagaaactgtgactgaaagtaaaacaggagcggtaacagcaaggttcaagatttcgtgtaactttttgtatgccacgttacggatttatgttggaacattgtccgaattagctactctatcggaacattgtagaaaggctagaagtttctttgttcaggtgtgatgcttataagagaatcatataagaatattcgaaaacaataaactaaaattgtgaatcggttgctctaggtgtagggctggaatgaaccaaaactcactcttatttgtattggtttgaagacactgatgatttccttccctccttaattagatctctactttattaatctatcatgttacaaaatattcgtttactatagtctattgtagatagcaaatcacttaaagctatactaaaaatgagttatgtacatatagtttcaagttttggagaatgagtaaacacaaaggattcaatggacaatagaaaacgtgcactttgaccaaaacaaaaacatttacgtggacacgtacgatgatctcctttattataaaagttatcgacaaattcgtagagaagctcgtttctgagtataccaaattgtgtatgtgaatcaggcccgactcttgggaggtgctgagtgtgctagtgcatcgggtcctacttctttattcagttttttctttatattttagaatccaaattttcaaataattgcaaaatagaatctggtttttaaatatttagagttttaggtaaagaaatttggagcataccacaagattcaataatttattgggccgtgaatggatttggttgaattgtgttagaagatttttttacgtaaacagaaaatgaacatgacctgcttcatatactcaaacttttacgaattaataaaagcccattatgaaaaaggcccaatatgaaccggcccgttttcacaaagtcgttttttttttgtcaaaggtcggtttaaaggactaaaaaataaataagaaaaaccctctcggctttctcgcatcaaatttccgtttttgctaccgtcgtctctggtcagactcagaggtatgaaccaactttcctctctgatttagcttctctttgtttctcataaagatggatttttaacaattgggttgttgattaggttatgggttttttctcaggaaacacggagcttgagcaactgacaagactgtttcgtgtttggggctttcgaagagagtaacgagattcgcgggtttcgtcaattcctggtaaacttacgatcccagtttcgatttttttctactgaaacctgttgattttctttgcttctttcactgagtatgctctagtatccccttatgaggtgactaggaagcttgatactttgactgttaggtgtttgtttaaattcccaagagagcacttgatactttgagttttagaataaagctaacctctttcttatttgtttaatgcattgtcttgtgtatactaggacacgagaactgatttggaattcttctttgttccagggttttctctagattgctgtttcggtggtgttttcttttgaggatttaagggaaacatg

SEQ ID NO: 11421 - DNA, 3000 bp, Unknown
  misc_feature (1)..( 3000): cDNA_ID_2717398_gDNA_ID_2214495_Annot_ID_133549 3000 nt of promoter + ATG
attttgcgctaaattctaacatgctaaaacacattcattaatagacaaactaatatgttttcttcccctaaatagcaacattatttgtcttcttaccctaaatagtaaattgacaactttatataggtaaaaagcatatgttgaagatttgcttgcaggatttctttgcaataattaaccaaaaccaaatgaaataagaactaatatttctttggtgataatggaactcatagggtctacaacattttttgtttcttcacgggtgatacaacacaagctatataggcaaattggtaagtaggttcaaaatcctaaaataaaattttaaaaaacttttaagaggaaaaatggaggggaaagaagaagaaggagacatatagttttctgaaacgaaagaaagataataacccatcactgcagcaaaaggtatctctaaaataattgaagacaattgaaacctaatgtcaacgaactagccaatgagctcaaactccacaaatcaccacctcgacattctatcttgggaccatttctttctctctttactttacctctctctatataacttgaaattgagatatctaacaatttacaatggtgagagacaagaaaaataagatacatgtatcacatacatagagtaatgattaaatacgttttgtggagtttaaccttatttctgcggcaatggtggtagtttaatatttcatattgtgctcatcatgatgctatctaaacagtcttaatgcccaactatctacttattgcaatcttcacggcgatttacctgtgaaatttagaaaaaggaaaggaaaaataaatataaagaaacttttaagtggaaagtgacactacaatgagacctgcaaaaactcgacaagtttgaaataaacaactaaaaagaatccacacacagaacaataaacctttacaaagaaaaaaccaacaactttgtgccactaaatctatagagtgtcaataatgttgctgtacggaaagggattcacttggggtctacatgaaattcatggtgttctttgatgatgcattgattctctagaacaagaaataggagatacatcattcatattaaccgatatactctgaatttttaatacgaaaactagactaaaatgctctgttatcaatgtgtctaatatagaagaaagtatatcttacttacatgagaagaaaaatgtttctcctgtgtatttgtccactagagcgaccaaggtattgtgagctacgattacaataacaaaggtgaattagccaatgcccccaataattgggacaatgtaatcatgaaaatataaaaaaaacaataaagcaaacagaaaatagaatgtaacaatgaacaattaaaggttgcttctttagtcatgaaaaaggagtaataatgtttaggccactggttttcattgcacacaaaagtcacataagacagatacacgacgaagggtagttattcactgcaaatctattgacataattggttactgtaaactttttgctctcatagactcctttgagtcattatatcctaagactctacttgttggatggtagccacttaatgttactaaaaaagaaagtaaaagtagaagaaagaatgaaacatatcagtctacaatttcaacactctcctattccaataagcaatatcaataccttttcatttatatttattcgtaatgcctcctttgttcaaactgtcactccacattaccatcttcttcagcctttgcttccatttttcccgactatgtaggcgaggcccctacatctttcaatcacacaaaaaacagaacatgacgttattggaagaaacaacacatacccacaagttaacactatacatacatcatatcttctatgtttatttattgcaagtagcacaaagtggtatctatttttctgcacatctttttatgaattttccttttttatgataattctgagcaaagaacacatatcacctccaactaagatctaatttactggagaagaaaaatcatgataaggccttacttggtctatcaggaccaccaataagaacatcaaacttttatatgccctgttcaatatgtcatgctgaaagttgagatttctgtagtactgagataacgcaaagcggttccacatgcagctgtggtacttttttcctttcttaagcaatttacggcaagagaggatacacatgaacgtcaccagggagacctaaaatatgtatacacaacacgattattttctctcttaagatcatgaaaaaaggaatgctaggttacaacatgtgtttaggacagctctgtatccatcctgcaaagaagagtagccgatgctgatgtttggtcctaaggggtaacttacttccaagctttatagtcaaatttatatatactgcaagaactgacaggatcaagtgatgcaaaatggtcccaataagcatgatccaatagagtttaccagtgtagagggtggtgggcaagattgtcttctcttaaactgagctcaagtaccatgagacccaagtaggggccctagtgtacatgctctgacaataaacttagccaaaagacaaaataataacaagtaataactatgcagtaaaataaagtttttacctattatgcagtaaatcttggcagggagagaatgtatgtacccgcgatgtgaattactaacctaccataaaaaagatgagaaatagaagttagaaatacttttctagtaactttcacactatataatatgcaagaaattaattaaaaacgtcacaaagatatcttaatttgcagcaagagacaaaaagtaatggcaatccagctatatagtgaacacaagtatatgactgtaccgcctaaaacctttcctttaaattcccctttctacctctttttttttttccctcagagtagtactctaaacctcaagtttacctctacttctcttataccattccgcctcttattctttgcaatttctctcaacaaagtagaa

SEQ ID NO: 11422 - DNA, 3000 bp, Unknown
  misc_feature (1)..( 3000): cDNA_ID_2706509_gDNA_ID_2214495_Annot_ID_133550 3000 nt of promoter + ATG
aacaacaagactttcctcggaatcttcatgatcttagttctaagctgtataccaggtagaaccaatctttgttccaatcattctgttagtaccccaaaagaattaccttcttcaaatccttcagatattcgttcctcattagtttcactagatttggagggttatataagcttcgacgatgtccacaatgtggccaaggactttggcaacagataccagttaccacctttggcaattctacatccaaggtcagtttttgatatttcatcgatgatgaagcatatagtacatctgggctccacctcaaatcttacagtagcagctagaggccatggtcactcgcttcaaggacaagctctagctcatcaaggtgttgtcatcaaaatggagtcacttcgaagtcctgatatcaggatttataaggggaagcaaccatatgttgatgtctcaggtggtgaaatatggataaacattctacgcgagactctaaaatacggtctttcaccaaagtcctggacagactaccttcatttgaccgttggaggtacactatctaatgctggaatcagcggtcaagcattcaagcatggaccccaaatcaacaacgtctaccagctagagattgttacaggtatttcattcatgctttatctctgcggtagtctcaaaaaaatatgcacctgtaaagaatatccatctcttcatgagcaaaaacactgacgactttaaataatttttgactataaaacaagagtgcataggcacaaatgtgaaatatgcaacacacaattgtaacttgcaccaagaaaaaagttataaaaacaaacaactgataagcaatatatttccaatatttaatcagggaaaggagaagtcgtaacctgttctgagaagcggaattctgaacttttcttcagtgttcttggcgggcttggacagtttggcataatcacccgggcacggatctctcttgaaccagcaccgcatatggtaaagttctatcttgaacaaagttcaaacaatatacgctatgattctaagaaccactttcctgacacagtcaaataacttttaataggttaaatggatcagggtactctactctgacttttctgcattttcaagggaccaagaatatctgatttcgaaggagaaaacttttgattacgttgaaggatttgtgataatcaatagaacagaccttctcaataattggcgatcgtcattcagtcccaacgattccacacaggcaagcagattcaagtcagatgggaaaactctttattgcctagaagtggtcaaatatttcaacccagaagaagctagctctatggatcaggtaagatgtgaaagcaatatataactagacttagtttccacagagagctccaaatcaaccgttggctactagcctactaacataatgaatggttgccgtgcaggaaactggcaagttactttcagagttaaattatattccatccactttgttttcatctgaagtgccatatatcgagtttctggatcgcgtgcatatcgcagagagaaaactaagagcaaagggtttatgggaggttccacatccctggctgaatctcctgattcctaagagcagcatataccaatttgctacagaagttttcaacaacattctcacaagcaacaacaacggtcctatccttatttatccagtcaatcaatccaagtaagtgagcaaaatgccaaaagcaaatgcgtccagtgattctgaaacataaattactaaccatatccaacattttgtggtttcaggtggaagaaacatacatctttgataactccaaatgaagatatattctatctcgtagcctttctcccctctgcagtgccaaattcctcagggaaaaacgatctagagtaccttttgaaacaaaaccaaagagttatgaacttctgcgcagcagcaaacctcaacgtgaagcagtatttgccccattatgaaactcaaaaagagtggaaatcacactttggcaaaagatgggaaacatttgcacagaggaaacaagcctacgaccctctagcgattctagcacctggccaaagaatattccaaaagacaacaggaaaattatctcccatccaactcgcaaagtcaaaggcaacaggaagtcctcaaaggtaccattacgcatcaatactgccgaaacctagaactgtataaaagtttcctgtgtccgtccttgtaaccgctcaggctaggcagcaagaaagtgaaaaattctttcttttttgtttcttttggtgaacaacaaattttacagtctgaaacagattgggacaattgtataggatctccataaaaatcctacgcagtgtcattacttttggtgctccaaaaactcaaaaaacatcatttttaaatctactataagcaaacaaattacaatagctcaaaaaatcaccaaatcagaactctgggtgcaaagcgatttaccttgaagaatcgattctcaattgggtccacgaatctcgttaatggagccaagctacgatttttccaatcgatttttgtactgaaacaacaacgattatcccaatttctcatcaagatggcagaaatttggcgcctttccgccatgaatagtcacgacgagattattttctctcttcagattgtgatttcaaatttcacttcgtttgtcacacgcgtgaagcaacaaaacacacgtgtgtgtatatttttattttattttttgctgggcggtcaggcgaagcagaggctcctgaagaaaatggcgcaacaaagtttatttatttcattaatattacttcttcttcttcttcgttggtaataataataagcaaatcccaaaaaccctaacggtactgtgtagaagctatatacattcctcttacttcacctcaacacgcaagaccagattcgtttccccgagagattcctttccttaagccctaaagtttcgatttttgatttttattttgaaagaatccaatttttgg

SEQ ID NO: 11423 - DNA, 3000 bp, Unknown
  misc_feature (1)..( 3000): cDNA_ID_2706476_gDNA_ID_2214495_Annot_ID_133551 3000 nt of promoter + ATG
ctaacttcccatcatgtcacaccaaatctgactgagcaaagttcaatattttttggagaagtataaacttttcagacttcatattatctaccttgtgatgagtatcttgtaaagtgtctttaaaataggacatgattcgaccggagctacaggtttcttctcttcagagggcaatatacttaagcttgattgactaagcaattggtaaaatgctcccactgcagaaacaccctattcaacaaaaatcccacatcctcataagcaaaacagataccaaaacatttcaaacttctttcaaggctttgttctaacagattaagtacctgaatcattcccttgccgcttatgctatcacccatgtctctatttatttcaccctttgccagcatttgaccgtaccatgcattacgtccttttaataaggtcacataagtgtcagctagcaaaggccctgcaagtttctcaggctcttctgctagtaaatgagttataaatatcatctcagatgtacaatgagcaaaatacaccgacttgcttgtagcgctctcgttagtgagcgccgctaccatacctgaacacaacaagaaggatcaaagtgtgaaaacttgataattatcactcaaatccgtgtctacatacagaaacttaccagctccaatggcgtagacattcttgagacctcccattacttcatgtgtcacaagatcactattgtcccaaacaatgaaatgaggttgtcttaagaacttagctagtggcttcctccatttagcagctccacagattctagcattggcatattccttgttgtaaatttcagcagcaatgtttggtccaccaagatacaggacattgtcaatcggcacaccagctaccacaaacaccaaagtaagaaccaattcaagaaaactaagcaagattgtgtcaatagactcaatataaaaggagcaaaaggaagaagaaaaagcttacttgcttgatgaatcatctttgttggagttatgatatgtggaactggttcaagagcagtttcaataccctttgacagagagataataatcggaaccgttattctctctttccaatacttactaatctcttcaaacacttcacgtgtttcagttgaaggcaatccattaacaacaatatcagcatcccacacagcttcttgcagatttgtcacaaccttaagaggacaaagcggcgtatcaaccatgttaagacaaaacccgtctttcaatatctcatcagcatagagtgtcctatcaccaagccttgcctcgacatatttcagataagcacagcgtcttatcaatctcctcaagatatcttcccttgaattgatcacttcaaacaaatgttctgcagtttctctatcaacagctctcccagctcttctccatatcctgatctgaaacttatccctgaaacctccatagctttcttgaagaagtgctgcaaaaacacttccccaagcaccagcaccaacacttacaatccttaacggatctttttctgatttccccaaaagacgacgaaattcatcaagtttctcctccaaattaagaccaatatgatgaacagacccgtttgattgcagactctttgcctcaatgcttcccaccattccttcttcttatggtccacacacacaagaaagttcaaacaaaccaaagacaataatgaacaatgactagaaatgattttttctggtggttatgtaatccactacagatttatactacatgggtttggatcatatagaacaaagaaatcaagttggatttgaaaagaaaaaagagagaccaacttgagcattaccaatcaaaccaactccttgctccaaaagaatcaatattttcttggttgatttttctcaccaaacaaaatttgagttgttttgtgtcctagcttcttctgtcatgtaagaaatcagacattaatgcatagataccaaaaaattcctttaaatagtaatgccacaaaacatgacacaatgcagagaaaaatcaaagaaagattaaggaataaaataaaggaaaattaatggaatatcaaaaaaacaactttgttagctccgtctttgagttgttcatctaccaaaagaagactgtccaataaaataaaaacacaagtcaagaacaacaaacctttcgtgtcggcaaccataaagaagaaatcaaaatcagctcatgaggattgccaaatcaagaaagtaaaaaacgcatgagaaagattttgggaatcatcgaaagcataaaactttcatgcagaagaagagttaaattaaatagacagagcaaagcttatgtgcaagggagaggaatggacataggcattgatgggtacagttggggaaagggagagacttttttgtaacattatattttggttatggggatatttaagggaaggtgcctaacttcggatacattcattaatggcacatgaaaaaattactccatctttttttggtaccagtcttcttcatcacctccattttttttggtttctcaatctgaacaacatttatgaaatggttttttagttataccggcatttattatacaccgaaaacaaaacaaatagatatacaaattaatcaataaatgggtccgccgcaaataaaaatctatgcgttatcttctgatgtgtcatgtatatataaatgatttgatcacctaacaaagacacactttgtactaatgaagttgatttttacattaaagatgttcatgtcactataataaaccggatttgattattacattaagatactcaaatcggcctttcaagaccttttagttgggccagaagttttaaggagatatgttgttgaattatttctatgggctctctcggatccactgtagaaaccgatagacctctctcattcgatcatttcttcttcttcttcgtcttcgctgcagcctgcatctgttgtttcttctagactttgcaatcacagagatagtgagtgagatagagagagtgataatg

SEQ ID NO: 11424 - DNA, 3000 bp, Unknown
  misc_feature (1)..( 3000): cDNA_ID_2706502_gDNA_ID_2214495_Annot_ID_133554 3000 nt of promoter + ATG
aatcttcaaagaaagtcactgcaatttttcctttctccctattgactgtttgttcattgccattctcatctaccaagaatctcagagaatttgatactctattggcttttactgttgcctgaaaaaacttagaattcttgtctccaccaaccatccatttatccctgctttttaatctccaaaaatcttcttcctctctataagcatcaccaaggacatcttgaagaagagaaatctgcgtccatgatgggaaggtagcacttttctctttatctaactcccttcgtaattttgtaatccgacttttggcattaaaatcattctctcttttccactggctaatggctttcctacattccactagacgaagcataactgaagaagattgattatccagaaaaccattccaagaaacgagaatagctgcagcacaattaggatcctcaataaaccgtttgtcaaatctgaattgacccctgaagacttcctgatcattcacaaatttaaccagaactggtcgatgatcagaacctagtctttcaagaaaccattggtgagagtttggaaacaaagcaaaccattatgagttcccaaaacatcgaactaatttacattggatccattcattattcctagttccaccccaggaataactattccctgtactccccatcacatgtagatcacaagcaaaaatcatatcctgaaaatcctgaaaggaagattctaatctcttaggaccacctattttttctttgttagatagaatatcattaaaatctccgatcatacaccaagctgattttcttgtcaaacctatctcctttaatctgtccaaaagggtatatctaagatgctgtttgggatttccataaacacaagaaacaaaccagcttttactatcctgagaaaccttcatatccagtaaattcttatcttcaaacaaaaactctatctccaagtgttgtttccaaaagattgccaaaccaccactctttccaatcggttcaatagagtgaaaataatcatagcctaaccatctgaatattttcataatgaactgatcagaattcatggtctccatgaggaataacatgtctgggaaatgatctttcttcatttcctttagataccgaattgtccaaggattcctcaagccttggcaattccagctaaggatgccttactgatactgcggtggttcatcatgaaccaccgtttccttaacatccttgctacattcagatttaacagaagcaaccaaatcctttttccttttgaaaacattaggaaattcaaagattttactaacctctgtatcaatagctttctcactaggctccagagagtccaatttcttacggatcacaactgcttttcttttccttggatttttctgtctagaacttaaacctgatgagcacgcttcatttaaggcagagttgaatccctgatccaaatccagatccaaatccagaataattcctttagaacagtcttcttgataagccttctcgtgttcctgactctctttagcttcttttcgaatcttttccactaaaccagtagactgtacctctgaaggtgtagacgacatgattcttgaattcagaaggtttgtctttgttgacaaagcactgtttccttctatcctatctaaatctgaactaggaaggggatgatttgattgtggaaacctaagatcagacttttctttatcctcttttttctcaaaaaaagacctttgaaacccatccatgactgacgattttcctggccgaccagaatcacaatcacctttctcatgagttagtcgttggcataggaagcatctcttcctaattcgttcataatcaaaagtcacagaaactatttcacccgttggaagctgaatctctttaaagttccttaaagggttcctaacatcgatgataacctgaactctgatatagtcttgtgcttgagacttctctaagtcaagttccacctttaaaactttccccacacaagatgctatcttttttattgtgtcctgtgtgtagtagttaactggaatatttctcagcctcatccacaccggaagaaacatcagatactcttccgtcgacttctcaatccaacgttccatcactacacaccattcatcctgagtccacactcctgttttcaaaatttccaatagatcatcctctgatttaaagaaaaattgaaacctttcttgagataaagcaacaccacgaaccctggaatacaatctccaaattctaggcatgtctaaaatccaattagacatcctttgattagaagggttcagaaatcttcctaagatactgcaagtattcctttcaatcgaacaaaactgagcttggtttgacaaaacaagtggttcctcatctttgattgacatctcttgaatcgcttgatccaaatccatactcatcccaatagaatagaagagagaaagattttcaaggcaacagctgaactcaaaactgacaaaaggtaatcgaagattcttctgatcctggctccgctctattagaatcgatgatttgagggagaagttcttaagcccaatttgacgggacggcgttaattacggcgagcaaagtattatccaaaaacgacctcctaaaaaagagaacagagagttttttttgaggattgaggtatgaggtatctaattgaaagacgcaaaagtaatactataaggaaaaaaaaaaaagagcatgtttatggacctaataatattcgtctgggtcggatcatttgatttggttgcctactaattatccgaatgagacgaaaatgaaatttgaatgaatgggccctatccgagcataaaatccgagtaattcgggtcgggtttgggtattccataaaaagcaactctcacaccaatccgttgctcaatcctctctctctctctctcagctgccttcgcgccggcgaagtttgtctctgtgaaaacagagagtggtagtgagagcgtgagaaatg

SEQ ID NO: 11425 - DNA, 3000 bp, Unknown
  misc_feature (1)..( 3000): cDNA_ID_3100792_gDNA_ID_2214495_Annot_ID_133558 3000 nt of promoter + ATG
tattctcgtaatattctcttaatattctcttagggcaacagtacttgtatgtatatatttcatgatgaatgaaaataacagagttttcacaactaaacgagttcgtgaagcattggtatttctaccgccttggcttggtttatgtacaccgagtatgttcagctccatcctatacagattttgggacatgtgcctagggttgaggtttcatatatagaaagaactgaacaaactcggtgtacatagaccaaaccaaggcggtatcaactactaataccctatcaggagaatccagactctccatatcacaccaatataaatttctcttagtgctcttcttactagatccttcaccatactctcggtgaagtactttgagtgcatttttgcttataaagttgtttctggtataaatcataataataaaataaaaactaatttcgcacaaaaattcacttgcgtacttgattaacaaaaccttctatatattattagtgtttgagcaaattgttagggctagaaatatttttttatgtagactaatcattgattgacaaaaaaaaaattaaaaatttagactaatcatttatagtttacctaaacctactttacgccggcttatggttgaattctacgtggatttaagcataagtttacaatagccatagtaattcggtaagtacatgcttttgggtccttatcatctctattggtgtggtcatatctgaataagcagagctactacggatcacgaatctcttcttctcgtatgttttatgtttaagtgaggttcgatctagaatctcatcaattaatatcaataaaagtacacccatgatcaatgagaactcatgtaacaataatctctgttcgtaggttcttggggataaattagtcatcggaatagcataccagagatcgacgatctcattaatcattatgtataagtacaaacttcgtaaaactatccaatgctacaaataacaatacaagatagtacagtggtaccacctaattattgatataattctatgacttctgaacttgaatatgtatgtatgtatggttagtcatatatttataaatctaggaattttattttcttaaggttaatcttctttaacaaagtttaaatctaaaatttaacattgcatcgcagtatatatactagctgtaatataatcttgttcaacattaacataaccaatatattgaattaaaaagccaagacttatttatgcctagtagaagtaaaaagtcatttttttgttcgggtaaagtgatgaaccaactcagaaggctttcaaaagcaatttcctaatggaatatctagcaaattagcaagtgttacaccacttttctatttcttcttgtttaaaactgtaaccactatcttgcgtcatcttgacactactacttctcactgttttgatttaactatttacaataaggataaatataaatagatatagaagtaatgtttaagttttaccatttcatcatcacatccaatataaactcatcattaagcaatcatttacatttacttcatcttgcctctgatttttcctttttgtttcaaatttcatgtgtctgatgtcttcttactctgtctccgactaaccaaacaacatacttttgtgattacataaacacatatcaacagaagaagaaaaccaaacacaaaaaccctaaacaagataggctcttcaacaggagacataacggccaagtacacacaatctcttataagaacaagcaatgtcagtccttgcacaacatttttaaccaccaaaactcttttatttattccttcttctttgcataacttgcatataatcctcaaaaacaaaacaccaaccaccaagaacgttgtactagaccatcctcggtaagagacaatcttccctcccactattaatggctctttcctgcatatacaagacttgcagactccagagaaagtagatgtgaccagagcatcgaatcctgtataataggggagaatcacagcgtctaagtaaagactagcgtggagaataccagagatagtagaggcttcgaagaagacaaaactcgcttctttttcgatattgttctcaaataaaagcactgagagctgaacaagctgtagtatcgcaggtccaaagatggaaattgggaaaagggtattgatcctttgaccttttgcaagaatcaagatgatcaaaggaagagagattggaccagaaggaagtaagtaccttcttgctttgtcatcatcaccatcatcatcattttctcttcttcttcttgatattaccttccttacgacaacaattagcgtcgtcaaataagtaaccgtaacgaagaagaaaactagaacgtcggtgatttgagggtagtcgccggcatagatgctgtcgcagaaatagtggaaaggacagttaataggatcaagtgtgtcctcgaattgccactttgtgcatttgaaaaatgttttctttctatcagaatccatttcccattctgaattcataatttgtttgttttttttgttttgatctatatgtttttggtttccttagaagctacacatatagtttataaggagtgtgtgtgacgtgacatcatcatatggttgattctctttcattgtctggttatagatgcttgaactaaaatggataatgaaactctatctgaaatctgaattctatcttcattttttgtttattaatacaaaaaatcaccctttgaatgaaactatgtattgagagaagccttgatcttcaagggaaataaaagtttggtgtgcagctgatgattgattggttctgtgtaattgttaaattgcatgattacgtaactgagaattcggtttaaccgtttaaattccggtctactgaaattgctacggaaataaaccgaattaaaccgaaccggatcatgattcagtctactttagtttttgtgctccgtagattgagagaagccaattttagggaaaagagagagatg

SEQ ID NO: 11426 - DNA, 3000 bp, Unknown
  misc_feature (1)..( 3000): cDNA_ID_3039901_gDNA_ID_2214495_Annot_ID_183816 3000 nt of promoter + ATG
acgtacgtaagtattgagctggcgaacgaagctagagaagttgcaatgcttgaaaagtgttggtaacagatctctagcgaattctgccggctgccacacgacgaaaccagttccgtattcgttccaagatataaccccgtccgtcgtcggatcctccaccactttgtatgtctttaccaagaacggtggaggcggctgtagctccgccgtggatgttgagtttccgatcataaactccaatggcaaacgctcctcgtcgttaacgttatcgttacaccgtaaatgttcaccagcatcttccatatataaaacgaaaattattattcttgaagaaaacaagtagtagaagatctcaaactagaaagacgtaacacgactccatagaaagagatagagacgttatttaatttaattaggtggttgagacaataatagaaatactttaacaaaagaaaacaataatagaaatactttgaacaattttcaaggaacgtacgcttctaactatttacatattctatagaatatgtaactctaacactaacatgcatataatcatgatgcatacacacacacacgattgtgtttgtaaatatatttttcttatatcaaatgaaaatcgatgtttgatgacaatatgacatgtaatttttcaggtttgaaaccaaccatcgataatatttacgtcgaatccactatacgacataactcttttttttctcaaacacaacgctcgtctctaacatgtataactaacgacattttgcttttaattttagaatgatattggattactttacccccaaaaaaactgatatcaacttaatttgtatagttgatatttagtactggtcttaagtttttcagggaaactgcagtagtcgttgcttttaccaaccgagctatattgtcaatataattttagttgtaacgtgtgtgtttgattagacgtataggaaacaaacgaaaaatgattttaaaaaaaatattaatcacgaggtatatatgtgaatacacatatattaatgtatgttggtaaaattggatattgtgatatgaagcaactcgtttggaccccctttaggtgaggtggtactatcaatttacgaaacgcaaatcatgcatattattcatcatgtctacctatatttgtaagatttagttttctctaatgattaatcaagtactatcattagtaaaatctctcgaatatataatatggattgcaaaaatatcacattaattaccaatctttttttctctataaagtaccagttaaaataccacatagcagaagttatattcttaaacagatcgttttctaaatttcatgttaaattatattcaaagtacaaatcttttgtaatggtatttttaaaaatgattataaacttgatatttcatatagttagttttgttgttttgtaggatcatgtaaattgctcgtttttcaaaattgatgactatctatctttttgactatacatgctttgtctaattgtatgttactttcgacaccttaatttgttgataatatataaacaagtgcttaaaagagtatatatagaaaaagtaagggggttcagttgatctgaatggaaagttaaaaaagtgatcattcatcacggtcgaatttgatcatatatataagtttatggtaacgtataacggtaaaagccagtaaatttatagaaggaattccaaattaaataattctttaaaatttcagttgaataaaagttcccaaagttaaaatctttttttttttccaagacataatcaagtaacttaagtaaatgtcggttttagcacaataatgcaagaaaggaaacctttagatctctattggtcaaagtaggggacagtgatgtaattcaagtcatcgatctactgactactggtgtttgaaggggattaccgacaatgttcctatgacggcgcgtaccttccacgcgtctgtaaaagagagagacaactaataatacaaatcctaacgcttaagctctactatatcgttttaacagtagtgatccatatatatgtcctgttgaaattatttgttgaacaataagattaagggatcacaaaactactccagcatatactacttggatatgtagctcttgtaaggcttaatttagatggtaagatataaacatcgaatttaagaatagtcatcaagaacagcttaggaaacttcaaatggcagatcgaatttggatgacaagtaagaacacggtgggggggtttttttttaaccataaagttatgcttaacgtttagtgatgtggcttcctaacgaatctatacaacatcaagtcatcaaatgtaagtacattttgttgactaaaacattggaagtgcatggaattcagacactagactaaagataaagatccttgctttcattgggctgctcttttttggtcagcttaactttttgacttaagaaaaaatagtctgtcaccttccctcaccaactcctagttcatttcatttccacttcaacctcttcagaactaagtaaactatatagtcttcgcatttagctagttatgctttataaattattagtactaactttttggcgaagcaatccgcacacagattagcccattttccggtgggtttaagaatcttcgtcgtgactaaatattcagtaccaaaacaggcccatttatggcccaatataaaaagcgtcgtccgtccacttaaactcttggcgatctttcccacttaaaaaaaaagcgattggcttatccctccgttgaaaagacgaagtaaaatcagtcaaaacacatctccaccgttcagtcgcttcatcacatatatccaacggctgaaaatcatctaagcctgtggacttggaagcaaagagataatgctgaggcgcgtgaggcacagtcgccaacagaaaatcgggatgtttttttttaactgcaaagccaaagagacaattgtatggtctctggtaaaggtaaggcaatcaaaaaaaatatg

SEQ ID NO: 11427 - DNA, 3000 bp, Unknown
  misc_feature (1)..( 3000): cDNA_ID_3039876_gDNA_ID_2214495_Annot_ID_183813 3000 nt of promoter + ATG
ttctctgttttttactcttctccagattcgtttcgcagagaaatcgaaggtcttagctcttatgagccagttattacccctctgtgctcagaaatctccaatggttagtctttttatttcacctttttaccaactcctgaagaaaacagagttttgatcttttcatcttaatattagaaacagagttagtgtataatctgcataaaacttacggttatcgattcttgtttatgcacgcaggaaccatttgttgtgacagaaccggtttgagatctgatatttgtgtaatgaaaggtgatgttcgaacaaactctgcttcttcctcaatcttcctcttcacctcctccaccaataacaacacaaaaccggaaaagatcaaaccttacactagaaaatgggagactagtgtgatggacaccgttcaagaactcaacctcatcaccaaagattccaacaaatcttcagatcgtgtatgcgatgtgtaccatgatgttcctgctgtgttcttctccactggtggatacaccggtaacgtataccacgagtttaacgacgggattatccctttgtttataacttcacagcattacaacaaaaaagttgtgtttgtgatcgtcgagtatcatgactggtgggagatgaagtatggagatgtcgtttcgcagctctcggattatcctctggttgatttcaatggagatacgagaacacattgtttcaaagaagcaaccgttggattacgtattcacgacgagttaactgtgaattcttctttggtcattgggaatcaaaccattgttgacttcagaaacgttttggataggggttactcgcatcgtatccaaagcttgactcaggaggaaacagaggcgaacgtgaccgcactcgatttcaagaagaagccaaaactggtgattctttcaagaaacgggtcatcaagggcgatattaaacgagaatcttctcgtggagctagcagagaaaacagggttcaatgtggaggttctaagaccacaaaagacaacggaaatggccaagatttatcgttcgttgaacacgagcgatgtaatgatcggtgtacatggagcagcaatgactcatttccttttcttgaaaccgaaaaccgttttcattcagatcatcccattagggacggactgggcggcagagacatattatggagaaccggcgaagaagctaggattgaagtacgttggttacaagattgcgccgaaagagagctctttgtatgaagaatatgggaaagatgaccctgtaatccgagatccggatagtctaaacgacaaaggatgggaatatacgaagaaaatctatctacaaggacagaacgtgaagcttgacttgagaagattcagagaaacgttaactcgttcgtatgatttctccattagaaggagatttagagaagattacttgttacatagagaagattaagaatcgtgtgatattttttttgtaaagttttgaatgacaattaaatttatttattttattaagttttttttggtaagttatttattttattaagttttgtagtatatcgtcgttattcgttaagataataatcaatttgttttcaatattttaggaaatatttgaagcacaagaaaagaaatagtaggtggtcctattggacctatataaataaactaaaatatttattgaatatcaaaattttgtaattgataaagaagtttggacttcatcgccgctcactcctctctcatcaactatcgcctttctcttgttcgccctaatttcagccgcttcttgccgttttcttcgtcggagaccagtggccggtggcttccgtagcattggaactggtttttttgtccttgtagtttatgctttgtcttgtagtagtagagatctcgtccttgattcagttagttttggatagatctgagtaagtgcttggttgattctgcagatctattggccctcgtttggggaatttttcggtttgtttcaagggatgacttttgtttcgttgaggttgcggtaggagcggttagatctgttgatcttttcccgaaccttgcctttccctccgtctcttgtctccttgcttcagccatcaattcccatttggattgccccatttcttttcagaggtttcgttatgtttttgttgtgatagtcttctttgttggcagtcggtctctcctccttagtgtagtttgttgtggttgttagctttctcctacctttgtggtgttctctcacgatgaaggttctcggaggctaggcttctctctttgtcctgcttcagatcttttttgatagctttttgaagacttctatttagatgtatttagacgcctcagtcgtcaccgtcgcacccggaggcttgttcgagtttattccagtttggttggcttgctgggttatgaagttcttggttctggtttcgagagattggctctctttatgataggaggtggcagattttttttcggggtggccgtgggcagccgaagtaagtctcatcgcaagtgcttatgaggaggaggtcttatttgccgcttgtagctattgttttctttggtttttagtcttgttgtctctgtttatgtatttgggttcgttctcttacgtttagggtccaatttttgctgctttgtgttttagtttcttttgtttccctttcatagggctatgcttccggggatatcttcgttttcctccggctttgtctccgagaactttaatttcgttcgtcggctttgtttctcttgtttaggcatcgtgtaattccctggttccacatcaagtttatcaatcaaatttcagtttgagtgacaaaaaaaaaaagaagtttggacttttgttgtcatatgtgtttattataaatagcccaagataagaaaggctaagtggcccaataacaaacaaatatatatatcgaaataggcttcttcgtctcacacgttattgaccagaagagtgaagaaccctagttcccaacaaggtgacg

SEQ ID NO: 11428 - DNA, 3000 bp, Unknown
  misc_feature (1)..( 3000): cDNA_ID_2706488_gDNA_ID_2214495_Annot_ID_183811 3000 nt of promoter + ATG
aagctctagggcggtgcatcgtgaggagaagatctagatcgtttatttaagtgggacctattaataatcaatcggacggtggattaattttctccagcgattgacgtttgttttttatttttattttaaattagcttgcttgtccgttttaggaggacagaggaaaaagaaacaagtgacttgttagggaagtcataccggtcgcatgtgttggaatttagttggaagattttaggagtgtttggatataggtacagatataaactcggcattgagcccattgtagtactattgttatcgccatttgggtcactaaatggaccctttttgaactttggttcagtatacaatcaaaatacagaaaccaacttttgggtaattttattcctgaaatagctaaacattagtacgtgagacaaaactggtcatttgctttgaaggtgacatatatcacccctttttatacgtgtctcacaacatttacagaaattatttaactttataaagatgaaaaaaaaaaaaaaaaactttataatttaatgatatatgaatgctttgaatcaacaactttaaccaaaataaaagaaaattaatgctttggatttatatccatattatgtgagttcaatttttttgcaacaaaatcttactcaggataagttatatttatgaatagagagtttttttatttaagatattactttataaaagaaattaaagatatttctgtctaaagttattactgattacacctaaacattaaatattacagattttatttttattagatgtaaatctttaccatgtgaaaggagtagatactttcaaacagattaaagcaatttggatatccgatacaagaaattaatactatgacattgcagattattaacattgctgacattgtatcagctatatctctccatgatgattttcatttaccaaaaccttgaaacattttgggcatgccaaactaggtgaccactaagacaaggagatagactgtgtccttccacgttaaggaggcaaatccgtgctaccattcgcaatttttttgagtagcatgtgagaaaataatttagaaacaagcagtaaatctgaaaatatgatattactcttgatataacaaaatatgatattaattactcttgggtaaaggaaaacaaatatgatagttagtactctctgtgtttggacaaaaatatttttgcctgcttgcatcggattaccgtaatacgactgtttgtcttcactccgaacaaccggagatgagtacaatacgactacattaaatataagattgtaatatgaattgagagtcaaattaacaagggggaattcagttatttctttgtatgtttaaggaataggtgatgggttagcctggtgtaagactatatatgtttgaatataggaattatttggacttttcttaacagtaatgcattgtgtgggggtaaataatgattgggtaatacaagggtattgctacttattacagtacaagagttctgaatatcaatagtttggactttacaacgttcaatttctggaatggatcaatgagattcgatgatacatatttctatcatgctcataatttaaaatgttgttgaaaaggtatgcagatcgtgttgtgtggattaaaatagcgttggatatcgtttaaaacaagtgctgccgcgatataactatcttgtccaaaaaacgataatagctaggtgtccaaaaaaacgtttcatactttcatctcttttcttttcttgcaagagtgccataaaatgaaagtatgaaacaaattaccacctttgcttgtatacgttgttgttatcagttacaattaaattcaatttttaagtttagtcaatttcacggacgcggttaagatgttaggcggtagccgaccatcaaaatagagttaaacattggattattctctatatatagctacataacaaattcattatccgaaaattttcaggcaataaagaacatattggagcaaacaataatttatcgtaagagtttttttaaaattcgttggaacttggaagggattttaaatattattttgttttccttcatttttataggttaataattgtcaaagatacaactcgatggaccaaaataaaataataaaattcgtcgaatttggtaaagcaaaacggtcgaggatagctaatatttatgcgaaacccgttgtcaaagcagatgttcagcgtcacgcacatgccgcaaaaagaatatacatcaacctcttttgaacttcacgccgttttttaggcccacaataatgctacgtcgtcttctgggttcaccctcgttttttttttaaacttctaaccgataaaataaatggtccactatttcttttcttctctgtgtattgtcgtcagagatggtttaaaagttgaaccgaactataacgattctcttaaaatctgaaaaccaaactgaccgattttcttaactgaaaaaaaaaaaaaaaaaaactgaatttaggccaacttgttgtaatatcacaaagaaaattctacaatttaattcatttaaaaataaagaaaaatttaggtaacaatttaactaagtggtctatctaaatcttgcaaattctttgactttgaccaaacacaacttaagttgacagccgtctcctctctgttgtttccgtgttattaccgaaatatcagaggaaagtccactaaaccccaaatattaaaaatagaaacattactttctttacaaaaggaatctaaattgatccctttcattcgtttcactcgtttcatatagttgtatgtatatatgcgtatgcatcaaaaagtctctttatatcctcagagtcacccaatcttatctctctctccttcgtcctcaagaaaagtaattctctgtttgtgtagttttctttaccggtgaattttctcttcgttttgtgcttcaaacgtcacccaaatcaccaagatcgatcaaaatcgaaacttaacgtttcagaag

SEQ ID NO: 11429 - DNA, 3000 bp, Unknown
  misc_feature (1)..( 3000): cDNA_ID_1022807_gDNA_ID_2214495_Annot_ID_183809 3000 nt of promoter + ATG
aaagaaagtaatgtttctatttttaatatttggggtttagtggactttcctctgatatttcggtaataacacggaaacaacagagaggagacggctgtcaacttaagttgtgtttggtcaaagtcaaagaatttgcaagatttagatagaccacttagttaaattgttacctaaatttttctttatttttaaatgaattaaattgtagaattttctttgtgatattacaacaagttggcctaaattcagtttttttttttttttttttcagttaagaaaatcggtcagtttggttttcagattttaagagaatcgttatagttcggttcaacttttaaaccatctctgacgacaatacacagagaagaaaagaaatagtggaccatttattttatcggttagaagtttaaaaaaaaaacgagggtgaacccagaagacgacgtagcattattgtgggcctaaaaaacggcgtgaagttcaaaagaggttgatgtatattctttttgcggcatgtgcgtgacgctgaacatctgctttgacaacgggtttcgcataaatattagctatcctcgaccgttttgctttaccaaattcgacgaattttattattttattttggtccatcgagttgtatctttgacaattattaacctataaaaatgaaggaaaacaaaataatatttaaaatcccttccaagttccaacgaattttaaaaaaactcttacgataaattattgtttgctccaatatgttctttattgcctgaaaattttcggataatgaatttgttatgtagctatatatagagaataatccaatgtttaactctattttgatggtcggctaccgcctaacatcttaaccgcgtccgtgaaattgactaaacttaaaaattgaatttaattgtaactgataacaacaacgtatacaagcaaaggtggtaatttgtttcatactttcattttatggcactcttgcaagaaaagaaaagagatgaaagtatgaaacgtttttttggacacctagctattatcgttttttggacaagatagttatatcgcggcagcacttgttttaaacgatatccaacgctattttaatccacacaacacgatctgcataccttttcaacaacattttaaattatgagcatgatagaaatatgtatcatcgaatctcattgatccattccagaaattgaacgttgtaaagtccaaactattgatattcagaactcttgtactgtaataagtagcaatacccttgtattacccaatcattatttacccccacacaatgcattactgttaagaaaagtccaaataattcctatattcaaacatatatagtcttacaccaggctaacccatcacctattccttaaacatacaaagaaataactgaattcccccttgttaatttgactctcaattcatattacaatcttatatttaatgtagtcgtattgtactcatctccggttgttcggagtgaagacaaacagtcgtattacggtaatccgatgcaagcaggcaaaaatatttttgtccaaacacagagagtactaactatcatatttgttttcctttacccaagagtaattaatatcatattttgttatatcaagagtaatatcatattttcagatttactgcttgtttctaaattattttctcacatgctactcaaaaaaattgcgaatggtagcacggatttgcctccttaacgtggaaggacacagtctatctccttgtcttagtggtcacctagtttggcatgcccaaaatgtttcaaggttttggtaaatgaaaatcatcatggagagatatagctgatacaatgtcagcaatgttaataatctgcaatgtcatagtattaatttcttgtatcggatatccaaattgctttaatctgtttgaaagtatctactcctttcacatggtaaagatttacatctaataaaaataaaatctgtaatatttaatgtttaggtgtaatcagtaataactttagacagaaatatctttaatttcttttataaagtaatatcttaaataaaaaaactctctattcataaatataacttatcctgagtaagattttgttgcaaaaaaattgaactcacataatatggatataaatccaaagcattaattttcttttattttggttaaagttgttgattcaaagcattcatatatcattaaattataaagtttttttttttttttttcatctttataaagttaaataatttctgtaaatgttgtgagacacgtataaaaaggggtgatatatgtcaccttcaaagcaaatgaccagttttgtctcacgtactaatgtttagctatttcaggaataaaattacccaaaagttggtttctgtattttgattgtatactgaaccaaagttcaaaaagggtccatttagtgacccaaatggcgataacaatagtactacaatgggctcaatgccgagtttatatctgtacctatatccaaacactcctaaaatcttccaactaaattccaacacatgcgaccggtatgacttccctaacaagtcacttgtttctttttcctctgtcctcctaaaacggacaagcaagctaatttaaaataaaaataaaaaacaaacgtcaatcgctggagaaaattaatccaccgtccgattgattattaataggtcccacttaaataaacgatctagatcttctcctcacgatgcaccgccctagagcttaattttccctcatctctttgtctataaaaccggaaaccaaacctacggattctctccttctccacataagttacatctctcgtgttttgttttctttgtctccgatttttttcgcgacgaagaagaagacgagagatagagagagaagtagagaaatcgaaggaatctgtaaccgattttaagatctcaatttttagggttgttgatttttcaatttctgggttaattttttttagggttttcatttggaatcatg

SEQ ID NO: 11430 - DNA, 3000 bp, Unknown; identical to SEQ ID NO: 11425
  misc_feature (1)..( 3000): cDNA_ID_2990156_gDNA_ID_2214495_Annot_ID_183806 3000 nt of promoter + ATG

SEQ ID NO: 11431 - DNA, 3000 bp, Unknown; identical to SEQ ID NO: 11424
  misc_feature (1)..( 3000): cDNA_ID_3039922_gDNA_ID_2214495_Annot_ID_183803 3000 nt of promoter + ATG

SEQ ID NO: 11432 - DNA, 3000 bp, Unknown; identical to SEQ ID NO: 11423
  misc_feature (1)..( 3000): cDNA_ID_2706476_gDNA_ID_2214495_Annot_ID_183800 3000 nt of promoter + ATG

SEQ ID NO: 11433 - DNA, 3000 bp, Unknown; identical to SEQ ID NO: 11421
  misc_feature (1)..( 3000): cDNA_ID_3039929_gDNA_ID_2214495_Annot_ID_183799 3000 nt of promoter + ATG

SEQ ID NO: 11434 - DNA, 3000 bp, Unknown
  misc_feature (1)..( 3000): cDNA_ID_2706513_gDNA_ID_2214495_Annot_ID_183817 3000 nt of promoter + ATG
acacagagctcgattacttacactgccaaaaaccttaagaaagaagcaaagaggaactcctcaagtacctcctgaagaagaagaagacggagaattggcggtggcggagactctgaggcggagggaatcagaagagcgagttcgggttggttgacggaggagataggagccgccgtgacgtgtggtagtagtagtagtgagaaagaagagatgaggaggaggagaaagagcggatgaggcggcggagacacggtgaggcgatgagacggaggcaataccgatgcctatcttgggagacgcagccatattttttttgattgccttacctttaccagagaccatacaattgtctctttggctttgcagttaaaaaaaaacatcccgattttctgttggcgactgtgcctcacgcgcctcagcattatctctttgcttccaagtccacaggcttagatgattttcagccgttggatatatgtgatgaagcgactgaacggtggagatgtgttttgactgattttacttcgtcttttcaacggagggataagccaatcgctttttttttaagtgggaaagatcgccaagagtttaagtggacggacgacgctttttatattgggccataaatgggcctgttttggtactgaatatttagtcacgacgaagattcttaaacccaccggaaaatgggctaatctgtgtgcggattgcttcgccaaaaagttagtactaataatttataaagcataactagctaaatgcgaagactatatagtttacttagttctgaagaggttgaagtggaaatgaaatgaactaggagttggtgagggaaggtgacagactattttttcttaagtcaaaaagttaagctgaccaaaaaagagcagcccaatgaaagcaaggatctttatctttagtctagtgtctgaattccatgcacttccaatgttttagtcaacaaaatgtacttacatttgatgacttgatgttgtatagattcgttaggaagccacatcactaaacgttaagcataactttatggttaaaaaaaaacccccccaccgtgttcttacttgtcatccaaattcgatctgccatttgaagtttcctaagctgttcttgatgactattcttaaattcgatgtttatatcttaccatctaaattaagccttacaagagctacatatccaagtagtatatgctggagtagttttgtgatcccttaatcttattgttcaacaaataatttcaacaggacatatatatggatcactactgttaaaacgatatagtagagcttaagcgttaggatttgtattattagttgtctctctcttttacagacgcgtggaaggtacgcgccgtcataggaacattgtcggtaatccccttcaaacaccagtagtcagtagatcgatgacttgaattacatcactgtcccctactttgaccaatagagatctaaaggtttcctttcttgcattattgtgctaaaaccgacatttacttaagttacttgattatgtcttggaaaaaaaaaaagattttaactttgggaacttttattcaactgaaattttaaagaattatttaatttggaattccttctataaatttactggcttttaccgttatacgttaccataaacttatatatatgatcaaattcgaccgtgatgaatgatcacttttttaactttccattcagatcaactgaacccccttactttttctatatatactcttttaagcacttgtttatatattatcaacaaattaaggtgtcgaaagtaacatacaattagacaaagcatgtatagtcaaaaagatagatagtcatcaattttgaaaaacgagcaatttacatgatcctacaaaacaacaaaactaactatatgaaatatcaagtttataatcatttttaaaaataccattacaaaagatttgtactttgaatataatttaacatgaaatttagaaaacgatctgtttaagaatataacttctgctatgtggtattttaactggtactttatagagaaaaaaagattggtaattaatgtgatatttttgcaatccatattatatattcgagagattttactaatgatagtacttgattaatcattagagaaaactaaatcttacaaatataggtagacatgatgaataatatgcatgatttgcgtttcgtaaattgatagtaccacctcacctaaagggggtccaaacgagttgcttcatatcacaatatccaattttaccaacatacattaatatatgtgtattcacatatatacctcgtgattaatattttttttaaaatcatttttcgtttgtttcctatacgtctaatcaaacacacacgttacaactaaaattatattgacaatatagctcggttggtaaaagcaacgactactgcagtttccctgaaaaacttaagaccagtactaaatatcaactatacaaattaagttgatatcagtttttttgggggtaaagtaatccaatatcattctaaaattaaaagcaaaatgtcgttagttatacatgttagagacgagcgttgtgtttgagaaaaaaaagagttatgtcgtatagtggattcgacgtaaatattatcgatggttggtttcaaacctgaaaaattacatgtcatattgtcatcaaacatcgattttcatttgatataagaaaaatatatttacaaacacaatcgtgtgtgtgtgtatgcatcatgattatatgcatgttagtgttagagttacatattctatagaatatgtaaatagttagaagcgtacgttccttgaaaattgttcaaagtatttctattattgttttcttttgttaaagtatttctattattgtctcaaccacctaattaaattaaataacgtctctatctctttctatggagtcgtgttacgtctttctagtttgagatcttctactacttgttttcttcaagaataataattttcgttttatat

SEQ ID NO: 11435 - DNA, 3000 bp, Unknown; identical to SEQ ID NO: 11420
  misc_feature (1)..( 3000): cDNA_ID_2708237_gDNA_ID_2214495_Annot_ID_183798 3000 nt of promoter + ATG

SEQ ID NO: 11436 - DNA, 3000 bp, Unknown
  misc_feature (1)..( 3000): cDNA_ID_2706492_gDNA_ID_2214495_Annot_ID_133560 3000 nt of promoter + ATG
gaaccaaagttcaaaaagggtccatttagtgacccaaatggcgataacaatagtactacaatgggctcaatgccgagtttatatctgtacctatatccaaacactcctaaaatcttccaactaaattccaacacatgcgaccggtatgacttccctaacaagtcacttgtttctttttcctctgtcctcctaaaacggacaagcaagctaatttaaaataaaaataaaaaacaaacgtcaatcgctggagaaaattaatccaccgtccgattgattattaataggtcccacttaaataaacgatctagatcttctcctcacgatgcaccgccctagagcttaattttccctcatctctttgtctataaaaccggaaaccaaacctacggattctctccttctccacataagttacatctctcgtgttttgttttctttgtctccgatttttttcgcgacgaagaagaagacgagagatagagagagaagtagagaaatcgaaggaatctgtaaccgattttaagatctcaatttttagggttgttgatttttcaatttctgggttaattttttttagggttttcatttggaatcatgtcggatgcgtattgtacggattgtaaaaaggagacggagttggttgtcgatcactcagccggagataccctttgctccgagtgtggtttggttttggaatctcactccattgatgagacctctgagtggcgtaccttcgctaatgaatcttccaacagcgatcccaatcgtgtcggtggtccaaccaacccgcttctcgctgatagtgctttaaccactgttatcgctaagcccaatggttcatctggtgatttcttgtcttcttctctcgggaggtggcagaatcgtaactccaattccgatcgtggtttgattcaagcttttaaaaccattgctaccatgtctgaaaggtagtccccattttgagatctcaccttctctgagattggattgcaactttataaacaattgaaacgtttagatcacacgatccttaatcctattggagattgattttgtatgaacttgctttgatttatcatcacgcctcttgcatacgtttgtgaaattacattgtcaattaaagaacaaaaggagcttcctttttaatctttcattgagagttttcactttccttgtactttatgcgtttagctcgtgatgtgttagtctgttcctcaaagggatgaagtttctgttggttgtttagagtgtttgtttacattgccagatttatgttctgctgtgtatgtacattattatccttgtgataatagagaacactaacttgttgatattttttccaggttgggacttgttgcaactatcaaggtaaacttgttcgtctctgctaacttaatatgtttgtggaatgtatatgttaggatgtgctgttggagcatttcatttacagctttggtggattttcgtgatatgtaggatcgggctaatgagttatataagaggctggaggatcagaagtcaagcaggggaagaaatcaggatgcactttatgcagcctgtctgtacattgcttgtcgccaagaggacaagccacgaactattaagggtacatttcaaagatttctcatttgagagagtcttgttacctcttgatatagctttgacataagtcaatcaaactcgtgaaccttgtgaatagaaatatgcgttattgccaatggggcgacaaagaaggaaattggccgagcaaaagactacattgttaagacattgggactggagcctggtcagtctgtggatttaggaactatacacgctggtgatttcatggtgagtttgtctaaaactaaaattgttgctgataccagaacctagctagagtgtgctaattatgttatgaaacagttgattatgctggctgcattgactacgtggtttcataactctgtatttgatgaaattgcagagaaggttctgctccaaccttgcaatgtctaaccatgcggtgaaagctgctcaggaagctgtgcaaaaatctgaggaatttgatataaggtacatttcaattatttccctcagttcgggacggagataaacacagcagaatcttaaagatgtttattttgggaaattgcaggaggagtcctatatcaatagcagcagtagtcatctatatcataacccagctgtctgatgacaagaagactctcaaaggttcggttttttcattctttcgggtctcatttattctcattgattcgttttaaacaaaacatagactgattaatatttggggtggggtgcagatatatcgcatgcgacaggagtagcagaagggacaataaggaattcatacaaagacttgtatccacatctgtcaaagatagcaccaagttggtatgcaaaggaagaggatctgaaaaacctgtcaagtccttgaagtcgtttcttgattcttctatatgcaatagagaactatctatatctataaatctatatcgactgaggaagatacaaagcaattgttctctctctctagtagagccttttgtttctttttcaaatcttttttgaagtcctttgcttaagattcttgtaatggcgttaaaaaacttgaagaaaggaatattattattgttatagtaagatggtaattttttcataatcttattcccccatacaatattcgcaaagcggaaaaaaactttgttcatgaaaagaaaatgagacaaaaatatgtttggatttacagagcatttttgatggctttttaatttgtcttcattggttgtctaattcttaaaaatgggctaaatacagtaaatagctattttttcttatcgaatttaaagaaattctatatattaacagaaaagtataattagtcgtaaaaggtaataacataaaacaaaataaatcaaaaaggtttgaatcccgacggaaaccctctctttgctgcttccccgactgcgtagtagtagctcgaatccaaaatcaatg

SEQ ID NO: 11437 - DNA, 3000 bp, Unknown; identical to SEQ ID NO: 11429
  misc_feature (1)..( 3000): cDNA_ID_1022807_gDNA_ID_2214495_Annot_ID_133561 3000 nt of promoter + ATG

SEQ ID NO: 11438 - DNA, 3000 bp, Unknown; identical to SEQ ID NO: 11428
  misc_feature (1)..( 3000): cDNA_ID_2706488_gDNA_ID_2214495_Annot_ID_133562 3000 nt of promoter + ATG

SEQ ID NO: 11439 - DNA, 3000 bp, Unknown; identical to SEQ ID NO: 11427
  misc_feature (1)..( 3000): cDNA_ID_3039876_gDNA_ID_2214495_Annot_ID_133563 3000 nt of promoter + ATG

SEQ ID NO: 11440 - DNA, 3000 bp, Unknown; identical to SEQ ID NO: 11426
  misc_feature (1)..( 3000): cDNA_ID_2706480_gDNA_ID_2214495_Annot_ID_133566 3000 nt of promoter + ATG

SEQ ID NO: 11441 - DNA, 3000 bp, Unknown; identical to SEQ ID NO: 11434
  misc_feature (1)..( 3000): cDNA_ID_2706513_gDNA_ID_2214495_Annot_ID_133567 3000 nt of promoter + ATG

SEQ ID NO: 11442 - DNA, 1592 bp, Unknown
  misc_feature (1)..( 1592): cDNA_ID_2707368_gDNA_ID_2214496_Annot_ID_133568 3000 nt of promoter + ATG
taatgaacaaataaattaaaatcaataaaacaaaacaaattaaggaaacaaattctgtagaatttttattaaagaaattattggtttgggtttttaaaattgttgttagtgtttatattttgtgattgaacgaaattatattttggtttaggttgataaaataatggttagggtttagattttgtgattaaaacgaaattatattttggtttgggttgataaaatagtggttagggtttagattttgtgattaaaacgaaattatatttcggtttgggttgataaaatagcggttagagtttagattttgtgaacaaaattatattttggtttgggttgataaaatagtggttaagatttagattttgtgatttaatttatttattctttaaatagatgatatgtcaaattctaattggtaaattaaaaaggatgaatgaatggattcatccctaaggggtgaacccaagaattgtttttttcttcgtatgtgtgaaaacactaaaaaataaattatttggaaacagtaggagtaagaaacaaattagagaaaatgacccctatcatctagtagattggagaaactataccaatcttcaggaagctatatcattggaattagctctgtacaatctatttcaaacatatgacaatctattaaaaaatattcttcatgacctatattacactttcgatctccgaatcaaaaagaagttgaactcctccgttgagacattgcccctaatagcattatttatgcgtttacttgcaatcaaatccaacctaaaccactaatgaaatcagaaaacttccagaagccatcaatttgacatgtagttacttcgaaaataccattctaaaacataaatagtaagctggatcaacttgacccacatgtatctatgagaaaatatctcatcaacgactaaaggtaagggttatagtattatatatgctgtagttgggttgagaatcagtagaaactgatacggtcgcatatgatgattgttagaaatttttgatttgttaaatttaatggatgtgaactttaaaacactctagaaaagataaataagctttttttttaatggagttttcgatctcaatcctttcaattaatatgtgtagtagaatatcatgtaaataataaaaatacaaaagaccgtttagataatatacataaagacttttgaagcagagtaaattaaaatatatcaaccaaccttagctgtgtattaatttttaatttctcaaccgtacatagctgtatctgtttttgtcaaccagctaagcttagctgtatataaaatgtcaaaacaatgattttccttacgctaccgtaataatagcatttagctcataatttaaatatttgccactgaaactaaatgactcaataaacaattacgactaggtcatatcattatgaaatatatcgtaaagaaattgcaaatgggagttggaaagcttgaaaattaaaacggggacagcacatttcagtggtttgtttttatatatagacatatgtaaaggcaaaaggataccaatatcccaaaaccctctcataaacaatctccggttgagcagccatg

SEQ ID NO: 11443 - DNA, 3000 bp, Unknown
  misc_feature (1)..( 3000): cDNA_ID_1808188_gDNA_ID_2214496_Annot_ID_183845 3000 nt of promoter + ATG
gatatacttcaaggcttcaattcccatggcaggaccaattgtattagtaatgcctgcactccaatacgtccaccatggtgctccaccgttaccagcatttgaccagagcttgatcactggacattatcacattacagacaaatacaacatttcagctccattagtctgtattcgatgataacaaagtagagatggaattgcacaagtgctcacttatataagaccagatcaagcagactacactttgagctaagttcaagaatgcaagatgctcgaacctcttctcatctggaccaaatctcttcgtggacctaatcagataaacgaatttcattagtccatgtaccaagaacaaattccggcagctatgtctatagaaattcaaaccacagattgcgaatagaaacgaatcaatgactctgtagcaactatttcgcaacaacaagctgaatcgagcaatgaagacgacgagaatcgatatgacctaacaattttacttacagagtctcttgaagaacgccttggtagatgtaggcggaccagatcccggagatacacaacgccaacaacagaattcgacggaatccggagccatggacctccatcgccgctccgggaaacgctcccacaccggcgatgattcttccggcggcgcttcgattcgaatttcactgatcgaatccgagaatcgcaaactaaaaatgtttgttttggatttgggaagatgaagctgttacaaaggcgcgaaaatagatacgtcgatgttccacgtggaagctaatcactggactgatgatctcacttgacgtttctgattggttaacgatgacgcgtgtacttttggagtgcagctcgtgaaatggtttccgtgtttgaattataaatataaactacacgccgttttctaatcgtaaaaaccacacgctagtctttgtaagttgcaaaatgatggaaagtttcggtgggtgctttgaagttgacaaaaagtagagtcacatcatttaagggtcgttaatctttgatttagatggagttttaagagttttaatctctacttaagtgttttgattgaatcatccaaacttcaaagcgacaaactgaataaaactcgtatgttcaatttatggattttgataaaatattaaaccaaagatgataagatactaaagagtgtaaagcaaagatagaattgttgacaaagaaaagattgaaagtataaatatgatagcaaataaaataatatgcactcaaacataatctataaactacgtttactacttttttagtccatgatcttttttatccataaatatcataatgcatcgatggcatggatagataatatggttgacaaatctatatataagaagagtttgaaatagtcaaaagattactattgaatgcttctttttgtcgtgtttatactattcacatgcttcgtgttaaaaccttaggatatttatataaatcacttggagatatatatgtatcaagttgcaaaatacggacattaaacttttaatgctattcaattgccgacaaaagaattgttatagtacaattttagtaatctgagcggcacaaccgtaacttgtctcactgaaaaagtaaaatgtaaacttaaattgtgatgagtgatgactgatgaccatgatatgtattttaacttcatcaactcataatggatgatttcaacactaccccgtatattacatgtttacaattataattttttttttttttgcctttcttctatgacaacttttagtggaatcatgatttgtgttaacaaattttacaattccataaaatggacgaataaataacacattttactcatttgataatctatttttagtgattgttctggtaaacaatgctttatgatactctctttctttatttttaaatgatgttttagttcaaaaaaaattgtttcattttaagtgatgtttttaactttttatgcaaatattaaatatatttaataatttttgaacaattatttttattggttaaattcattctatttaataatatttgtatagaaaagagaaaaattatatatttttttaatctgtgtgtaataaccttaaacatcacttaaaaagaaactgaggaaatagtaatttgcaaaaaaaaatcattattcgaatatcatttccacgtgtcaatgtgtagtgtccaaaaaaagctcttggatttgtcggtcaaacataatgtgaatgatagaggaattctttttggggtcaatgcatgaaataaagttttttttggttaatatgaataaagttttgatacacttgaaattaaaatattccaaaagcgtgttaactaatctctttctataattaaacagtactaaaccatctgtactccaattcgaattaattaataaaaaattttacattatctaaaaatgacaaaaatttaatggaatcttttaccaaaaattaatctttagatttgatgcatcttttaggagttttgcttttgcttaaaggtgaatgtaaaaaagctttgaagaaaaaatctgacgtggatctgcttacgcaagcaaagacgttgccaggtggtccagatctactaacacagtattttaccaaactatccctgattccccttatttgatacccgcgttaaaccaaaaatattcgccgaaaggaagggtagtatagtcatttaagagaaaaagccacggaccacggcgaacaaaagcaaacaaagggcagaatcgtaattttctcaaaaccccaccaccaacaccacgactttttgtatgtatggttgtgctgtgattctctgtgttccttcttccttccttcttcttcttcttcttctctaattctggtttcaaaaatcttctttttcttttctttagttggataatttagtgattataattattacaatcagcttttgcgccgcagagtaaacaaaaaaaaagctcgttggctttgttcctttgaatctgttgattgttttatcgagtgagaaatg

SEQ ID NO: 11444 - DNA, 3000 bp, Unknown
  misc_feature (1)..( 3000): cDNA_ID_3039953_gDNA_ID_2214496_Annot_ID_183844 3000 nt of promoter + ATG
aacgttaagaaaattcgttgatggtactcaccaccatggacgcctccggctcggagattcgttgacgatatttgtgggtagtgagatgtccatacttcaagttttactgggattatgaatttttttcttgttgatgtttgaacaatgaaaccttttccagttgtatttataattcacggtgatatttaagggtttggattagatcaaatattaccaaaatatattctctttttccccattcttatcttcttcaactattataaattagattattaaacaaatattttatattataaaccacaagttataaactaggtagacatgcttcttcgattgattatgtgtatcatcttctttctattcctcctccttggttgataaacttgttctattacccatttactatctaaataaatttcaggcgttaaaaaaattctttatattatagaaatatttactcagctgttataaaaaagtaaaaatattatatgtctgtttttacaaatttgtttttatcgatattatacccttgtacacttatttgtttttataatattatacccttgtatacttatttttttatcgattgaatattatatgtctgtttttacaaatttgaattacaccatatgcaggaaaaaaactaatattttattaactatatgtattttatatataagttaaaataaattagatataataacaaatatagtgacagacaaattatatatttatatttaatttcaatatagaaattttagaaaattagccttaatcgaatataaaatttagttaaagataaaaatttaagaaagagttaattcaaagaattaatgcaatttaacgatttgtaagtttttagaaataaaatatttgattgagatagaatttgtaaggagcagaattttaatagtaaatagtatagacatttttgaccaaaaagtctaccaaaaatgtatatttagatggttcttccatatataactttaagtacttattgctctgaattattttagttcttgatgtcaaaaaaagataaaaaataaataaattatatttatatatatatatatatattaatttgttggctttgatcctttgaagctctctaggaaaaatgtttttcaaaattaacacaggctcctttggatacataagatgggaaactggaattggtatataggtcaagtcaggtaattctaattaacccgtccggaaggtagctcttcatatgattctacgttaacctagtttagaaatattattctactatatactttgttcataggattatgtattatattataggtaactacattatcctgtgaataaaaaataataaaaagtaactacattatcgattattattatattgagatgtaaatgtgatctttcacaatttaactaaatataaaatacacgaaaatgtgaaaacaatttgaagccagagaataaaggttctctgacatgaagccacaattagtttttacaaaagcccaataagagcccaaataatatatatgaaagttggttaactctctccatataaatgacacatcatcacacaacaaagtgacatatgttatttgatgtttttcaaattaataaaactaataaaattaaataagcaaattaaatatatcatcaattctactcttaattgatttttccaaaataaaaataaaaaataaaattatgtaaacaaattaagtactactttcattatactctttttattttattaattttttttatcaataatcatgactaaattttttattgtgttgtaattgtttgctacctaacctcttattagtttagtaatttaattttgattctttgataacattgacattcatgttttttcaaataataaaccttcaaaatattagacctaccaaataatgtaatatagatcatttcttttatattaatatatgcaatgacagaagatctaaaagtattgactttaatgatactttaatttttgcattctttttattcttttcatatgaatactcttgaaatcttgtttagtttatatcaattctatatatttaatcatgagcctataacataattgttggagtattatatctggagaataaataaaaccataaatagtttatttataattaagttgaacaattttcaaatcatccaagacacgataatttctctaatattgatatatgcaatgacaaaatatccaaaagtgttgacttcaatgacattcaatttttgctatctttttatttttttgtacgaatactcttcagatctttttcagttcatgtaaatcgaaactttaatcatgagtctattacaatgttgttgaagtacataaaacaaggaattgatttatgtataatcgagttaggaaaattttaaaccacaaaaataaaatagttacatagaattgtatcaaaatatcattattattgttatatgtattcatgaagtgaaaaaatattaaaatcttataaataatcagctttatacacaaaaatatataaattgatatttcaagtcacaaatgaatctaaaccataaaattgtaactacatattatgaatctaattttattaacaatactagaataaacaaatagtaaatataaattagcataaagaacaatcaatgtaatttttttttaacaattttcaaaacaaactcacgcgtagcgtgggtactcatctagtaaaattaaagcagaaagagactcatgctgtcaagagtcgagacatagtacgacacaatggtcacaatggtgtggtgaaggaggacgaaaaattcagagctagcacagagattcaacttttctcagagggacagctggataaggttccagattgttctgctcgttttataaaaggactcgtttttgtagtatcaaaaacatgtaaaaaaaataaagcttgagagactttctttcattcacagagagctagagttgcaaaatgaagtttaaattaaccatatggcttaactgctacactg

SEQ ID NO: 11445 - DNA, 3000 bp, Unknown
  misc_feature (1)..( 3000): cDNA_ID_3039965_gDNA_ID_2214496_Annot_ID_183841 3000 nt of promoter + ATG
taaatgtttgttaattacgtttattcaaattgtgtaagggtggtacaataagtcaatcaaccaaagtggatgaacacataatgaccaaaaaaaaaagaaactttcttttttctttttattgtagtaatgaattattactacgttaactatgacattatctatagtacacactaaattttattagaatcatcgttctgtcaccatctaaattaaaattaaattattagaatgctaagtgtcatatcatatgatttagctataaatagttaaccaaaaaaagaagctataaacatataatactttataatcttcacttcatttacaaaaatatactgctaaaactgtaatttggtataagaacaactgatacttgaatttcaaattatttaattaacagatcaagtcgaatattttataaatattatcaaaagctgattaaaacaacagaaagactcttttcattctcgttactcaaatcgctctgttgacgtacataaacaattgtgtttactcctctaagtctatctcatattgacttacataaacaattgcccaacaaatgtctatattcaattaaaagcaacaaagaaaaaacactaactaaaaaaatagaatcataatctgaaacgaaaactaactttttctttgtctcaatgccgatcaattagcctccatgagcagtaatcctacaattataaagaaacgtattataatggttaaaactcttgtcatcaatccaaaaacactcatacttaatcttagatctcaatttgagataaattcgaaataagcctagatttctaagttacaacaaattttattgattttaatcaaataataaaaacatataaataattatttcattcacataaatatatctaagaaagatagacacacataattaacaaaagataaactaaatcgtattagagtcatcattttgtcaccatccaaattcaaattaaactattagaatgttaagtgtcatatcatgtggtttagctataaacatgtaatactttataatcattttaagttatttcttattaccatcattcactggaatttgttttacaacttttgtacagttgatctttaataaatgagctaaaactaaatagaagattttaaattttgatgattgtctatatatttagtgtaaaacagtaaatgaaaggcaaaaaagctgcaaatcagattctgaataaaaaacatgttatgacgtctaatcaaagttttaggatccgagaagtttacttttcttgaaacacaataatcgaaagttttgtttaatcaaaagaagctcataaataaattctaggatcctaaatagctaagtaaaaaacaaactgaaatagattacaatgaattcatacattacatttttgtagtttgagaccctagaaatacgatcttgttcctcctcttttgtttataggctcagttttaaaccttaataaattaataatctcggaaccgataaattctaattaatttataaaggtattaatttattaataaatcttatagagagattttattaattttgtaattttttaaaatttctatgtgagaagtagtttttgtctttataatcaatgtctttcaaaaataaattacaaataaaaaaccaattgttaagttagtaaacaaaaaacactttgttcaatatagtaaaaatattagaaatgaactctactaaaaattttatacaaatttaagaaaaatgaacaatactagagttaaatcccactaatttaattaaatatatatatatatatattaataagtgtaaaattattaatttatgatattgatgagatcatatgtttacgtaagagtttttaaaaacttattattttataatttcattgatttgtgttatttattacattgaaaacgtcaagaatttattaatttgtaaaaatagtaatttatcgaggattagtttataaataatttactgtattagcattcacaaggaataagcatagtacatatatgtcccaatgttaagtaaatcattttttgtataattacttgtcaaaaaaaaaaaaaaaaaaaaaatcatatagaaactaaaatatttggaaatatatatggactcaaaggttgtacaattttgggcctaaccgtattatatataatatacgggctaaatgttacacgtatgaagcccaaaataacctctctttttttttgtcaaacttgatttgtaattgaattttaataaaattaaataattgaattttaataaaaattaaataattgaattttaaatgcatatttttcgataaaaaaaaaatgtctgttgcagaaaatattaaatgatactttcgcagtgacgattattccaaggccgtttgcatgtgcagatgtgcttgatcatataaaatccattcaaattttctaacattagtaaatgaacagttcatcagaataaaagaaacagctcgacatttggtagaatctctaaccacacttttaaagaaaagacacaaacctaatggcttctctctctctctcgaagacaaaacacgacataaatttcttaatcctcattacctatcaccgacaagtaatgaaacatctctataatcttatctgatcaatcatatataaccaaaagcacttgttttactaataaaacaaagcaaaaatcatgtgaaatacaagttcttattgttaatttgttatagtagtaatcaaatcaaataaataaacatttcatcttcttggattcattgcaaaacagtctgtcaagttgaggttgtgcaatgtgcagtaatgaacaaacaaccaaaccaagtttaagaacttaaagattgcatttattgcctccaccttaattggcttttctactttcatttacttcttcttcttcttctcttgatccaaagttttcctctacactacctatagatctgtctttgttcctagaaaaatgataactttcagtgagtttctgtttctctaaaggcaaaacacatcttcactatg

SEQ ID NO: 11446 - DNA, 3000 bp, Unknown
  misc_feature (1)..( 3000): cDNA_ID_3039977_gDNA_ID_2214496_Annot_ID_183836 3000 nt of promoter + ATG
tggtattgatcttgaagaaatggaaaggaagataaaacatgatgtcttagcattagcagaaagattttactctgctgatgaagtgaagtttttgtcagctataccagacccggaagttcagcgaaaggagtttattaagttatggactcttaaggtagtttctactaacaacagataatactatatttaagattctgtaaatcgtttcttctcgaaagttaaaaactgttgtgatggttctgtttccaggaagcatatgtgaaagcattaggaaaaggcttctctggtgcaccttttaataccttcacaatccagtctaaggctggaacaaatggaggctacaatctttgcaagtttttttttagactttcatcacactctggaattgaatagggtgcttttatcaaatgcgattagttgttgcattgtacactttgtaaaaatttcctttgcagtgtctttttcatttccttttaagaaaaggtttttgcaagtatagtgtataaatagacagtagcgatataattttgagacgcttgaattgttttctttagacatctgaaatgtctgtcgattcacaggagaagacaaagaaatgcaacggagaatggaagtttgccctattggagttggctgattctcattatgctgcaatctgtattgaagatgatcaagctagtggaggtgcagttacagttgacataggtcctatgagggtaattgttcatttagtggtttcttcatcacaactttgtccttcttgcaggagctcctatgagggtaattgttcggaaaaccatcccgtttgttgaagatgaacttatttctgagaacaaaaatctttagtgcagtgtagcctttaagttcaccatcagatttttgtaagcattttgttttcaatacgtacctctgtagtgcatttcgtgcaagcgtaatatcaaagcttataatctgagtaccaagtttgtgactcttggaaaatcaccagtaatcctttcacgagcagaacccatcataaggttgaatataaacttgtttgtgaactgattgcagtaacgaagatggagagaaaggaaatgtgtaccagtttggagtgatactactacagctcatcacaggcaagtagtggctgcaggctcttcagagatgggaagtttgaagcttcaggtctgttctgttttagtcagaaccttttcatctttgtaaatccgacacggcttaaaagtttggaacctctatgttatttcctgcagctggagaacggtttgagagatataccatcagtattgaacagcttagcagatcctctgtgaaaggatcataagctcagtcattgaggacaacagtggaatttgctatcaactctcttggaatctgcagtatacaattcaagtgcagcaaaagatggaggccaagcagtgggaatcatgaaaatcatctatgaagacattgtgttaaacaaatgatcataatgagagacaacaaaaaatgtagaaacagtgacaagtgttaacaaatgaatatgcagtttcagggagaacttgacatatcttctattagctaaatttgtaaactgttttaccaaatataaagcaaaagaagaagatctgcgactgaaatacatatgataattatgaagatgaatgtggttacgaaaatacaaagaaaaaaaacatgaagagcaacaaatcacagagtttgaaaaacacagaaagacataaaagagagtggtagggagagtaaacttctctcagagatgtgatggtcgaaatcagatacaagagaggaggtttaatgttatttgaagacaaatgctacaatgatataattactagtcggcagtccagctttgttcgacaacctcgcggactcttctgttgtactcgcgcttgctttcactgaacattcgtgcagcttccgaatttgcaggagaattcggattaggatcacatagcaatgactgtgataaaaaaaggacggcgattgtttagccactaatgtaatcagattagatcaaagatccgtgtaaaagatcaggggaggaagcagaataacaacaatcatcaacggttttactgagaagcatttcgatatgacatttcttgtatatatacctgaatggaggttagtatagcagcgacatcgtatattggactccattggttttggagaatgtccaagcatatactcccatcagcataaactgcacaacattgaccaagtgtgagctttcgttgatcacatgtactcagagtaagaaactatgatgtgataatctccaacttactgtttggatggaacatccgtgaaacaaaccgcactgttggtggtttatttggataatcttccgaaaactgcagtgacaatttgaaagtacctaacaagaccatacaaaagagacataagaccagatacataaaagattgccaaaattctcaagttaagtgattacaataacaaaactttacctccatcccaaggggtatcatcaggcctgcaaatccacaatcagaagctttaataagtacagtgcagagaaacctatcaagtatcgttttttttttttgttactttagttcaattacccgaatataacagcattccacaacatgatattgttgtcttgtggagcaccactaattcctgcaggtgggtcttgctgcaacctcttgaaatccctcatcaatctcttcctcgctggagtcgacatccttctcttactctatcaaatcccagtaaccaaccattacagtatttcaaaaaccaactatctcagagcttggatatgcaattatctcaaaccatttgaatctgccaagcaagtttataacctaacctaatgatcatcacctaaatagcttataagcacaactaggaagctttgagatcaattctatacaaaactacacaattctctttaacctaggaagctttgagatcaattcacacgaaaatgtccaaaggatgatgataacatctgaaaagaaactaaaatcaatg

SEQ ID NO: 11447 - DNA, 3000 bp, Unknown
  misc_feature (1)..( 3000): cDNA_ID_3039981_gDNA_ID_2214496_Annot_ID_183835 3000 nt of promoter + ATG
aaaagcacaatacaattacaatcccttaaacattatacataaggcctgatacaagtagcaacaattgttcgaagaagcaccaaccaaaatagcttctgaaacggtatccaaatgcttggtcaagttcgacactgcattttccatgttccgcttcgttacacacatgatatcagagaatgaaattccctaccacagaaacaaacatcagcttcagagaaaatttatcctacaaaagactttagtgatataactgttattggaactctataagataccttgaaccacatatagccatagcctaatgctcccaatgtcgctgccgggacaataaacggtgtaaaatcagctggaaaatgtagaagtgagaaagttagagattaacaatcgttcatcaaaactaccaaatcaaaaactagccgagagacaaacctccctgagctccattcataacagttatctgccgcgacgaagccaattgccgaacctccattgctaatcgttgcatctacaaaatacccgcacatttatatatgattgttccaaaaatttgatcttttttaacaaacagatgcacaaaatatacctgagtagtcatggcatcagaatcatcatctacatgatctccagatttctcaaatcgcttaaccaaagccttcgaatttgaagtcaaaagaacaaactttttactatgtcccttctaatccaaaattgagaagaacaaagaaacttttactaatcgtacctgaagctcacccaaaatatctgccatcttcccattcttaaccagaatcgtactagtataaccttcagattcaaagacaacaaattagccaaaagggtcttttaaatcttcaaaattggggaaaatcacaagctcgagaaaccctagatacctgctccagctagaatcaaaatcttcgataacccaataccagattgcatagccatggtcgcagactcacaggtgcaacaaaaggaagttgtcttcttcgtcgagttcgctcgccggcgtaagaaactgtcaggtcaatgtcggtttctgttgaacggtgtcgtttcctactttataactcagttataaactctttgaccttgcactaaacgtaatgaataaatctgtaccgtgcattaaagtatcttagtcaactttctagaaatattgggtcaattttgtaaggtttttaatattgtcgggtaaaaacgaattaacgaaaactcatctcccataaaaacaatttatttgaatctgggagtatttttttttttgaatcaatcaaattttctataaaaattaaaatatatataatgctaggaaccaacatcaaaagtttaaaggatcaatgctaatatataagatacattgactaatctactcattgtcaacactaatatataagatacattaaaatgttgttgatttttaactttttaatgattttatcagattttaggtataaacaaatgaatcatatttactattttaattagaatttagatgttgatataagactacactagatttagattcaatttggttgattagtttttctttcaaatatagtagttgatttggtcacgattaaatgaaattatggagttgttcaaaaaaaaaatatgcagaataattttcatttgttgatgcatatcatcgtagattatataaatacatctattgtttgaatgtttaattgatagatcaaatagtgaaatatgtatagaaaatgattacaaagcaataacattatagccaaaagcaataaatttatatgctactcgatgacatgttagagagaagaggcaaattaatgacacttcgactcttgaagaacgaattattcagtaattatctgttgtttacagaagtttttttcacgtcgaatacatttttttggaagttacagttttataaaagaactttaatcttagagagactttgtttttgtttttaaaaaaaatacataattaagattttaatatagtttctgaatgttatctaatactttaacgacacaagaaatttgttaagtcatacatttgtatataatcagatttaactattttcgagattagcaaacttttgacttagatgttgaaaaacaacaatccatccattagagtatctcacgaaactgaatagttatcgtgtaagcctaaatctagttagaggatgtaaaattgttactttttctgcagttgaggtacaaaagttcaatcagtttagttttgatgtgtctgtagatttcaatatacactttttttttaattctttttaatttcagatccttgggaatgagtcatctataacggtttaattgcatggttcccctcattaaaattgcttgggagaggacttacttgctgagtggatgcatcaaactctaacgtcaatagttttttttttttttttttcgcaaacaccattttaagtcaatagttgtaactaaatacaacaaatacatttttgttgaattagattatatgttttgcaagattttttgaaactctggagtagctaaaaaaaaaatagtatgcaatatatttttttctattgatgcgtatcatcgtacattatatatttatatattgtttgattgtttaattgatttatcaaatagtgaaaatatgtacagaaaatgacttaaaacattataagttagaatcaagagcaataaactcatatgctactggataatatgttcaagagaagagacaaattaatgatgcacaaactcttgaatatgaaattactaacgtcgattcttttctcgttaatgtttattttcatgtttcgaaaatgtttattttcatctcttgttaatgtcttgcaaaagttggagggctttcttataaacgttggttatattggggcacatttgtaagatgttaaatatgattgggtaaaaaacgaattaacagaaagtattctctcctaaacccttttcgtcatcgtaatcccgcggtgaagaagacgaagaagcattgagagtgaaaagaaaaaca

SEQ ID NO: 11448 - DNA, 3000 bp, Unknown
  misc_feature (1)..( 3000): cDNA_ID_2706525_gDNA_ID_2214496_Annot_ID_183833 3000 nt of promoter + ATG
gttctcgtcccgaaatcgggacctgaaccgccacaaaattggtgactttaccatcatctttcccaaaaacaggacacatatgaaacaacatccaaaacggagacccagatttacgataattcaacaagctcacttgcactgatctctcttcacgaatcgcttcacgaatctccatgatcgatcttcgattagtcttaggtccttgaaaaactttaccgtttcttccgatcacttcttctcgtgaatagccagtcattttcaaaaaccctaagctcgcgaaaacaatcgggtgacccgaaataaacgggtcggtgattgtgaaattgtgtggaagctcctctaatgcttctttgatccataacgtgtatcgaccgctaaaggaatcttcttcttcttcttcagtgaaaactgattctgaagatttcgttaaggacataatcgtaataaacactcgatgatgattactcttcttcttcttgtcagtctagtgtttagttccaatcccatgtgggttttcaggcgaaattgagaaactttttcttcaaagtgaattcgaaacacgaaatccagattgtgaaatttgaaatcaggaatcaagaaaatgttttcattgaaaaaaagcgtaactttggagaagataagacagaggagagaaagagaaaccagagatccttaagtaaaggagaagaagaagaagatgaaatgagagatacggaattgagaaattaagagtcaatttgattgtaatctctatctgttagaagaaacgttcttctttcttcttgtctgatttttgttttgtggctatcggaagaggacgattggttttgtcgcgtttctcagttcttcgagttgttaagatattaaaaataaatattttcagatatttgttttcctaatttggtaaatacaaaatttataaattaaattttcaacaatttatctaaagtgatttagggataagtacaaggtttatgtagggtagacacaaattggataagataagtgaacttaatagttcatttagtaactaatgtgttgcgaaaaaaaaaaaaatgtttttgataataatatcttaatttgccgaccaaacaaaataattaatttaaaaatttataatttgtgataacattaaacaatagtgtaggttaaaaaaattttaattaattaatttggacataaatttttttgatctattaattgattaaaagtttattaataattttataccaaaaaatttaaaattcgaatttcaaatattataatttattacaaatttacagattaataaaaataaatgtataaaaaatttacaacaaaatataattataatcgttcaccaaaattttattaaaaacaaattttattaaaaatatttataacataaaaaaagaatacattgtatatcataaatctaataaaattaaaaaaattatctataaaaaaattatatataacattttttataatttacaataaaaaaataaatattctaaaaaccaaaaaaaatcactccggatatttggactaatctaatgctaattgtatttgttaaatataaaattatgcacctcttatttaaggagtgtagtgggtcctagaaaccgagattccacgtaaacaaaggctggaaaaagacaaaagctgactgtccatacttatctatttctcttgtgtcgtgtggctttgtttgtgttatcaaatcgatgcaacctggcttacgtggcatttatcatttgtacgttactctccggtgctaacatgtgtcattcactcatcgcttattattgattcgagtaaggaggcccattgggctgtattaagctgttttgtttttaaaacaggttcgcagacgaaaataacaaattgtcgccaatgttcatatcggccaactcaaatctatcatctaagagtaagaccaaaattaaaattcacagtacattgctacactactactatagaaaatggtgaaatacctaaaatgtgaagtctatgttcatgtttgcagttgctaaagactgataccaacgattgcgatcatcaaaagttattgcgcgcaacacattttttgttcgtttggtagtcgaacaaaaaatttggtcgttggtcgttatataacattttagggtgaaggattcgaaagaattttttataaaatactaaaatgaaacactttaattgctcgttataaatcaacttttaatcagaattttaatttatgtttcaaaagttaaaaatctcaaaacagtaaaacgaaatactgactagatatttgtttaaacggaatcatacgttttttttttttttttttaaatatcaggaggttttggactgaagcccgtaatcccctaggtctgaaaccacagcatgtaatattagtttcgtctcaagcgtcactcgaatttcgccaattgagctaacaacacttggtggaatcatacgtttatctgtttatattttcaacaaaaattatcattccgtaatcttatgatttctttgtaagtgcaagtggtctttgaagtttttgattgaattttgttggcttttagtaagaaatgatttgttactgaattcattttgtaatcaatcctaagttaatcaaaaattataaacaagaaaacccaaataagagtaatatttaggtttaaagacaaaaataactgaatatattccacaaaagaaggacaaacaaagaaagaacaataaaaaaaaccacacaaactataattggtttacaggaaaagtaacagagatatttacaaatcaatggtaacctaataattactctgttaatcgttaaatcctccattaatgtctttcattttccctctctctttcaagttccttgttatttaagaaagccatgaatccgattatctatttctaaccctgggccgaccagaaaactttttggacgacccaaacttcaagggttctaataaattcatcaccggaaaaagatacatataaaataaaaatctctcaccactgctgattcaa

SEQ ID NO: 11449 - DNA, 3000 bp, Unknown
  misc_feature (1)..( 3000): cDNA_ID_3039992_gDNA_ID_2214496_Annot_ID_183831 3000 nt of promoter + ATG
tcaatgcctagtttcctatatcacgttaaaatatataacacattgttaattgctttcgcagctttcagcttctcggactcacttgcttcatagtgttcccaatcctctaatcctacaatacaacaatgctttagaaccctagttttggaggcaagagatagtccactgcaatgatttagaacccttaattctattgttagaacgtccatgaagcaattaagcaaagattaagctatagaataaacttttctaactgattcaaagctctaagacgaatttcacaaacaagtaatacgcataactttaaaaccccaaccttgttcatcatcatattccaccggcaaaaatcaatcctgatgcacgaaattaccaaaacaaacctctcttcgacaagaaccaatcaccaattcagttttatccaactcaattctcaacctccaatgatgtactcgtcccgaaattaggacataacttgtgattgtgaaattgtgaggaatctcttataatgctggatctaaagtgtctgtgattgtgaaattcttacagtcctcaattaatcacacacgtccccgagccctaacttgcacagcaaacaaacacacagaaaaagaggggtgaaccaaaaaagccgagaaacggttagtcaactaacaaatcctctaaccacgttacttcctagtgttaaagcccatttagagcccatttctgttttcattttcggataacaataagtcaaatcaagttaatcaaccacagtaaacaaatccgaacgttgtaaaaaaatcaacaacggtcatgagtgaatttaagttaattttttatcacgtgattaaaagaaacgtaacggctaataccaacaagtaacaacgttcaaaattctctacttctatataataagaaggaaactcaagtacattcttccccaaccgaatggccgactttctcatcatatttggaagagttacagaacgataaaaatgagttcacaagctttttttttttatctttaatctctcgtagtgctaatgttaaagcggattttttgtcacgaaaagttcgtatccaaccgcttcatattacatttgtaaacaacattcttcagaattgtcttttttgagtcctaattaattttcggatgacaaaaaaaagaaaaaaactctaagtacactcctctcttgttacagccaaataaaatgtttgagatttttcaaaattcagtctaattatatccctctgctaattagattgtcgtcaatcacgtgatgttaatgtttgtaggagatactcaatttcaaggttagatagcctctctctatcttattcatctcagatttggatttacttcttttttttgcagatttactatttgcagaaattacctgatcactgttttcaatatgtatttttggttttctctttattttatcttccaacaatttttattatttttaaatattccaacaaaaaatttggattcccaattcaacttcaatggtccatgtgccttcaatattatgttagaagtcaaaatattccaacctgtgtactttccattgtttattaatattttgaagtattaaattgtttttcttaaaatatcacatttataaggttattatcaaaaatatcactatatattagttttttttgtcatcgcgattttaattagagcacaaaacgaggcaaatttgagaaatgttgtttatataagtgatatgaagcgtttcagtgcgaacttttcgcgccaaattatgcgcttttatatttacattacaagaaattaaagataaagaaaaattagttaattctttcttgtcgctctgtagttttccaaataagctgagaacgccgacaattcttttggagaagacaccatattcaccagatttgaacagttcgtaaaaaaatgctacaccttgattatcggccaatcatacacttcatcacctagattgcagcttctacttcgacttcactattaatttaatatatcaaaactactatcaaaacttttggatttatcagagtatcatagacacaaaacattaaggtttggattaactattttggttttagagtatagttttaaatgatatggtttatagtttagtgtttagggtttagggtataaatttaaatcttaacaaaatcttctaaatataataattaaaaatttaatactttaccaagtgtcattagctcaattggtaaagatcctacgtgaagtttagaagtcgccggttcgagtgacacttgggacgaaattattattacatgttgtggtttcggccttgagagaattatagatttcggtttagaacttcctgatatttaagaaaaaaaaatcacatttacggattagaaagattaagttaattttccggtttttgttaaaatccgaaaatattctgctaaattaatactccaaaaacaataaagcttttataccttttagataaaataggaaaatggtcttaaaaccaatggcatgaaaatttaaatttctcaattattagtagatatacaaaaaaatcgttgagataaataatacaataataaagactttataaaacagactaaattaatattatagctgtattttgcctttttaaaatagaaagtttcagcttagctgtatttgttgtttttatcaaccagctttagctgtataagtttaaacaatgactttcttacagaagatgcattaatatatctcattatgttatcgtacataagatgcattaatatatatcatcatgttattgtaataatactgtgaaaatagcatatagcccatagtttatgtgccacttgaattatatgacatgttcactcatcaaaaactcacgactaaattatatcattatgaaagaaatattaaacaaattgcaaatgggaggacatcacgtttcagtatgtatgtgtctatagatatgtaaaggcaagaacgatagcaatatcccaaaaacctcttaaaaatagtctccgatctaagcagac

SEQ ID NO: 11450 - DNA, 3000 bp, Unknown
  misc_feature (1)..( 3000): cDNA_ID_3039996_gDNA_ID_2214496_Annot_ID_183830 3000 nt of promoter + ATG
tgtcaggcatgtgctcttccaatcaacgaggaaaacttttatatatgtgtggaatgtgacttcattctacacgaaacatgtgcagaagctccgcaaaagaagtttcatccattacatccccatgcacttcaacaaaaggttgtccatgaaaatgatttattcttatgtgatgcatgtgatcgcttatgtaatggtttcggatatgagtgtacgttcgaggattgtgattacatactagatgtagtatgtgcatcggcttctgagccgttcaactatcaaggccatcaacacccattattcctagcgttacgcccaaacgtaaagccaatgtgccacatttgcaagtcaacgaaagaaaaccaggtactcaactgcattgagggtgactttattatatgttttgaatgcgctaccttaccatatgtgataagatataagcatgatgatcattacctcacattatgtcatggagaggaggcaagtgactcagattggtgtgagttatgcgagggaaaattgtcaactggaggagaaaaagggttctataagtgcgatgattgttgtactacgcttcatattaattgcttacttggccctaatccatttttgaagcccggtcaaactttcacgttgggtcgtaacgaatttctagttatacgcaacaattctcctcgtccaatttgcggcacctgcaatatgcgtcgtccgtatccagtaatgtttttctgggaatcggtaagctcatatcgttttctatgttcccctactggttgtattactatttgagttatcctttttttttttttcttaaagtttaattttgtttttttttttgtccttttttccattgtctttgattttggctctatgtttttgagctctgttttttcatttatttggtgacttggtttgtagcagacttttatttaattcagtatttggtgactttatttgtatactttttttggtgacttggttcttgtttttgttctctacgacaatgaaacagtaacagagtgtgaaagacagagagagatatgacaaaccttaaagagtgaaagaggtgagaattataacaaaaaaggcatcactcgcgtaaatgataggcatgtcgggtaagcatggattggttctgaatagttaaagaaacaatgtcatggggataatctatagtagcagactgtaattccatagtaaaacgaacaaaataacccaaaacacacaatacgaaactttgtttgctaatttcttctcattcatccacccaaaaaagccacattccttgagattttttgctaaaaaaaaattttgaacatataatatactgttttagaccaaagatagaaaacaaaaaatgaagaaaaaaaaacagatgaaaaacaattcacaaacaataaaaggcacccattttttatgcaaacggttttggttgcaaggtcttttatttttcaagacaaattctcactcacaatgcacatgttgagatgtccattccaattgaggtgatcataaccaaaccaaaataattattgaaaccgaaccaaaaagaaaataaacttttatagttgtaattttttgtatcaggatcatcgatcgataaccaaaccaaaagaaaaatcaagtaaaacgttagtgtaaaggctacatataatgcaatgtataagattttaacaatcccgtttgagaagagggtggatactagtattatgaaacaggaagagtcaactggatcaactaggcatatgaatatctactaataaaattttatattttacaattcaaatttaatggtccatgtgccatatataatataattgatctgacgatctcatcaacgaacaataagaccatctccaatggtttttcaactttgaaagtgagtcacccatttcactgattgggttcctagaaagaactgcatgaattcaataaacatttatgtacaatgacattgggtgttaaagaacataccgagactgttcaagtctttcagtagatcgagcttgcaaatggagaagattcattgtctacaaaaagtgaaacaataacgaataagtaatcaatagtagcttgtgacgcaaagacaaaaaaaactgttgattcgtgtcttataactcaccattcaaaatcaaggtccgtaaattgacaagagaagaggtcaacttaatcatccactcatgtccgtatagcactactttccattgtttattgatattcagaaatattaaatcgtgtcaacaactctcccacgatttaacacatgctagaggattttcctattaatacggttgatatgatctcatataatacaaaaagaccgttgagaaaataattaatacataaaaacttttggaaacaaagttaattaatactccctctgtttctcaatagtttaaggtttttgtacacaaattaataaaacatataaatttcatttaatttatctttttcctataaaaacatcattaattacaactaatccaaccaataaaaaaatataatgtaaaatataattggttaaaaactattaaatatatttaatgtttacatagaaaagtgaaaacaacacgtatattgaaaaaataaaaaacctttaaactacacttaattagaaacaggggagtatatactatgaaccagccttatcttagctgtatctaatttttttacttcagcttagctgtataaaattataactaaaacaataactttctaagtgaagatggattaatttatttccttacgatatcgtaaccaataatcttgtgaatatagttttataacccaaagtttatttatgagaaatacgaccactgaaactgtattactcaataaacaattacgactagatcatatcagtatgaaataagtattaaactgatcgcaaatgggagttgtttaagtctttggaaagcttggacaaagcacatttatatataaacgtcttcaggataaaaatatcccaatatcctctaacaaataatctccgattgagcagcc

SEQ ID NO: 11451 - DNA, 3000 bp, Unknown
  misc_feature (1)..( 3000): cDNA_ID_2717424_gDNA_ID_2214496_Annot_ID_133571 3000 nt of promoter + ATG
ttttgtcgcctcgccagcatttatcgatcgcgtttagggattcaaaccttcctccacgtctagttgttttcttaccgcgtccgacctgacggagatccctccttgtttcgtttactatccctgtcgtctccatagctctgagaaagaaaacaagaaaacattagtttcttccggaagaagttaggttttgataacaaatcaaaaaccctaactaggttaaattttagagaacccacaaggcggcatggtagttaaagtggtccgtgacgttctctgggttcgggtcataagattccaaagtttctcgcaatgcgttggtttgacgctgcgtccagtattcatcatattcggcgatgtgggcttgaaccgatggaaccaccacggtgagagacaacgcgacaaagacgaaaacgtagctcccaagattcaccatttgaatcagcagtggtgagagatttttattttatatgtatctttttccggtgatgaatttattagaacccttgaagtttgggtcgtccaaaaagttttctggtcggcccagggttagaaatagataatcggattcatggctttcttaaataacaaggaacttgaaagagagagggaaaatgaaagacattaatggaggatttaacgattaacagagtaattattaggttaccattgatttgtaaatatctctgttacttttcctgtaaaccaattatagtttgtgtggttttttttattgttctttctttgtttgtccttcttttgtggaatatattcagttatttttgtctttaaacctaaatattactcttatttgggttttcttgtttataatttttgattaacttaggattgattacaaaatgaattcagtaacaaatcatttcttactaaaagccaacaaaattcaatcaaaaacttcaaagaccacttgcacttacaaagaaatcataagattacggaatgataatttttgttgaaaatataaacagataaacgtatgattccaccaagtgttgttagctcaattggcgaaattcgagtgacgcttgagacgaaactaatattacatgctgtggtttcagacctaggggattacgggcttcagtccaaaacctcctgatatttaaaaaaaaaaaaaaaaaacgtatgattccgtttaaacaaatatctagtcagtatttcgttttactgttttgagatttttaacttttgaaacataaattaaaattctgattaaaagttgatttataacgagcaattaaagtgtttcattttagtattttataaaaaattctttcgaatccttcaccctaaaatgttatataacgaccaacgaccaaattttttgttcgactaccaaacgaacaaaaaatgtgttgcgcgcaataacttttgatgatcgcaatcgttggtatcagtctttagcaactgcaaacatgaacatagacttcacattttaggtatttcaccattttctatagtagtagtgtagcaatgtactgtgaattttaattttggtcttactcttagatgatagatttgagttggccgatatgaacattggcgacaatttgttattttcgtctgcgaacctgttttaaaaacaaaacagcttaatacagcccaatgggcctccttactcgaatcaataataagcgatgagtgaatgacacatgttagcaccggagagtaacgtacaaatgataaatgccacgtaagccaggttgcatcgatttgataacacaaacaaagccacacgacacaagagaaatagataagtatggacagtcagcttttgtctttttccagcctttgtttacgtggaatctcggtttctaggacccactacactccttaaataagaggtgcataattttatatttaacaaatacaattagcattagattagtccaaatatccggagtgattttttttggtttttagaatatttatttttttattgtaaattataaaaaatgttatatataatttttttatagataatttttttaattttattagatttatgatatacaatgtattctttttttatgttataaatatttttaataaaatttgtttttaataaaattttggtgaacgattataattatattttgttgtaaattttttatacatttatttttattaatctgtaaatttgtaataaattataatatttgaaattcgaattttaaattttttggtataaaattattaataaacttttaatcaattaatagatcaaaaaaatttatgtccaaattaattaattaaaatttttttaacctacactattgtttaatgttatcacaaattataaatttttaaattaattattttgtttggtcggcaaattaagatattattatcaaaaacatttttttttttttcgcaacacattagttactaaatgaactattaagttcacttatcttatccaatttgtgtctaccctacataaaccttgtacttatccctaaatcactttagataaattgttgaaaatttaatttataaattttgtatttaccaaattaggaaaacaaatatctgaaaatatttatttttaatatcttaacaactcgaagaactgagaaacgcgacaaaaccaatcgtcctcttccgatagccacaaaacaaaaatcagacaagaagaaagaagaacgtttcttctaacagatagagattacaatcaaattgactcttaatttctcaattccgtatctctcatttcatcttcttcttcttctcctttacttaaggatctctggtttctctttctctcctctgtcttatcttctccaaagttacgctttttttcaatgaaaacattttcttgattcctgatttcaaatttcacaatctggatttcgtgtttcgaattcactttgaagaaaaagtttctcaatttcgcctgaaaacccacatgggattggaactaaacactagactgacaagaagaagaagagtaatcatcatcgagtgtttattacgattatg

SEQ ID NO: 11452 - DNA, 3000 bp, Unknown; identical to SEQ ID NO: 11448
  misc_feature (1)..( 3000): cDNA_ID_2706525_gDNA_ID_2214496_Annot_ID_133572 3000 nt of promoter + ATG

SEQ ID NO: 11453 - DNA, 3000 bp, Unknown; identical to SEQ ID NO: 11447
  misc_feature (1)..( 3000): cDNA_ID_2717417_gDNA_ID_2214496_Annot_ID_133574 3000 nt of promoter + ATG

SEQ ID NO: 11454 - DNA, 3000 bp, Unknown
  misc_feature (1)..( 3000): cDNA_ID_2717413_gDNA_ID_2214496_Annot_ID_133577 3000 nt of promoter + ATG
tgggaatttttgtgatcagactgtaggaagaaagaggtactgaaatggcctcagagaatggcgatagcaataggagtcgctcgagggatacagttcttgcatatgggagtagcaccaggaatctttgggaacaatttgaagatagagaacatcatgcttgatgaaacactcacagtaaaaatcagtggctatactattcctttaccatccaaggtataaaactttgttttatttcttcttctattaattgaatctaagaaaatttaatggcatttctaggttggagaagagaggcctcaagccaaaaaacctcggaggttgttgttgtttcttaagatatgatcaaatgtgttctcttctatcaaattttgaaacttgttaatgaataatgtgcagtaatgaagatagagagaaagaagatgtgtaccagtttggagtgatactactacaaatcatcacagggaaagtagttgctgcaggatcttcagagatgggaagtttgaagcttcaggtctgttctgtttcagtcagaaccttttcatctttaagaatccgacacggcttacaaatttagaacctcaatgttattatttcctgcagctggagaacggtttgagagatgaaccatcagtattgagcagcttagcagatccatctgttaaaggatcatatgcttatgagtcgttgaggacgacagtagagtttgctatcaactgtctttgcgaagatcagagcaagcgtccttccatagaagacgttgtgtggaatctacagtatacaattcaagtgcagcaaggatggagaccaagcagtgggaatcatgaatcatccatgaaagcaatatatgaatgaaatgatcataaagagaggcaaaaactgtagaaacaataataagtttcaaacaagtcaagatgtagtttcatggactacctgaaatatcttttattagctaacttagtaatctgtgaataaaaagcaaaaggagttgaaaaacacacaaagacatgtaagagagtgtgtccagctttgctcgacaacattgcagactcttctgttgtattcgcgcttgctttcgctgaacattcgtgcatctcttaaaacaaatcagcagtctacaatcttgctaacctgcttgatgaagacatcaaaatcttcaaaaaccttcacaggttctttataacaagaatctctgtgcctggaatactatagaaaatcccaaaagttactgcaaacctctcactatgctcacgtctaacctctccatctcaaccacactccgtgtttcgggcaatctccaatacagaagtctctacctcatccagcattctataaacttcctttgttatgacttgtatcgctagctaaaaacaagtgcttgtgttccacataactataataaccatagctatacccaggttaggtaagatgtcgaaaacagcaagtggctttgccaagttacctcacctagcatacatactactgatcaatgcattttcgctcacaaaacaaattttgttacaataccattggcttttactagcttcttacttcttgaccaatctcttgagcctccaagatagataggcacaagaagacaggatcatgacaaacgctcgatgatcacaaacacatacacaccagcttccttcattcgagtttgatatgtgagctctcgtagacgcacgttccatggcgtcgagaagccaccgcagcgacggtcatggatattggcactttcgatgagcttggcgtgtggggtatttgtttatgtgtctatgaaccatttattggcaaaagggtatcgaccaaacaagatggtccatgtggatgagcctggttataagtttttggctgtgttgtttgaagttgttgtcattgccattgttatgatatgggacacttgaaaaaaacaccaattgactcattgatttctcaggtttgtaaagaaaggatgttgattttgaattgtttatagcaatcctcgtattgtagtgtactttgtagtttgtagcatcaaaaataacaacaacaatagtagaagagatgtttctctttttttttttttcgccagaagagatgtttctctcttattccattttgacaaggtttatcttaacggtacagtataaagatgggcctataattgttgagttgggcctgtagtggccttgtaggtgttgttattggcttcatttgggcccgccactagaacaccaaatggaccaatgggtgatttattttggatatcagtagaccaaaaattatatcaaattataaatttgggtctgatttgtatcagtggactgatatctttgatactcagtatcatgtgacgttgcagcatacggttggtcaatattttcgctcaaatcagagaaaaaaaaaatctttagtaatcttatgttataatatattaatttttgaatttgcaaaaaaaatttttttatacttaaccggtctcaccaatataatcatatttagtaggagtatcataaaaaatctcaaataaaaatcaaatattataaataatactaaaaaattactcatgatactatataagtatcaccccatatcatgctcttagaattgtgaaacttataaaactggtctttttgttaggcaatggtgaggcttttttactttcaggtttaaaaaacatgttgaagcattagagtgttgatgaatataagtttccctagtaaatagtatcttcagtctcagtcgtggaaggtgtagaaatgggaaaatctcatagaagaagtaattatgagtcatcgtaaactagaaagaagacgaaaagatagcattacgatagtattgatgacgttctggtttcgtaattaaagtgttttcatttcccaatacaaatgacttttgatatttcttctctaataaagaaagtcgcttataaatctcaatcatagcgagaagttttcatttcttctaaacttattcaaaaccctagtttattcttacaataatccttctgatttagctatg

SEQ ID NO: 11455 - DNA, 3000 bp, Unknown; identical to SEQ ID NO: 11445
  misc_feature (1)..( 3000): cDNA_ID_2717410_gDNA_ID_2214496_Annot_ID_133578 3000 nt of promoter + ATG

SEQ ID NO: 11456 - DNA, 3000 bp, Unknown; identical to SEQ ID NO: 11443
  misc_feature (1)..( 3000): cDNA_ID_1808188_gDNA_ID_2214496_Annot_ID_133580 3000 nt of promoter + ATG

SEQ ID NO: 11457 - DNA, 1020 bp, Unknown
  misc_feature (1)..( 1020): cDNA_ID_2717438_gDNA_ID_2214497_Annot_ID_133584 3000 nt of promoter + ATG
tatgaatttgtaagaaaacaacaaaaattaagccgatctatttgtcggcccagccgctaaagagtcaattatacccctataattctcacgcggtttaagaaaatgcaacaacaagtaaggggtgtatctgtcttctcacacataagatttttttttttgcttattaaaactcttacgtattgttgtttcctattctcaaatttgtattttccagattttccagaaaaatctcacagcggtaagaaaaaaagaaaaagaagagtcagtggtcttgttgtttcgttcttccttgttcgctcgacctggccgatgtctaaccaggaccaggagacgcgcacacaattcgcagaatgtaacgttgttgctactcttcttctctcgtttctgtgacctaagaaccattcgaattcgctgctccgtctctctggtttcgtccttgaaaaatcgtctactcgagattcctttctctagccacccatctcaactgctgagtagcaagctgtatttttgttgacctaactaaaccctagcttcttcgaggttttctcttgattcccttgtcttttctagctcccgaatttgccagttttacttgattttcatttttcatgtgtgatgtgtgtttttctatgtaattggatcttagggttttttgatttgggaataactctttgaaatcgcatttaagattgtgtctcaatgcttttttacgatccaattccttgagatgttttgtagatttctttcagtcgcttaattaggggaatgattggatgatccttcctgtgtagtaggaagaacagataaagttacatcagattccaatttttaaaagagaaccctagtttactattaagtatgtggacgattctatttcatatgaaaggtcttggtgttatatatgtcatctgtgtatatttatctaaaactgagtcagtatagtgcatgctttaattgatgagactgtctttcactttggcagtggcatttttttgacgagtgcttctcttccttatcatg

SEQ ID NO: 11458 - DNA, 3000 bp, Unknown
  misc_feature (1)..( 3000): cDNA_ID_1831425_gDNA_ID_2214497_Annot_ID_133585 3000 nt of promoter + ATG
agcagctcaaaatgctcgatccttgctttctaaaatttctggaagctcttcggatgaagttgatgatgataatgattcatccaacagtgaatctgatagaagcatacccactttgcgacagttggacaaaccatctcagatgctggaatctctttcaaatgacaaacagaagaaaagattgattgtaaagatctctgttaagaagccagcagagtctatgggaagcaagggagatgtgataaatcaggctgatttagagcaactatcttccaaacctttggaggagaatcacagagtgattggtatatattccagagaacccgggtcaagttctgtagatgcaaaaggtgattcagggtgtcagagtattccctactctatgaatacgccacagagagaaaaggccgataatcagttgataagatcttcagatcaagaccagaatatgtgcaagtggagggaagagattcctgtttgtgaacctaccgaattaactgcgcctgagaacatagaagaagcccaaccattttatgggtagggaaatcagactataatgggaacgttatgtttgtattatatttccgcaatatctaattcatcgtattctcttgcagggatgaagctgatgagattcttccaaagaaagttcgacgactgaggttaaagcttcggcatcccaacagtcctcgaaaactagaacctgatgaggtggcagatgatttggcagatggtggagatgggtttgcatccatagctccctctttcatgaatccgattatggattctgaacctgtgatagatagcgttagagattcttctgcacataactttgagtttggagaagctacagctgatgtgatacgtaggaaaagatccataagaagtgaatctagtacaagaaatagcgcattacgcataaggttgggctctggatctgtagacaaaataaagaaacaagggattccttccacaagcgtgtatgatgatgcatcacttgaagaatggccttctacctcaaaagctgggtccaggtctagatctgcaagcgtcagcaaaccaagtcttcatactgggataaggttgaatagtgtctcaggaaaaatctcatggttattgttgtctgaacacgaggaaggctgccgttatatacctcagctaggggatgaagttatttacttcaagcaggtacgtcctcttggctgctaattcgttgttcacttccttgtattaatttgccagctgtgatattaataaactttccttgactgtcgttttcagggtcatcaagagttccttaaaactaaagaattaaatgacagggaccgatcaaggtaccttccccgaaacctaggagcagtagagatttgcaaagtcgagaaacttaactatgatacatatcctggttctggagatagctgctgcaaaatgaccctcagggttctggattcttcttcatcacatgcctcccgcaaagagtttcaactgacacttcctgagctcattaatttccctgattttattgtggagaagactcgatacgacgctgcaattcaaacaaactggaaaattggtaatgagtgccgtgtgtggtggagagacgcaaccggtgaaggcggggcttggtgggaaggtaggattgagtcttcacaagtaaaatccactgacttcccagagagtccatgggaaagatacagagttgtctatgaaacaggggaaacgagtcttcacagcccgtgggagtttgacaatcccgagtttccctgggaaaaatctaccatcgaagatgagagaagagagaaactgctttcattatttgctggactagtaaaatcaatcagcaagcatcaggtttgtcttctctcccgaaactatcatttctcatcttgctgttatccttgcttgcctcgtaactgttatttgcttttgttatatattttcttcaggatagttacgggatccaaaagctaaacgaagcagctcaaaagatggatttctgcaataggtacgatacttcacaacacttagctctctgcaattgattctttcaaaacctccctagtcctataaactcgaacatgaaaacccatgtggtatacttgagaagcagaaacgatagttgagtcggtgcttatttaaataactcatatgatcaaacttgtggattttcttatctggcagtaatgattcatgcattgtgtaactctggtttaaaatcgcaggttcccggttccattataccctgagctgattcacgaaagactagagaatcagtactacagaagtattgaatcgtttaaacacgacgtggatgcaatgctctcaaatgcggagttgtatttcgttagaagtgcacatatgctttcgaagataaagcgactgcgagataaattgacaaaaacgttaagaaagctgatctgaggataaggcaacaccggtatgcttcttttggtcctttcttgatcttgtaaacacgttaggctgcggcagttttttcattatatagcgaagagagtgttaaaaagaaaatttaaaagttttcactctaaacaaaagaagtcggttttgtttgtagtaacccgacacaggtttcatgtatagttttagtaccacatgtctgtaaccgaaatttactctgttgtcacaaaaatgacatcataagtctaattttattacaagaagattattatcatttcatttgcaaactaaattgtttttcgttttaactactaatattaacattttattttcgttttaactactaatattaacattttattttcgtttaaaaggtttgtgaaatcgaaaacaaacattacttgagatgaaatgtaataaaattaaattaaatgaaaaccgaccagagaaaagaataaaataaaaacagagtaggttgaatagaaaacacggctgagagaaagtaaagagaaaaaccctaatcttcatcttcatcttctcccgccgtcggccgtaagaggtttcgaagaagcaaagtgagcaaca

SEQ ID NO: 11459 - DNA, 3000 bp, Unknown
  misc_feature (1)..( 3000): cDNA_ID_2706573_gDNA_ID_2214497_Annot_ID_183866 3000 nt of promoter + ATG
tagacttgtcctgagtttcctcagaggagaagacgaaagggccaacggtgaaaagcttcatcttaagcttgttttctaggagacgatagttttggagaatggctccgctgattccacggttaatctccgtcggaaaagaacacgtgtcagatggagaaagctcaagaaacgccctgcactctttgatcttgatcaccttcttataatccttcacctccgacgaagaaagcgtcgccaagaaataaccctttgcatccgtcgcttggctaagcaccgtcacatcctccgcttcgtaaccatattcatcagttctctcacatgtcactctcgccactgcacctgtccacatatatcaaacaaaagcttagacgagaccttgaactccaatcctagtttacaatatatacatgatgagatttaccttggataggtgtaagcttagatcctcgtttgcagtagatgagaccttggactccgatcatcgaggaaagcagttccccctcggtgattgtggctattccggcggcaaacagagacgagagaagcagcatgtagggaatgtagagaatcgaacaagtttgggccattttttaaaagtttaattcaatatttgaatatatgtctaaatgtgtttcgttgatgaatgaaagttgtaccatgagagttatatagggttttagcgataggttaatatataaatccaaagttatatgagaataagggatctgacttgagcgcacgttttagctcgtgatcctaatcattgcattcttatgctcctaaatgtgacttttgatatagtataggacgtgcagagacacttctttttttttttttttgatttttaaacatcagtgtctgtttcaattccgttcgatgatagagctagcgagcctcttcttttcaccagaaaaataaaatcgctatataccttttctctttctaatggtaagctttgtacttgtctatttgagattttaaataaatattaaatgaaagcgtttactaaatacttaccattttaccaattacgtggaaaaaaaagtactcaccatcaccgcgtcacgactaatctgtaggcaacatataagacgaatagaagaaagtcccagacccagaataatgttattaatgcatacgtttttcaacttctctttactcaaattttaagaagctttctaatgggacggatgatgaccgtcaatgaaatatagttcttaatttctaatctacaccaaaactgtcaaagtttcaacggaaccaattgggataaaacaaaaaatattatctttaaataatttgttaaatctaccaagtatttctttaaaggtggttttaaggtaataatttatgacagtaatggctaaaaccaatctttttcaatcagacacatattggatgaaagattttcactgaaatgtaacgattttgttatatcagtatattggaattaatcatccaagtaacatcttatatgcattctcttttcttttcttgttgacagctttttcttattaggaaactaagtaatatttcattaatgtattattattcaacatagcaaaaggatagccaagattaataaaaaagaatgagaatacaaataaaccgcgatataatgactgattgtgatccctagtaaacgggtttgggagccactggacttgagaaatagaaaggttcaagggtgtagagggtcaagttgtcgtggctaaggaacttggagttgtcgggagagagtggagctccggtgacacctttgttgacattggtcggagtcttacacgtgaagaccggagagctctcgagtttcactttgcagctgctgatgttattcaccttgtgtgagagtccgtacgtgatgaagtagaagtatcccttcaagtccgttgggtagctagagattgtaaccttagccactagctttccatatgaatccacgacaggacacacaaccttaaccttgccccctgtcaagtacatcaccggtttggtaagatgtcatgggatgtaacacatataatgtgaaatcgaaaatgtagttgcaccttggatggggtaggttttgtagccagatttgcacaagatgaaaccttcgatggcgatgtcagggtttgattttggcaagtatggagtcttaaccggtgatgtgtaggtggttgttggtttgggaacgtaaggttgtggttgcgcatagtaatcggcagtagccacaaccaccaccatcgcgaggaggaggaggttagtggcggcgcctgtggatgccattgttagtagttgctcgtctgttgttggttgtttaaggtctgatcacaagacatggcctcctttatatatgtggaacacaatgtcgacagaagtatcttaagattatataggacaagtgtcaactagatgttggccggaagagaagagacataattgggtgcacgtttaaatttttatatttccccaccaaaacctaataatattgatcgagaaatgttttgataattattactcatcacactacaccaagctaggatccgaattgagaaggaaggaattactgttttgtggttaattcttgagtgaagtatttataaatacgtatttacatgcatgattagataaattaactaaaacaaatagaagaatttggtaggaattaatattacgccatgtaatatagtatttgatgtgggagtagaaataattaagaaagcgttatggttcaaatgataactgcaaattctatgattaattaacttattattatttataagttgttaatggtagttgcaaaaggttatagagcacacagtaaataaagtagatgatattaataaaagtttctagaagaacttggtcgtcaagcaaaaacagcaacaactctgacattgtctcactatataaaacccaaattctctttctcttttaggactcggttcaaaaacgaaaacgcaaatacgtcttgttctagtttggagttggaagcgtaaaaaacaaaaaacaaaaatg

SEQ ID NO: 11460 - DNA, 3000 bp, Unknown
  misc_feature (1)..( 3000): cDNA_ID_3409345_gDNA_ID_2214497_Annot_ID_183865 3000 nt of promoter + ATG
tgaaggatctatcttgctctttgtagaagaggtattttctgatatgcagccattgatccgttctgttcttgatggatacaatgtctgcatatttgcatatggtcaaactggatcaggaaaaacattcacaatggtaagattagagttgaataaattttgaagactgttaacatttgaagctagagaattttaatgtttccatttttgtaaattttctagagtggaccaagagatctaacggagaagagccagggagttaattacagagcacttggtgatctgtttcttcttgctgaacaaagaaaagacacattccgctacgatattgcagttcagatgattgagatttacaatgagcaagttagagaccttttggttactgatggaagcaataaaagatatcctttttcatgaatggatatacttcttaatgttttgattagatagagagagagagatcattttcatgtttcagtttcatattccttaacattttttggtacgttagagatcaggaatagctctcaaaagggtctaagtgtaccggatgcaagtcttgttccagtctcttcaacatttgatgttattgatctaatgaaaactgggcacaagaatcgagccgttggatcaacagccttgaatgatcgaagcagtcgttctcataggtaaaagacaaaatgttttcaagagcagcgagaacaaaaaataatcttcaagagtcttactcaatataacatttttcaatcttatttttttttgcagctgcttgactgttcatgttcaaggaagagacttgacttcaggagctgtgcttcgaggatgcatgcatcttgtggatctagcaggcagtgagagggtagacaaatccgaggttactggagacagactaaaagaagcacagcacatcaatagatcgctctctgctttaggagatgtgattgcttcgctagctcacaagaacccacatgttccttacagaaacagcaaactcacacaactccttcaggactctcttggtaaaaggatacaagtaatttagtcctgaatatttgcagctaaataaaaactcacctttttcttaacttgggattgcaaatatgttatatcaggaggacaagcaaagacattgatgtttgtccacattagtcctgaggcagatgcagttggggaaacaataagcactttgaagtttgcagagagagtagctacggttgagcttggggctgcacgagtgaacaatgatacttcagatgttaaggaactcaaagaacaggttttttttttctctttttgcattaactgaatctgatggtttcactttcttggttgatagtatttgattgtctcacacacatgggcttttgctttgtttacagattgctactcttaaagcagcactcgcgagaaaagaagcagagtcacagcagaacaacatcttgaaaactcctggtggctctgagaaacacaaagccaaaactggtgaagtagaggtgattcttcttttctcaagcaccttctctatgatttaaaatcagatctcaaagtggacattgttttctgagtgattgcagattcataacaataacatcatgacaaagaaatctgagagttgtgaagtggaggagattacagtgaactcaccaccttggccaccagtagcaagtccaggacaagcctacagagaggatgaccgaagtttcgggtccagcgagtgggttgacaaggtgatggtgaataacagacaagacgagatgagaagagtggagagtctttggggaggagccacaacagagaatggtattggtattctgccggaagatttttacaggagagatttggcttcagacacttcaagaatattctctgaacattcttacaacatcttcatgggaaacaacaacagcacagacgatctagatgcagccacaagtgactcatctgagccagatttgctctggcaattcaaccagtccaccaagatacctacaagaagcaatattgagtcaaaactcaagaaacccgtctcaaaacctataagaagtcctcaatccaggtaagtgtcctttactcggtcaaaaactaaatgaaacaacaatatagaaaatctttaacagtttcttttgaatggttccaaaaaaaatgcaggaacaactcaaacaacacggtttcacgtcctttggcttcacagaaggtagggaatggtcctcgtggcatgaaacagttcggtcctgctgatatgaagcggaaagctactaacgccagacattgaaggccactcactcacacggatacatacatacacactcacatggcttcttattggttttgatttgtttatttttcatccattggtttttattgtttcttcttctctcgtttggttgtgcgagcttttatatacataacacagacaaagacaatagctagacaatgcaacaacagtttcttcttgttgctctctttcttgggttttgttttacttttctgttctatgtatattcttccactagctgaacataaaaaatatgaaagatttgtttgttaactatttgcttgagagtttttttagtatattctataatgcttcaaatcagagacttgttgcatttcttctaattagttacaacttttgcaatctttgctagtataaaaatattttattagaaatatgtaaaatttgggaaagtattatttcacaacagaaaaaaaaaaagcatagtacttttcaaatatcgaccaaccttctgattcgttgaatccgtttctcgaatattataattttatttttgttgtttgccctatctttctttctccctctgctcttgtgcaacttgatccgtcgtcttctctcagctctccatctccgtcttccaaggtttttgtttttgctatttacgtttacagattcgtaatcctatcctggattgagaaatgcgtagtttgatgattcttcgctcgcctctttgttgactgcagttttactgtcaggtagaagaatcc

SEQ ID NO: 11461 - DNA, 3000 bp, Unknown
  misc_feature (1)..( 3000): cDNA_ID_2994744_gDNA_ID_2214497_Annot_ID_183859 3000 nt of promoter + ATG
ctcaagacgtctccgccgtaatcatgacgaacgcttcttcagcgccaccgccgccgcaggcaaaacgcagacttgggagaacgagtaggtccgctatgaaaccaaaaatccacagaacaaaaactcgtaaaacgaagaaaacgtctgcaccaccggagcctaacgccgatgtagctggggctgataaagaagcattaatggtggagtcaagtggagccgaggctgagctaggacgaccatgtgactactatggagatgattgtaacaaaaatctcatgagcattaatggcgataatggagttttaacgtttgatgatgatatcatcgatcttttgttggacgagtcagatcctggccacttgtacacaaacacaacgtgcggtggtgatggggagttgcataacataagagactctgaaggagccagagggttctcggatacttggaaccaagggaatctcgactgtcttcttcagtcttgtccatcggtggagtcgtttctcaactacgaccaccaagttaacgatgcgtcgacggatgagtttatcgattgggattgtgtttggcaagaaggtagtgataataatctttggcatgagaaagagaatcccgactcaatggtctcgtggcttttagacggtgatgatgaggccacgatcgggaatagtaattgtgagaactttggagaaccgttagatcatgacgacgaaagcgctttggtcgcttggcttctgtcatgatgatattgattgatccgttatgtaatcttttttgtgcattcacagtttgaatctattccacgtcgtatcatatcataaagtttaggatctaaatattagtccattagttaaaattatctaatgcaataaaacccatgggatgtttggattgtacgtaaggttaaaatattgcagtctttgctttagtggaagaattaaactaatatgatgtttttctttgtaacgtatttactattttcatgtaatttaataaagagggtacgaaatgtaggtgtacatttgtttgggctgtatatatttctattgacattaaatacgccaaattagaaaagaaaatctttagttggaagcatctattatatgtacctctttcggaatgtaaaatcacgtttaatatttctgaactggtaatcaatctcatctcctaaaatttaatacatatcatcattgtcaaacaatcggagtagcgacgagaactatcattgtttttctcttgtgatattgccggccaaatattattacctcaatcattttgaagcgagtaaacatagtttttttcccccttttttttgttcttgtacaccaacagaaagctgcatcacatctgcgaatcatcacgtgccattcaagtgattactggaacgtgacatgaacgaatcttcacattgagtgttccaactctcctttgtacgaaactccaaacaagtagatatatattcaattattatggatgttggaacaatcaaattaactcttgtccttcttatcgtagagacatgaaattaacccaattctgtaaatgagtagtaagtaatctatatatatatagttgacaacagataacactataatatatgcgtccttataatgttaatgtaattatcatggtttgagttaacgtatagaagcattgaaacttagttgcagaccgaaaatgatatacgatcttaagagttaagaatcttgaactcggcaaattttatgaaaaaaaaacaatttcaaccatttctaactagtgattagatgaccaatagcaagcatgcaccaacgacttcatttttataaacatcatagggacctagacatatgcattttgtgggcaacggcctacgcattaaatttgtgtttcgaagattaaatttatgaacagaaggcaacttgcaaatttgctatgtacaaaaaacacaaaggaaaagtttgtaaatagagacaataagggagaaataaaaagatcgctttctcataagtccgacttggttccacggtatctagaatgcccacgtgatgtcatgtacttttccttcttctctattctaatatgttgtttaacaaaaagaaaattgattgataaaaaaaattgaaaaatttcatagtgatatctaaagtttaaacaaattatctctaagaaaattgttagtatgccttggaatataatttctcaacacacaaactgaagaaattgcttttaaaactgaaatttatatggtaatggcatactaataaacagctaaacttttgtagttttatgtgtgtgtattaagagatttttcaaagtgaatgcaccttaaggtcatgttttgtgaggtttgatgttggagagagtctttgatccgctgaagaattggccaggtatcaaaatcatttcttaatttatatataaaatttcaactttaaaaaagaaacgttcaatctgagtctcttaaaataacaatgtgaatgttaacactttgtagatatcagactatcatagataagattgctacttaaaacattgaaatgttttgatgattcgttaagcctagcaatatatcatgtcgttattgggcttgtttacttacccagttacccgtattccagttataagcccattaatcagcctcgtacagttctattgttggtcagattattaatttttaaaataagggcgtattttccgaaactaaagaaagtatagggtcttcttcttttctctaattaggaaaaagactttttcaattgtcttgtccgtgaaattatgtggagagctaaaccattcatagcccgacatgtaacccagccacgtaattagaccactcgatcaccgttcgtattaatgtgattaaatcaacgattgatatcacgccacgtcattgtttttcttttttcctttgtatcttctgttctaagggaagaaataataacgagagaagaacgttttaataaacagagagcagagcacttgttctaaagatcaaagcttaagtgagaagcagaaaaaaaa

SEQ ID NO: 11462 - DNA, 3000 bp, Unknown
  misc_feature (1)..( 3000): cDNA_ID_2706561_gDNA_ID_2214497_Annot_ID_183858 3000 nt of promoter + ATG
attgaagtggaagacgagagagggttaacggcgttggaactagcgagggagattctgaagacgacgccgaaggggaatccgatgcagttcgggaggagaattgggttagagaaagtgatcaatgtcctggaaggacaagtgttcgagtacgccgaggtggatgagatcgtagagaaacgagggaaaggcaaagacgttgaatatctggtcagatggaaggacggtggagattgcgagtgggtgaaaggtgtacacgtggcggaagatgtggctaaggactacgaggatgggctggagtacgctgtagcggagagtgtgatcgggaagagggtgggagacgatgggaagaccatcgagtatcttgtcaaatggactgatatgtctgatgccacttgggagcctcaggacaatgtcgactctactcttgttctactctaccaacaacaacaaccaatgaatgaatgattgattttgatgattacattcttctcaatttgcttctttctcatatgtgttggttcatctgaccggttcggttggtacgtaccggtacattttcattttcttttaagatgtgatcttgatggtttttggccttttggggacactatttgattttatatccatgctttgaattttgcttccctttttggggagattcatgatgctggctgacttgctctttatcgtcccaggtttagagaatacatcgtcttaggcttttctttatctcaaaacccatttacatttaattgggcctatatatttcatataggaagagagtacatgtaaacccaatacacaacttttatttatgggtccgtttcttgtaacatttgttggtgataaaaacaacttctgaagagtgataatgtacaactgcactttgcgattaaggaaattatagaaagatacaaagtctgaataaatgactagaaaatatgaataagtagtatccattcttctctaattcaacatcatttttttttttttttttttttgacgatattcgatgcattgtgtctatatgagagaaattttggtttgtcagttaatggctagacttttattattatgagcatctagattttcagtgcatgtgatgttacgttgatgatggacataaggagacaaaaaggacggagttgatttagtacacattttcgtttctttgtgaatacaacgatcgcctatttttcgtttgtaattttcctcttaattcgagaggggcctctagtcatgtgtgttacttctagttatagtgacatgaacggatgagaaaagtttctttttgtaaacaacatgcgtacgtaaatcaaccaaatatatttagtataacaaccaaattactgttggacaaccaaccaaacaacaattatgtagattatagattagagaaaacaaggaactaggtcgattaaccgcgaccacattagccaagtcctccagtcgattaatataaattgatgccaaatatattagttttcactgggttttatattatactatcagaccacagaagacatcacgtcacagttaacaacactacatatttcagattttgtatgaaacgtaactaggtttatatatgagaccttttaaccaattaaatgatagtgatatggtttgtaacattgtattgtatgtattttagttgatgtgtgtggttggtaaggtataaattagctagtgttacgaaaaatgacttcttgctttttctttcaaattgaacgacgctctatttcacttaaataaaaccacatttagttatttcaatgacaacatactaagttttttcttacataaattaaaaagtaattttggtttcagtccaaatttttctagttataggaaagaaaatgaaagagttgctttcaaaatattgaatccattgtatttaattttgaatattgaatagtatgtactaaagtcttttctttagtagaccaatctaaatacgaacgaaagtaccaaaaccatacgaaacggcaaataatgacatgtggggaacacgtagttagatgagcagtaaatgggaaacatattttgatggttgtcctcatattttcgtgtatcgagttagataaggaaacctgtgaaaatttatttctcaaaagattccgtaagattccgtcgaatataattgatatttcagtattttggactggcagcgaatatggcagactatacagattgatcgtcttccggcgttgttatagacattaacaaactttaactactcgtttgcttaattaggaccatctgatgactttattctaagttcaaatttagatgacctctctttcttgaacatatacttgttacatacttaattcattgtgttattgcaataagtgaattgtgtggttatcactaacacgctgacgtaaatttacacgtgtttatatgaacgcacacgtgttttgtagctcgagcaaaagaccatctggtcaacggactaggaggatccggcgtaaatcctttatataatttttatcaaaattataagaagaacaaaaaatgtgcgattactatctgatctacgtattcacgtgacaaacaacaattaatttcaataaagatctactaactttagagaaaaaatcttatgtgttaataaaaaagtaacgtcaatgatctcggcacacactagaattagtgtctaagagaaccacgacgaacctgcacggaccgaccacgagtctctcgacggtgaataagccacgacttcagtctccttctaaaccaacgtggcgcttcttacaccacacacgtgtcatcatctccttctccctcgaacccgcaagctcttttaatccctttcaattaattaattaactatatatcacctgcccctatatatatctaaatcagtcactttttgcttctgttgtctgtcactcagtaacttctctttctcacttacacactctctctctctctctccattgccttgacttttgtggtcagtggaataaacacatataaccgccggagaaa

SEQ ID NO: 11463 - DNA, 3000 bp, Unknown
  misc_feature (1)..( 3000): cDNA_ID_3040052_gDNA_ID_2214497_Annot_ID_183857 3000 nt of promoter + ATG
aatgttctttaatttataatctagctagtataaatcacatatcctatttcatatgcgagatatgaacaacaaagtagtatacttaattgaatcaataataatccaaattaaatttatatggtttagatcatagagaacctaaatatctaaaactaacaaagtctaaaccacctcgattaattgggaataggatgataatataaagtctagattttgttttagttcaaaaatcgaaacaaaatcttactgtaattaacttactacgttcccttactgaagattgatcaccacacggtaaaaaaaacaccgttaaaaggttaaaccaaaaatattgctaagaagacattatttggttagttgaatgaaaaattagggaatgggaagtgtgaaacctacctaaaatatggctatgtagatgatattcattgaagagagagagaatatagaagtgtaaaaagagaaaatggtgccagctatgaattagaaggatcaaagctttctctgaagctgtcatctatctctctctttccttatagtgctctgtttctctccacattcacacactctccctctctctctccattattaaatcacttgttgttgtctttcttttttcaaaccttggaagcaaggaattcttttttgatgatttaatcgaaagcttcttcctccaaacaaacatcaatggcggtttatcctaacgttaatggcgataagaagcactggtggttcactcacagaaaggtataagcgatctctaacctggaaatacagttcttgattcaaagatcatcatcaatcatgttaactttttttgggttttctcagcttgttgataagtatataaaggatgcaacaactttaatggcaagtgaggaggcaaacgacgtcgcttcagctcttcatttactagacgcagccttatctatctccccgcgtttggaaactgcgttagagctcaaggctagatctctcctcttcctccgtcgtttcaaggatgtcgccgatatgcttcaggattatatccccagtcttaaactcgacgacgaaggatccgcttcttctcaaggctcttcttcctccgacggtatcaaccttctctccgacgcctcttcccctggctcctttaaatgcttctctgtttccgacttgaagaagaaagtcatggcaggcatttgtaaaaaatgcgacaaagaagggcaatggaggtaatataacttttaactctcttttttgttttacttattactttcaagcaaaacgcaatcgttgatttttaaacgctgtttcaggtatgtggtgttgggtcaagcttgttgccatctaggactaatggaggatgccatggttctcctacaaaccggtaaacgcctcgcctccgccgagttccgtcgccggagtatttgctggtccgacgatagcttccttctcctctccgaatcctcctctgcttcttctccaccacccgagagcgagaacttcacccatctcctcgctcacatcaagcttcttctccgtcgtcgcgccgctgcaatcgccgctctcgacgctggactgttctccgagtcgatccgtcacttctccaagatcgtcgatggccgtcgccctgcgcctcaaggattcctcgccgaatgctacatgcatcgagccgccgcttatagatccgccggtagaatcgcggaagcgatcgccgattgcaataaaaccctagctcttgaaccctcgtgtatccaggcgttagaaaccagagccgcgcttctagaaacggtcaggtgttttccagattcgcttcacgatctagaacacttgaagcttctctacaacaccattttacgcgatcggaagcttccgggtccggtgtggaagcggcacaacgtgaaatacagagagattcctgggaaattgtgcgttttgacaacgaaaacgcagaaacttaagcagaaaatcgcaaacggagaaactgggaatgtcgattattacggcttgatcggagtcagacgcggatgcaccagatcggagctcgatcgagctcatctattgctatgtctcagatacaaacccgatagagcctcttctttcatcgaacggtgcgagttcaccgatcaaaacgacgtcgattcggttagagatcgagccaaaatgtcgtctctgttgctttaccgtttgattcagaaaggatacaccgccgtgacagcgatcatagccgaggagcagaggaagaacgccattgctcacgctcaaaagattgaagaacgcaaaccggttgaaaaatccggttctattaagagaaccggaaacgctgaaacgaaaccggtaaattccaatgcgtaccaaggagtattctgtagagatctcgctgcggttgggaatctactaaccagggctggtttcaaccatccaatcccggttaaatacgaagcgctcacctgctaaaaaatattgaaccgaattttttatcctaccatgtcagccactggaaacgtcgtcgtttccgtagattcgtcttcggacagaaaaacaaatcattcagccgtcaaaaaagaaaataaaataagaaaatatatatacatttgatgtatgaatacaaatgaaacaatgtatttaggtttggaagattattccaactacaagaaaattttgtcactttacttttatcttcaatgttcgtctcctttgtttcttcttcatcttcatgtgcatataaaacgacagaagcttgatttgcacgtaaattaaaatactagtatcaaaactttttttttcattttattatcaaaattatctcttaagctattgagcactaatttattttttattattgagttctcgagatttgcctagaaatagtcgatgagtctggctcacgtcagtaatattcggatgagtccttatctataaagtttggctgccatttgatggtattgggatgattaatttaattaggcaaataaaatatagatggtgaaaactaaataaaaactattcacttgctgtataata

SEQ ID NO: 11464 - DNA, 3000 bp, Unknown
  misc_feature (1)..( 3000): cDNA_ID_2706557_gDNA_ID_2214497_Annot_ID_183856 3000 nt of promoter + ATG
aaatgaaatgagtatagtaaaatatcttctcgatatatgtcattataataacagatagattcccagtgctttaaatttactcgaaccatcctggcaaaatctgtgaccactagctttaaacctaacgtcttcatcaatgacagtgtctgatatatatgtatatgagaataaatttataatttctcccctgtacgttaacgttgtgtctcaatgtaattataattactattagctcacgtaatgagtgcaggattaagattattgaattcgaaatgaatatatttggactcacccatataacatatatatatatacaggtccaaataaatgcgggaggaaaattgtacctgtaaaataaccaattaatcatatttttctttctttcttgttgttggattatagtgattttcttatctaggaaaatagagttcccaattataagggctaactgtcccttgacagaaaaaaagaatcctatgagaagaaaattgaatgatatttgcatctatctataatcgtttcatttgattttactattagcaacaaatttatttgatttaatacaaacttcaaaggaagtcgaggcagaaccagaacatgtgttttttccacttatgcatttatttgtttatgatgagcctgtcctttttgtttttgccctcttcttattttatgtaccacaaactccatcaacgcgatatatcacgggtattctttttttccattgttttatacaaactattgtaactagcattatatatataaaaaaggactttaattttgtagtttttatacgtaacgactgttcatatcattgactttatacctttatacgaaacctttttcacgtatagaaaattatatctaagtttttattataaatgtttttgttattgttaacctactttaacaagaagaagaagaaaaaaaaataggaaaggttttgttgtaagaaattgtattaaaaaataacatatttacaacacgatgtgctgttataaaagcaaacttatgagtccgaatgtttttgatctgatttaaaataccaaaaactaaaaaagaaaagaaaacacacaatgactttaatatgtaaaatacaaacaaatgttgcaaaagaaattaagagagtttggtaatgccaaataggcaaaagaataatttatgtgtggcaagcaatgaacaaagctgagctgtacatgtaccacacctttcattcattggttaccatctaactgaaagtgacacgtgtcttataatcaacaaggcttttctgacgtggcagtgcatttaattatttgatttgacaagtttaggctatcgttgtcaaacaaattaacttaattgtatcaaaattgctcgcacagtacgtaattctattttaagtttaaaatcaacggagacactagtgtcctatttaattatctccaagtaaagaaaagaaaaaataaatatttgtgcttagttgattaaaaattaaaaagcacgattcttgtcttgagctccttacagcttacaagataattaagaaccaaatcactttttttggttaaaacaaatcataatgttagaggctagagatacttatgatgttaccatgcactttccccttaataactagctcacttaattacagtaataccatacagtaatatctacttgatgtgcctattgagtcatcgatccaatgaacttattcactgcttcaattttatgaaatatcattattttaacgtaaacatcattactagtgtttttatcatcaaattaccgatttagtgtaagtaaatcgaatcagtttttaaatactgttggacacatatatacatagacatgccaattactcaagtatcatgttggtttgcatatactctagttttaatcagggtttatattatttcaatttaagtaaacgcatgctaaatgatagatcatgaaatagaattagggtatccattgtttaatgaaatgaatcgttgaactggtataacatgcaaaaagataatgtatccactatgtaagcattataaggtgccgctataacaaaaatatccacatggtcaagactgaaacgtcgcattatcaaacaatattacatgctcaattgttaaattttctagccaaattaataatatcgtcatggaggaaaaaaaatagagttgaataattggcaatgatcataatggatatgggtttctcaaaaacgcaatcatatatcgtgcgacaaggttacagtaatatagatatcatgcttattccaaaacgacgactaaaacgtaaaagattacagaactagtaaacgagtatataatgttagggaatgttctttaatttataatctagctagtataaatcacatatcctatttcatatgcgagatatgaacaacaaagtagtatacttaattgaatcaataataatccaaattaaatttatatggtttagatcatagagaacctaaatatctaaaactaacaaagtctaaaccacctcgattaattgggaataggatgataatataaagtctagattttgttttagttcaaaaatcgaaacaaaatcttactgtaattaacttactacgttcccttactgaagattgatcaccacacggtaaaaaaaacaccgttaaaaggttaaaccaaaaatattgctaagaagacattatttggttagttgaatgaaaaattagggaatgggaagtgtgaaacctacctaaaatatggctatgtagatgatattcattgaagagagagagaatatagaagtgtaaaaagagaaaatggtgccagctatgaattagaaggatcaaagctttctctgaagctgtcatctatctctctctttccttatagtgctctgtttctctccacattcacacactctccctctctctctccattattaaatcacttgttgttgtctttcttttttcaaaccttggaagcaaggaattcttttttgatgatttaatcgaaagcttcttcctccaaacaaacatca

SEQ ID NO: 11465 - DNA, 3000 bp, Unknown
  misc_feature (1)..( 3000): cDNA_ID_2706553_gDNA_ID_2214497_Annot_ID_183855 3000 nt of promoter + ATG
aatccctaatttttcaaacactaataatattaaattctcagtttcttctttttactctgttattgtatagctttttgatccatacgttaagcaatatatgccttgttttattcgtttttattttattttttgaaatagatagttgttgcttatgaaaacgaggtagttagatttgatttagaattattataaaaaaatacattcggactctgacgttgaatgattatattagaatgaagacatgaattcaccaaacctcattcaaaaaaagaaaaaaaatcttaaaccgaatgataatttgtttcgtcgtcatttaaaatcgtcatcaatttatttttaagaaaagaaattaaaagaaagcatcggaaaaagagggccagacaccagcttggcaatgctttgctgaaaagttgtgaataatgcaattaaaaacgaacgaaaataaataaacaaatattaaagaaattcgaatgggaatatcaacaaaattatttattttttagttatggagacaagaatcgatccaaaggttgtactctggacttgaaagtaaaaataaaaagggaatgacaataattgggaaaacatgtgataaaagtctgaattcacagactttgacagtagtttatagtttcatgggcttttttttttcctctctcacaggacacagaatcttatctaataggagcagccgctaatatgcactgtgtttggcatgttacgattagcgttttagagaattagagtttgattgaagtgtgttttatatattgatagtgggacattacttataaaaagcacaaggatacaacaatagagacagtcacatgtatatcacataagtggatggtcctcaatgtgttgcttgtaggacatttgtgagtatgtcaaaaacttatttcacatggtacactcatagattagccccacttaggagtgtctagaaaaagattgggactaaagtcttgttggatcgaatatgattccaaacacgttaatatttccctaaaacccatttcgaaaagtatggaatgatgaacacattataaatattttggttgtgcgaaataggggtcaaatgtaaaggttaactttgtattagttgatggatagtaaaaggtcaaatttagaagtattgggccaaatagaaaacataatgggccaaacagaccaaaagaaagacaacggtgaacgggtcagaacattaaaacatacattttctcgctacaattaacgctatcaatatatttataaaaccatttgtcatttcacttccttaactaatcacataaatgatttttttttgtgtgtccctactttttttatataaaatttaaaccggaaagttacattggataaagctttaacaatcaaaaacgtgttggatatatatataagtaacaaatttacttcttttaataattataataatattacattaaaatataataaagcatatgttacttttgaagaaaactaattttggattaaaaatttcacttttattatatttaatatgtgatctcaaaatttataaaagattatcgtcaaacaagtttatatcataattttatggtatatatatttatcgtgtgaccattataatctaatctatggtgtatatggtatatatgactaaattaccgtatttggagaagtgaaaatgttgcatcgtcccacgactcttagaaaatttgttagtcaaatcattcttttaattaaaaatttagatgtaagtttaagtcgtgaatttacatctaaaattttagatttaagtggcgaatttcgcagccaaactattattttaccacagacatgcagtgttgaaatctaaggtagtatgtggattttttttttggcagcaaaacgtaaagttaatttatctttatatatattaaaatgtaatttatctttttatacatatatatttatacacatcatatcataagacatacatacataaatctctaaatatgtaaggggtgtcatcagttttgccttctgtttatggttcactcgatttcacattaattattcactcaaattcacaaaggttatttcgttttcattagcgccctttctctcgactttcttgatgaatctttatttcttctatgtgaaatctaattaagactattttcgtgttatattgatgtttaaaaatgaaaatcttttggtttttatgtttaatcattttcatgagtattaaatgtaatagatttaagttaaaactaatatccgaatgcctgagatattgtttcctaaaatgagatgattgtttttatttattaccatgatttgtttgtactaagcttcctttcccctttgcaatacataggatataaattcatacatgttcctaattttatttttgcacttgagtttatggttttctttggtggaagatctatatgtatctatatctatattattttactcttttcttcgtcgtcatttatagtatattatatatatgcacacacacacacacctatatgtatagctcaattctagataaaatatatagaaatggatcttgagaatcattttttttgtattcttttgttatcaaagggtttcgactttgctccgaggaagaagataatatgaaaagagctttttagggtttatcattctccttgactttgcaaaacgtgaaatgtaaggcactttgatcgttgtactttgttgctttttatacgtatcgcttcctacaataagttaacaatgcttcctcgtagaattgcaaaacatttgtggaccgtgatttacatgactgagctcttttcagtggcttctttgcagcagcttcttccttggaggactaatcaagacagaaatctgttcctctaaaaacgatcgccgttctaggtaatcttgccattcttgacgagtcttgatctttagaatcaaatttataagggatcacgagatacacgtattaattattattttttttttttttgctttttgtggttatacaagttcactcaaatgatg

SEQ ID NO: 11466 - DNA, 3000 bp, Unknown; identical to SEQ ID NO: 11458
  misc_feature (1)..( 3000): cDNA_ID_1831425_gDNA_ID_2214497_Annot_ID_183854 3000 nt of promoter + ATG

SEQ ID NO: 11467 - DNA, 3000 bp, Unknown
  misc_feature (1)..( 3000): cDNA_ID_2706551_gDNA_ID_2214497_Annot_ID_183875 3000 nt of promoter + ATG
taataagtcaactgaacacttgtcctcactggggaaaagaatctggcacaccaaaaagaagcttacaacttttagaagaaactgatgaaacctgtagcctgatcgatcgaacagtatcaagaggatgcgaaacaaacggaacatgcaaaaagatttctttccagagaatctgtaacacaaactaaacattgcaaaggatccaatggcatgtaaccgaaatccaatctataaccaatgctaataacaattgcatgttccactgtatgcgtaatcaaaatccagaggtaaccagatcaaaagattataactttcatcatgggttcagtaaaacaagttgggttcttttcacaaaaccataattttcaacgaacaaatctcaacaaaaatagctaaaaaataagaaaagaacagatgaaacagagtgagccacgcgacgaaattgatcaatgcggacgtaccggagaatatctcggtgagcggcattcacaatacgccgatcacgggagagattttccgacaaacggaaatcgagaggagctgattggaatcggtcaagcgttggatattgcggtggagacttgggagccatttatacacatctctctaatctctgcatgacacacttcaattattgtatcgaaacgaggattcaagcgtacatcgaccgacacgtgatcttatctaattggatgatttacttgactaactaggattaattaatctcgcctttctttggtaaggtttaagaatatgagacctcaattgcaagttttttttatatctttttactccctgaattttgtttcatttcatccttataagcattagattttaatttcaacctgagtaatattagttttatcatctcctcgagtttagatattatcataaacatatatcttactaaaaacctgacctgactaatttattttctttataaaagataaacatgataaatatgaagtgtgaacgcattatcaaatcagaattagtggatatatatgtattttgtttttttctgattaaaaaaattattgagatatatacaattgaactatgaggacaaaaaatatatatatatatatatatcttattatataaagtatggttttcaaaattgacttggcacagtgtcaagtcaaacgattagatgtttacatgtgtcattcaaaatttaacttttttattctttaaaaaaatagaaaatcttaaaaagtaaacaaatttacatatactaatttatatgtctatatatttataaacaattaacatttattcaacaaaagcaaaattaacaaatttgtctttaactcatgtaatcataagtgaaaatagaacactttgagaaaaatagcttagcttataggatttaacttttcaattattttcatttattaattttaactcatttaatattaatttgcatgatgtaaaattaacttacgagattacgtgggtgattggtttgtctgtaactgtagatttactgctgtagaatttttgttgtaggtgtgatgactgtagctgtaagttttattgctgtagaaattagactgtaggttttattaatataattattacttaaagaaattgggtagaaataagattttggttgtatgtatttttaaacaaaaaaatattatcgggtcgggttcggtttgggttcgggttcgggttcgagttatttatatattgaaatatcaaattttgtgtgcaaatctattaaattacttgaaattttcaaaaattcccaaaacaacatgagtagttttgcttgaatatatctaaaaatacacaaaaataactaaaatatccaaaaaaattctaatattttctatatataagtataaatataactaatatatacttatatttgagatatgtttgcatacctattcgggtttgggtttgagtttttcgggttttaaagtttatatccgttcgagtatttgaaaatttcgggtacacccgcctaaataggcggaccttatctagtatatatatacatttgaactatattgtttactttttagttgatttaggctatgtatgacattgacataaatctacctgttatttatcacgtgtaattcgtgtaaagtgtaaactagaaagttcaaatacgtatttgtttttgttctgttatataggattgtcatagttgtaaatctacaatttattacaacatgaataagtacacaagcaatgtaattggatttaattgctaaactctttacatggtcaatctaaatttgataagaaatacgtcacatattactaagactgatagtttttttgttgtcaccaattatttttgttaaattgacgaaaacaattccaaaaactcaaatgtacaaaatcatacagtctcacaaacatctcatagagaaagatataaatctcccatatgggaacgataacacgaggtcgaaatactattcgtaaaactaaaacgccttagttataaatcgttagttgtaaccgcggtcgagaatacatacagatccacgaaactactactacacatgctgctgaattggaatttggaaaagaccatcttctttaggaagagctcacccaatgagtgacaaaggtgtcggtggcttgttttctacccatatgtatacatcaaatggtagtttcattaacgtttggttttgagaaaagtaagactttggctagtagctaggttcgtatataataaactcttttgagaaagttcatcactggtggaaaatgttaaaccggttttttctcattttttccgccatgttaaccaccggtttaaaaagaccgtaacacattgaaagattaataagggtatatttgtaattacggtttgctggcaatttttaattattattttaattagagaaaatagagaagccctatcaatgtacatggtatatatataaaaggcaaaaccctagaaaacgatactcttcgactcagccgtcctttcgcagaaaccatttggagttggagctttggacgacgaca

SEQ ID NO: 11468 - DNA, 3000 bp, Unknown
  misc_feature (1)..( 3000): cDNA_ID_3410317_gDNA_ID_2214497_Annot_ID_183873 3000 nt of promoter + ATG
cgtcaccttcttccacttatggataagcctcttcttccatatttgatcagataactgaagacctttaatttgactgattaaacgaaactataatgaattaaagtaaaaaactcgcaaagtgaactttaaactaaaggtttatggatgattggtttgttcttttttatttacgaattcttggatatctaataaaagagaaacaagaagcaatcattatttgatgttggattggtgaaagaaaagtctttgtagtgtagctgtttttctttgttgctgatgaggtcagcgattattaggtccaaaactcgtgcgtcaagagaattgagtgagctctctcctttttttgaaatattgggcgaaggacactcctccatgcatttaagttatcaaaagcattaattagacgatggttcaataaatgagtgagcatttagtgggaaacacgagtgtgatacggacacgtaaaagcattaatgcatgtgtttatagatttggtgatgacttcattgtctgactctgtctcctctttttacaagacaaaagatttgttgctgattcatctctgcctctctggtctgtgtgacacacactgcctaattagtgttattctgtatctcagctcttgcttactagcttatcttagtacttagtagtaaaacattaatgggtcattatgtatatgtccaatgaatcaccactttaaacattaatggatcacttgctagcatcttcaattactatataacaatttaactagctatagtaagaccattaatctagagatcatatttacctatcctgagtccatgtgtggactgaggaggattatacattaatcatagaccatatatataatatacacaatcaactaatgaaagagggaggaatggtatcaacatagggaccttttttttttccatgttagagaaagttaggacaacacgcaaagccctacgtgcactctttcattattcctctcttcttttgcccccaacagtctttgacgacccaccttgcccttttgacccttctctctcacgcacatgtatgttattaattcaaatggttcttttatgcttcggcatttatcatcatgatatacatacatatcgatcgatagaggaaaaaaaaaaatcatttatgtagtagaaaatttacagatatatatatatatatatatatatcgtataatgtatatcaatatttgaatttgaagagtttcaatataaactgaaacaaagttaagtgtagattattattagtgaggaactagtggatatccagtttattttggtatataccggtaattcattctaatgaagtgaaagaatatggatactgtatttttttaccatgccatagagtagatgctagctaaagattagtcgtaagagaggtctaaggtcttgcttgtcaacgcgtgaccggcttcataggatcctagcaataagacaatatggtacgcctagcaacctagcacttatatatgtagagtttgtgaaatttagggcagacaagcccccacactaaaaaaacagtaatatggaataaaaaaaagctttcaaaacttagcagttattagacaaggtattgtttggccctagctagcgatcgtttagctctcttcactctctcacttttttagttcaacccttcttttgcgtgagatgccatcatggcatggtatggttcttttgccttacgtaaaacacactcacgccagcacacacacacacacacataacatatacggatgtgcgtgtgagctagtcttccattaatgcaatctttgggcctatatatacaaacctttccataaccaaagttctcatactacaaacgcccctcatgtgcttggaaatgcgggtgagaatctccatgttggagaagcagggcacgtgcaaaccaacaaacacgaaatccgtctcatttgcttatttgcacgtacttaacttctccaacatgagctcttcacccattgatgttatatatcccttaaaccttattgataatgtgtttttcgttgttcttgactagctcttcgttgtttgtgtgtatatgtgtgttaaatcatttgtgttcgacggttgattaaatctttatagttctcatatatgtaagtgttgctttggttattttgaaccttattgtgtgctgaccaaaatgtagcgtttctagatgggattgacggtgcacaatgcacatgaaactaaaagggtaatttcaagctctgtcttcgccatatatagttctcattgagctctttggcttgcattaattacgagagtgttttcgaacttgtggttgtatacttcactgcatggaccgttattcgtttcaaattacctacagagttatacatttagcttttgtgatggtttttgcagcatatgtaacgcattgatcagaggttcatatacacaaaatggaacgaatatatggagagtcccatgatatgtaagatcgaattaatcacttgtttgaagatcagaaactgtactttagctactttaatctctaattttgtcattttcaatttttattctggttttacaataatgttagttttatcttcatttttataaatctttttttatatgtgtaaaaatggcaaaatgataaaacataggaaacttataattgagacctttatgattttaaataaatttattattcaaaaattttaatttcaaattttatattaattgacaaaatatatttcaataaaactgttcagaactataataggatttaaaaatgttaagaaaattcgtatttttttccttcattagtagtgtttataatagaaaaaaatcaatcaatatttctaaagttgaaaataaaataacagtgctacgatatattttaaatacattttattaaaatatttgatctaaacagaagaaattgtgtggggaaaatcgacgagagcttatcaattcatctcacactcttcttcactctcttctctctacacacacacacacacacacacacaaa

SEQ ID NO: 11469 - DNA, 3000 bp, Unknown
  misc_feature (1)..( 3000): cDNA_ID_2706590_gDNA_ID_2214497_Annot_ID_183872 3000 nt of promoter + ATG
tctacttttcttgcttctcaatgttcaacagcattacaattattataaatatacaaaaagttaacgtagttttaatatattggccaaggttagtgaaatgttgtttaaaatagtatttcgatgtacaagttgtttttttaattcacgggtttgctcatacgtcggccgcagaaatagcgaatctatgggtattcacttaagttgccatgttgggtaatttatttgattattgtttaaccaacagcaataagagagagaaaagattgtattatgatttgatgaacaagataaggttgcccattggtcaaaacattccccaagttgggatatatttctattttcatcatccttccatgtgatgtgccgtgcggcaaatctagaataatgtactatcaaagttgtcaaaaagtaaaaaaacataccaaaatatcaaaaacaatctttgttagtttgtttcctttccgatggaatcaatttacgacacaccaaaataaaatgcaatctaggaccatgttttgttgtttgaatttcattcagttaataaaatgatgatacaagaaataatcattcacatttctatgaaacttcagatgaccactttctctttttaaaattttcttagaaaggatattggtagtcaagaaaaggcaagagagaaaaacatttacaaaagagttaggctgaaaatagggacatttgtgaaaaagtaagaattgattttacagaaaaaggaagtaaatacaataaaataaagaaggatagcgctactagtatctattttaaaataaaataattccctattttagtaaattatttatcaaaaacacaatttatttcacaaattattttataattaaggtcacttttatatttagtaaaattgtaaacaaatgatatattaagaataaatagtactagataaatctaagtagtttcgataattcttttttcaaaattttgattttgtaatatgatgtaacaccaagtcaaggtttatacattgagcctagtcatggccaacgcattcctctccctttcttcccctttattactttcttttttccttgtaacgtttttttgcctcacctttatttatttattttggttttctttctttcaagtcatttcgaatccaaaagattaaagaaaaactggaacaataacacgtaccagcttacttattagcaatcagaaagaaagacagtgactgacgccaatatcttagacattacaaagatgaggaaacccaacgtacgttcttcacttacacaatctaatcatagcgtgagaagatcttttggatcaattaaaggtattgacaaagagagttacccaaatgaaaaaggatcaaacatttgatctaatccaaaacccgataatgcgcaaataaaaaaggaaaagacaagttttgaaagtcgaaaggtaaccgattacttcagaaaaatttcaagtattactctagttcatcagaaatccaatttgccatttatgataactaatcaaatcaaatactataaggagcaaaagcagaactaaaagagagaaagattttctcctacttagttttcatatatatatatcattatagcaatgtaaaagtataatccataatagttaaaagataaactcaagtcatacacagactgaccatgaagtttcgtagctaggcttagaccttgaaacctctgctccttcttcttcctcttgctatctcaatttttttaccagtttgacgtacatacggtttggtgtggctgtgaggcacaccaggagctggtccaaagtgcttcactgcttcacgtgtgttcttaggacctctaagcagaacctgcaatcattacggaatgctacatcaatcgctactgcaataataaaaagtgaaaatataacccttgtaaactgagtacaagtggtcctcgagatagatattctctaattttcatcgagatagccttttaaacaaaggcttacaagccactagattttgaaagttaggacagtaacctcaaattccaatcatcatgaaacgagacatagtaactgaactaagctacatacgtcacgaacaagtaaacgattagcacaagtttccacatttcgacaactgaactaagagtgaaacaagaatgggatataccgtgttctctgaccaagtggggcacggaagagcgagctgatcaaaagtgaggcactctccaccagccttgtggatcctagctctagcgctctcagtgaacctcaatgcagtaactgtaagagccggaacatcttcgattctaacatcatcagtcacagtaccaacaataacagcaatctttccatcctaataaaatcaaacacacagagcattagttcatgagtcgccaccaagtaacataacatcgaactcaatgcagtaacaacctaaacaacaacaaaattcaaacctttccgtccatgtatcggaccagacgagagagagacagtggcgctttgttcactttgctcatgaacaaacgcttcaaaatcacggcattgaacttgctttctgttctcctcaccagatatcggttcgcctaaaaaaaaaaaaaatttaatctctgacggatttttagtcaaatcctcaaccttgacaaggagcttgagatagacatcgtcggatttaggctcagtacgtttcgtcttcttgctcttacctccggctatcaaatcgataccctaaaatgatgaaacacacagaagaagcccaaagtgagagtcaaaatctagaaagaagcagaaccgaagattgcttgggagtgaagataagaagtgaaactactaataatatgtatcagtttagggtttttgatgggctaaatatattaatcggcccactaataagaatattgggctaactgatgggcttattagggctttaggaggaacagagttaaacctcacttttttttattaattcgattttgggtggttccggctaataatcttctccgaattcgacggagagatttggtgaagacg

SEQ ID NO: 11470 - DNA, 3000 bp, Unknown
  misc_feature (1)..( 3000): cDNA_ID_3040033_gDNA_ID_2214497_Annot_ID_183869 3000 nt of promoter + ATG
ctcatctactgcaaacgaggatctaagcttacacctatccaaggtaaatctcatcatgtatatattgtaaactaggattggagttcaaggtctcgtctaagcttttgtttgatatatgtggacaggtgcagtggcgagagtgacatgtgagagaactgatgaatatggttacgaagcggaggatgtgacggtgcttagccaagcgacggatgcaaagggttatttcttggcgacgctttcttcgtcggaggtgaaggattataagaaggtgatcaagatcaaagagtgcagggcgtttcttgagctttctccatctgacacgtgttcttttccgacggagattaaccgtggaatcagcggagccattctccaaaactatcgtctcctagaaaacaagcttaagatgaagcttttcaccgttggccctttcgtcttctcctctgaggaaactcaggacaagtctatccccaacggctactaaatttaacaatgttttttttttttctttttcagtttctaatgccctaatgggtcatattggcccatatatcataatatatttatgtatttagtggctttttgattgcataactcacacatgcaacaattactgaaaatatactgaatatctattaatgcacgtgatttttaacttttatacacactatagataaatcaaagatcaaaattgcaatataattacggaatccaatatcttctaaatttgaaattgtgagtaagaatatatatttatgctgcataattatagtgtttatacagtgcataattacctccgtacgttaatgtagtttccaataagcaaactatcaaattattacactttaatgggacaagtgcttcgtataatagtgattattaattactacagaagggcacaagacaaaattgagagtcaaataattaataaacacaactcgaaagaaacttgccttaaatatgaagaaggcacatgctttttccgcgtaatttgaacaactagtgctagtgggttttgcttaacagcttaagtagatacattacacaaaattttgaaaattgagtcattaaaatatacaaattatcttaaatatgcttgacttttacaaaagtggtttaaattttcttgagttacgcaaacgggccaattcctttggcattgcatgaattttcttcacgcgttatactttcatatcaaataaaacgtcgccgttcagagatacactttttattcagtccttggacttggatatggaacacggtttttagttgatcagaagtcaaactcattgtcctatcttgccgaatttagaggatttatttaaaaaatattaaataaataacgcatgataatgataatttataaaaagtataaccaaaaaaatatctcttaaagaaaagaaagaaaacaaaatgtagttttgagtttattggttatctggatttcggaagatatatatgattcataattttttaggagttaaatttattttttaagactttaaaagaaaagaaaaaagttagtagacattgtttcccataaaaaaacaccaggtctcttaagtctcaagtctaaaccatttttccttttctggtcagataattctatcacacatgcttgaatttgaatagaaagacaacaaaagatggtttaaaaaaaaaaaaaaaaaaaaaaaaagacaacaaaagacaacactgggaacatatttacccaaaattcgataatggacaagctacattcaatctatgcttatgttttcgttgcatgcgaatgcatgttgtattacgtttatgagggttgtgctctacgatgtatactcttcacatgacaatatgtacactaatctacattgataatacatatatttgttaagttcaaatagcattatcacaaatgattaagctatatgtatgttgtggtgaattttccataaataatttgtcatctgtcaataaaattttaatgtatattctataacggaattacggtcagatacatgtgtaggtaatgaattaagtaagatattaatatctgtcgacaaataaaagcatcaatatgtatgtacattctcttaaaactgattcgatttcattgtgtcactgtgtatattgtatagaaacatatccaaatacgtatctcatgcctgtcctctaacttaaaaacaaaagaaaaaattatcataccagccaatttaatgcacaagattaactaattgatcaataattggatacgttacaactctataaaatcatatccattacgctttgggcaatggcaaattggcaatggaagtaaaatcaaaagttaaacaaatgaattaccatttgaaacactccaaattggtattcgtgtccaaaataatttttccaaatgtcccatcattctaaagtttttcaccttatgcatggaaccttcctagtatatatacagttctaaaacgaattttatttgcaatggtctatcagagattataatgtcaagatcttgactttttgctgatgtgtagtgtaatgtgctgttttaccaacatgttatatatataatcgaattttttcttgaaatgcctaacgttggttgacaattttatattacgaaaacctttccctgattatgcatattcaaattgcggtaacagaagtttggtcaaaatttgactttcatgtaaaaaaaaaaaaactcaattgaccttaaacttaaattaaacacccatttatatataattatcacggatggaatttactccttaattacagtgattatttatctaatttttggtgagagacagatctatgcgtgtgaatattatcacaatatggtatatatgttgaattttttgacaccgccacaattatatatgtagtatgtacacacacattatcattgacttgaatttgtatgtatattcaaattcaacgttctcaaaaccctatatatataatccaaaacatttagcaaaatatctccaaaccaaaacacaattaagctaaaaaaaaaaccaaagg

SEQ ID NO: 11471 - DNA, 1020 bp, Unknown; identical to SEQ ID NO: 11457
  misc_feature (1)..( 1020): cDNA_ID_3040056_gDNA_ID_2214497_Annot_ID_183853 3000 nt of promoter + ATG

SEQ ID NO: 11472 - DNA, 3000 bp, Unknown
  misc_feature (1)..( 3000): cDNA_ID_2706553_gDNA_ID_2214497_Annot_ID_133586 3000 nt of promoter + ATG
aaaaatccctaatttttcaaacactaataatattaaattctcagtttcttctttttactctgttattgtatagctttttgatccatacgttaagcaatatatgccttgttttattcgtttttattttattttttgaaatagatagttgttgcttatgaaaacgaggtagttagatttgatttagaattattataaaaaaatacattcggactctgacgttgaatgattatattagaatgaagacatgaattcaccaaacctcattcaaaaaaagaaaaaaaatcttaaaccgaatgataatttgtttcgtcgtcatttaaaatcgtcatcaatttatttttaagaaaagaaattaaaagaaagcatcggaaaaagagggccagacaccagcttggcaatgctttgctgaaaagttgtgaataatgcaattaaaaacgaacgaaaataaataaacaaatattaaagaaattcgaatgggaatatcaacaaaattatttattttttagttatggagacaagaatcgatccaaaggttgtactctggacttgaaagtaaaaataaaaagggaatgacaataattgggaaaacatgtgataaaagtctgaattcacagactttgacagtagtttatagtttcatgggcttttttttttcctctctcacaggacacagaatcttatctaataggagcagccgctaatatgcactgtgtttggcatgttacgattagcgttttagagaattagagtttgattgaagtgtgttttatatattgatagtgggacattacttataaaaagcacaaggatacaacaatagagacagtcacatgtatatcacataagtggatggtcctcaatgtgttgcttgtaggacatttgtgagtatgtcaaaaacttatttcacatggtacactcatagattagccccacttaggagtgtctagaaaaagattgggactaaagtcttgttggatcgaatatgattccaaacacgttaatatttccctaaaacccatttcgaaaagtatggaatgatgaacacattataaatattttggttgtgcgaaataggggtcaaatgtaaaggttaactttgtattagttgatggatagtaaaaggtcaaatttagaagtattgggccaaatagaaaacataatgggccaaacagaccaaaagaaagacaacggtgaacgggtcagaacattaaaacatacattttctcgctacaattaacgctatcaatatatttataaaaccatttgtcatttcacttccttaactaatcacataaatgatttttttttgtgtgtccctactttttttatataaaatttaaaccggaaagttacattggataaagctttaacaatcaaaaacgtgttggatatatatataagtaacaaatttacttcttttaataattataataatattacattaaaatataataaagcatatgttacttttgaagaaaactaattttggattaaaaatttcacttttattatatttaatatgtgatctcaaaatttataaaagattatcgtcaaacaagtttatatcataattttatggtatatatatttatcgtgtgaccattataatctaatctatggtgtatatggtatatatgactaaattaccgtatttggagaagtgaaaatgttgcatcgtcccacgactcttagaaaatttgttagtcaaatcattcttttaattaaaaatttagatgtaagtttaagtcgtgaatttacatctaaaattttagatttaagtggcgaatttcgcagccaaactattattttaccacagacatgcagtgttgaaatctaaggtagtatgtggattttttttttggcagcaaaacgtaaagttaatttatctttatatatattaaaatgtaatttatctttttatacatatatatttatacacatcatatcataagacatacatacataaatctctaaatatgtaaggggtgtcatcagttttgccttctgtttatggttcactcgatttcacattaattattcactcaaattcacaaaggttatttcgttttcattagcgccctttctctcgactttcttgatgaatctttatttcttctatgtgaaatctaattaagactattttcgtgttatattgatgtttaaaaatgaaaatcttttggtttttatgtttaatcattttcatgagtattaaatgtaatagatttaagttaaaactaatatccgaatgcctgagatattgtttcctaaaatgagatgattgtttttatttattaccatgatttgtttgtactaagcttcctttcccctttgcaatacataggatataaattcatacatgttcctaattttatttttgcacttgagtttatggttttctttggtggaagatctatatgtatctatatctatattattttactcttttcttcgtcgtcatttatagtatattatatatatgcacacacacacacacctatatgtatagctcaattctagataaaatatatagaaatggatcttgagaatcattttttttgtattcttttgttatcaaagggtttcgactttgctccgaggaagaagataatatgaaaagagctttttagggtttatcattctccttgactttgcaaaacgtgaaatgtaaggcactttgatcgttgtactttgttgctttttatacgtatcgcttcctacaataagttaacaatgcttcctcgtagaattgcaaaacatttgtggaccgtgatttacatgactgagctcttttcagtggcttctttgcagcagcttcttccttggaggactaatcaagacagaaatctgttcctctaaaaacgatcgccgttctaggtaatcttgccattcttgacgagtcttgatctttagaatcaaatttataagggatcacgagatacacgtattaattattattttttttttttttgctttttgtggttatacaagttcactcaaatg

SEQ ID NO: 11473 - DNA, 3000 bp, Unknown; identical to SEQ ID NO: 11464
  misc_feature (1)..( 3000): cDNA_ID_2706557_gDNA_ID_2214497_Annot_ID_133587 3000 nt of promoter + ATG

SEQ ID NO: 11474 - DNA, 3000 bp, Unknown; identical to SEQ ID NO: 11462
  misc_feature (1)..( 3000): cDNA_ID_2706561_gDNA_ID_2214497_Annot_ID_133589 3000 nt of promoter + ATG

SEQ ID NO: 11475 - DNA, 3000 bp, Unknown; identical to SEQ ID NO: 11461
  misc_feature (1)..( 3000): cDNA_ID_2994744_gDNA_ID_2214497_Annot_ID_133590 3000 nt of promoter + ATG

SEQ ID NO: 11476 - DNA, 3000 bp, Unknown
  misc_feature (1)..( 3000): cDNA_ID_2706569_gDNA_ID_2214497_Annot_ID_133593 3000 nt of promoter + ATG
ctttggttgcaccacaagtcaaatgcagtttatttgtgaaattccctgattaagctaaacaacaagaaaaaaaaggaaacgaggaagggaaaataaagttatagggaaaaaacgaaacatatgaatcgaaagtacatcttttgtgatggcagcaatttgtaattcccccatacgattacaatcatgtttgtgggatcgggattcatgtgatctcactgcggtgagtttaatttttttaatacatatacttcattttgtttttaggatgttttacagtaaataaagtcaatactagtagttagccaatatgcttttaattagtagtatgcctaatcatctcccatgtcgtgattccagttcaatagcggccataactgcttaaggatgatgtgtaaattttagctcacgtacgccgttatgtttcaccataatgctagctagaataatctaattcacacttgattataagattttcaggttaggtttcattttatgaaaagtgtgtagtcaagattttaataaaattgttattttcagagttgtataaatgttgttttgtgctaatctctttacaaaaatggaataaaagatggattattaggggaataaaagatgcttaaaaattaactttttttttaaaaagggcaaaggtattgaaacatcaaaactgtcatggaactatgattgaatctcacatgctctgttttttcttcatctttattctttctcctctattttgtttaatggaaaagccttttctaaaagtaattacagtaaatttgttatgtttacataatgattatatatcaatcgttctactgtttaatcaccaaaattgaattattttttatattagccggctcctatgaaatggttgcatttcgaaatttcaatttggataaagaaaaaaattctttaggttctaatttatttatgcttatttttttgtttggttaggcgtgaagtgggcgagacacggtcacgcgccaagtcagccgagtggtcgtttctcttcgaaagagagaaaatgtaaccgaaaccacgtggcagatatcgattcgttcgtgttattgacttgggtgacagtcggtcgtagcaccaaccacattcgattttctttgtgagacgtgtgtcctcgtcaaagacgctctacgtggggttacatgctaggctcggtttccgaaccttgattccgaggctctgatttgaattttttgaacgttgaagccaacccactttggttcgtctctctatcttcaccatattttccctttttgttttagcaattgttttcttcaatttgaaattccattcattataatatcaatatgtgcataatcggactcacaaaatatcgccgtcaatgtttggtggtgtgatgatctcatttgacaccgtaggatgttgactcgttgcccatatacattgtttattatcgatcgacatggaattcaaaaccgtgattatagatatatatgtcactaattaagtgcgttcgttatgttatgagaaaaaaaatgaaattacatgattaatcttgtctggagttacacactaagatacatgaactaagtactaaccatgcgttaatacaacatactcttcacagaggagttataagttttcttttaacatttctcgagttaccttttaaatgttctctagtaaagtcatgtatgaagataatttttttttacgagaattttacgtaataaatacaacgattatagtacatatttcttttaggatgggaaagaatcctatatatgttagttaccaaataatgaaatggacgttttattaggaaaaaacgagaatgaaatagtaattgggtaatggacctaattgcagtaactttcaactaactctatatttctcaagggataatttggaaaggaatgtctcgcctaacattcttcttctatataacaacattataaaataacaaatcattgcaattaattgttgtttcgctcaatactaaagtatcactttttataaaaaatttctttcttagctttgcttctaaagcattgcaaagacacatggaatcaactaattcacaactactgtgctactagctacatcgatttgtggaatgttttaatgacacatcctcttgtctcatatttacaatcttacatataagagaaaaacaattactaatactaatagaaaatacaaatgagataattatatagaaaaaatacaatttggagtaattcacaatactagtattaataatcacattacgatttccatggttactataataaaacaaaacacgatcccactaagttttattgaaacggaaaatctgaccattttccaagaaaagtatacaatgatcttggattcaattaaaaatgatactagtaataatgaaacatcagtagtatcatctagatctagtaataatatattaggaacaaatatcattgatgagtgatatataatccaatataagcaacaatagtaaatggtaacaaacttaaatagagagatataaatagtaaggtttttaataaaatccaaacggtagaggctaaccgaaaaagattctcgcgtgatcgtgaaaaaagaattataaagaattataaggtttggttagggagggaaaaaagaaacgaagcaagaggttcggaaagaatagagagaaggagaaagagtgaagaggacaacagagtataaagcagttatagctttacaaccttgtatttgtgagaccattcatggagcttatgagttctcaactttttttcttttctaattaaatctctcattaccttttaaatctatccccaaacttgttaaccaaaaaaaacagagaagaaatctcccaaatcctctttttttttgtttgttctaccgtttctcatatatctctctgtctccgatcttatttggatcggactagtgtcattggcagtgaagtttcattgactttggggttttcgcttttgatgctgtgagcttattattattgttattacggagttg

SEQ ID NO: 11477 - DNA, 3000 bp, Unknown; identical to SEQ ID NO: 11460
  misc_feature (1)..( 3000): cDNA_ID_3409345_gDNA_ID_2214497_Annot_ID_133594 3000 nt of promoter + ATG

SEQ ID NO: 11478 - DNA, 3000 bp, Unknown; identical to SEQ ID NO: 11459
  misc_feature (1)..( 3000): cDNA_ID_2706573_gDNA_ID_2214497_Annot_ID_133595 3000 nt of promoter + ATG

SEQ ID NO: 11479 - DNA, 3000 bp, Unknown
  misc_feature (1)..( 3000): cDNA_ID_2706582_gDNA_ID_2214497_Annot_ID_133598 3000 nt of promoter + ATG
ctcgtctaagcttttgtttgatatatgtggacaggtgcagtggcgagagtgacatgtgagagaactgatgaatatggttacgaagcggaggatgtgacggtgcttagccaagcgacggatgcaaagggttatttcttggcgacgctttcttcgtcggaggtgaaggattataagaaggtgatcaagatcaaagagtgcagggcgtttcttgagctttctccatctgacacgtgttcttttccgacggagattaaccgtggaatcagcggagccattctccaaaactatcgtctcctagaaaacaagcttaagatgaagcttttcaccgttggccctttcgtcttctcctctgaggaaactcaggacaagtctatccccaacggctactaaatttaacaatgttttttttttttctttttcagtttctaatgccctaatgggtcatattggcccatatatcataatatatttatgtatttagtggctttttgattgcataactcacacatgcaacaattactgaaaatatactgaatatctattaatgcacgtgatttttaacttttatacacactatagataaatcaaagatcaaaattgcaatataattacggaatccaatatcttctaaatttgaaattgtgagtaagaatatatatttatgctgcataattatagtgtttatacagtgcataattacctccgtacgttaatgtagtttccaataagcaaactatcaaattattacactttaatgggacaagtgcttcgtataatagtgattattaattactacagaagggcacaagacaaaattgagagtcaaataattaataaacacaactcgaaagaaacttgccttaaatatgaagaaggcacatgctttttccgcgtaatttgaacaactagtgctagtgggttttgcttaacagcttaagtagatacattacacaaaattttgaaaattgagtcattaaaatatacaaattatcttaaatatgcttgacttttacaaaagtggtttaaattttcttgagttacgcaaacgggccaattcctttggcattgcatgaattttcttcacgcgttatactttcatatcaaataaaacgtcgccgttcagagatacactttttattcagtccttggacttggatatggaacacggtttttagttgatcagaagtcaaactcattgtcctatcttgccgaatttagaggatttatttaaaaaatattaaataaataacgcatgataatgataatttataaaaagtataaccaaaaaaatatctcttaaagaaaagaaagaaaacaaaatgtagttttgagtttattggttatctggatttcggaagatatatatgattcataattttttaggagttaaatttattttttaagactttaaaagaaaagaaaaaagttagtagacattgtttcccataaaaaaacaccaggtctcttaagtctcaagtctaaaccatttttccttttctggtcagataattctatcacacatgcttgaatttgaatagaaagacaacaaaagatggtttaaaaaaaaaaaaaaaaaaaaaaaaagacaacaaaagacaacactgggaacatatttacccaaaattcgataatggacaagctacattcaatctatgcttatgttttcgttgcatgcgaatgcatgttgtattacgtttatgagggttgtgctctacgatgtatactcttcacatgacaatatgtacactaatctacattgataatacatatatttgttaagttcaaatagcattatcacaaatgattaagctatatgtatgttgtggtgaattttccataaataatttgtcatctgtcaataaaattttaatgtatattctataacggaattacggtcagatacatgtgtaggtaatgaattaagtaagatattaatatctgtcgacaaataaaagcatcaatatgtatgtacattctcttaaaactgattcgatttcattgtgtcactgtgtatattgtatagaaacatatccaaatacgtatctcatgcctgtcctctaacttaaaaacaaaagaaaaaattatcataccagccaatttaatgcacaagattaactaattgatcaataattggatacgttacaactctataaaatcatatccattacgctttgggcaatggcaaattggcaatggaagtaaaatcaaaagttaaacaaatgaattaccatttgaaacactccaaattggtattcgtgtccaaaataatttttccaaatgtcccatcattctaaagtttttcaccttatgcatggaaccttcctagtatatatacagttctaaaacgaattttatttgcaatggtctatcagagattataatgtcaagatcttgactttttgctgatgtgtagtgtaatgtgctgttttaccaacatgttatatatataatcgaattttttcttgaaatgcctaacgttggttgacaattttatattacgaaaacctttccctgattatgcatattcaaattgcggtaacagaagtttggtcaaaatttgactttcatgtaaaaaaaaaaaaactcaattgaccttaaacttaaattaaacacccatttatatataattatcacggatggaatttactccttaattacagtgattatttatctaatttttggtgagagacagatctatgcgtgtgaatattatcacaatatggtatatatgttgaattttttgacaccgccacaattatatatgtagtatgtacacacacattatcattgacttgaatttgtatgtatattcaaattcaacgttctcaaaaccctatatatataatccaaaacatttagcaaaatatctccaaaccaaaacacaattaagctaaaaaaaaaaccaaaggatgtctcagaaactcatgttcttgttcacccttgcctgcctctcctcgttaccatctccttttatctccgcccaaataccggccattggaa

SEQ ID NO: 11480 - DNA, 3000 bp, Unknown; identical to SEQ ID NO: 11469
  misc_feature (1)..( 3000): cDNA_ID_2706590_gDNA_ID_2214497_Annot_ID_133600 3000 nt of promoter + ATG

SEQ ID NO: 11481 - DNA, 3000 bp, Unknown; identical to SEQ ID NO: 11468
  misc_feature (1)..( 3000): cDNA_ID_3410317_gDNA_ID_2214497_Annot_ID_133601 3000 nt of promoter + ATG

SEQ ID NO: 11482 - DNA, 3000 bp, Unknown
  misc_feature (1)..( 3000): cDNA_ID_2706594_gDNA_ID_2214497_Annot_ID_133602 3000 nt of promoter + ATG
tggtttctgcgaaaggacggctgagtcgaagagtatcgttttctagggttttgccttttatatatataccatgtacattgatagggcttctctattttctctaattaaaataataattaaaaattgccagcaaaccgtaattacaaatatacccttattaatctttcaatgtgttacggtctttttaaaccggtggttaacatggcggaaaaaatgagaaaaaaccggtttaacattttccaccagtgatgaactttctcaaaagagtttattatatacgaacctagctactagccaaagtcttacttttctcaaaaccaaacgttaatgaaactaccatttgatgtatacatatgggtagaaaacaagccaccgacacctttgtcactcattgggtgagctcttcctaaagaagatggtcttttccaaattccaattcagcagcatgtgtagtagtagtttcgtggatctgtatgtattctcgaccgcggttacaactaacgatttataactaaggcgttttagttttacgaatagtatttcgacctcgtgttatcgttcccatatgggagatttatatctttctctatgagatgtttgtgagactgtatgattttgtacatttgagtttttggaattgttttcgtcaatttaacaaaaataattggtgacaacaaaaaaactatcagtcttagtaatatgtgacgtatttcttatcaaatttagattgaccatgtaaagagtttagcaattaaatccaattacattgcttgtgtacttattcatgttgtaataaattgtagatttacaactatgacaatcctatataacagaacaaaaacaaatacgtatttgaactttctagtttacactttacacgaattacacgtgataaataacaggtagatttatgtcaatgtcatacatagcctaaatcaactaaaaagtaaacaatatagttcaaatgtatatatatactagataaggtccgcctatttaggcgggtgtacccgaaattttcaaatactcgaacggatataaactttaaaacccgaaaaactcaaacccaaacccgaataggtatgcaaacatatctcaaatataagtatatattagttatatttatacttatatatagaaaatattagaatttttttggatattttagttatttttgtgtatttttagatatattcaagcaaaactactcatgttgttttgggaatttttgaaaatttcaagtaatttaatagatttgcacacaaaatttgatatttcaatatataaataactcgaacccgaacccgaacccaaaccgaacccgacccgataatatttttttgtttaaaaatacatacaaccaaaatcttatttctacccaatttctttaagtaataattatattaataaaacctacagtctaatttctacagcaataaaacttacagctacagtcatcacacctacaacaaaaattctacagcagtaaatctacagttacagacaaaccaatcacccacgtaatctcgtaagttaattttacatcatgcaaattaatattaaatgagttaaaattaataaatgaaaataattgaaaagttaaatcctataagctaagctatttttctcaaagtgttctattttcacttatgattacatgagttaaagacaaatttgttaattttgcttttgttgaataaatgttaattgtttataaatatatagacatataaattagtatatgtaaatttgtttactttttaagattttctatttttttaaagaataaaaaagttaaattttgaatgacacatgtaaacatctaatcgtttgacttgacactgtgccaagtcaattttgaaaaccatactttatataataagatatatatatatatatatattttttgtcctcatagttcaattgtatatatctcaataatttttttaatcagaaaaaaacaaaatacatatatatccactaattctgatttgataatgcgttcacacttcatatttatcatgtttatcttttataaagaaaataaattagtcaggtcaggtttttagtaagatatatgtttatgataatatctaaactcgaggagatgataaaactaatattactcaggttgaaattaaaatctaatgcttataaggatgaaatgaaacaaaattcagggagtaaaaagatataaaaaaaacttgcaattgaggtctcatattcttaaaccttaccaaagaaaggcgagattaattaatcctagttagtcaagtaaatcatccaattagataagatcacgtgtcggtcgatgtacgcttgaatcctcgtttcgatacaataattgaagtgtgtcatgcagagattagagagatgtgtataaatggctcccaagtctccaccgcaatatccaacgcttgaccgattccaatcagctcctctcgatttccgtttgtcggaaaatctctcccgtgatcggcgtattgtgaatgccgctcaccgagatattctccggtacgtccgcattgatcaatttcgtcgcgtggctcactctgtttcatctgttcttttcttattttttagctatttttgttgagatttgttcgttgaaaattatggttttgtgaaaagaacccaacttgttttactgaacccatgatgaaagttataatcttttgatctggttacctctggattttgattacgcatacagtggaacatgcaattgttattagcattggttatagattggatttcggttacatgccattggatcctttgcaatgtttagtttgtgttacagattctctggaaagaaatctttttgcatgttccgtttgtttcgcatcctcttgatactgttcgatcgatcaggctacaggtttcatcagtttcttctaaaagttgtaagcttctttttggtgtgccagattcttttccccagtgaggacaagtgttcagttgacttattaggaggtggggtttgaataagttacaatg

SEQ ID NO: 11483 - DNA, 3000 bp, Unknown; identical to SEQ ID NO: 11467
  misc_feature (1)..( 3000): cDNA_ID_2706551_gDNA_ID_2214497_Annot_ID_133603 3000 nt of promoter + ATG

SEQ ID NO: 11484 - DNA, 3000 bp, Unknown
  misc_feature (1)..( 3000): cDNA_ID_2706643_gDNA_ID_2214498_Annot_ID_133606 3000 nt of promoter + ATG
acgtctcaagcggaagaatcttttaaacattttatttctttaaaataggttaaaacttttaataattttttgttttcttcttttatatactttctagaagctaatttttgtttttttcgataattgaaatgtttgactttctagacaatattcttgtggaatcgtgggaggttcgggtttacgattattacgagttctatttctgcataattttttccctctggttttgtattttttatatgattacactataatctagtaagtaggtatgaaattttataaatctatataattcaaatccacattataataatgataaatcacaaatagaatttcgcaaactttttaccaagaaaatccttattaaatatgtaaggattatgaaaatctataacaaaatatcattgggattggctatagcgtaattaactaacactatctgaatataatggacgtttagaaattctatgtatacttttttcctcacttgcgatgtgtttttctcgcttatccaaatggactgagaaatagacttattgatcgattgactgatacttaacataagataagtacaaatgggaccataattaatcaagataacaaatataatattttaaaattacagatatgagccgacaagtaaccacaattacaaacgtgtatatatgcatgtgtgtcacggtggtgatggtgatgatgcatgatgatgatggaactacacatgacacatcaaaagataacccgcatcatgtattcatatttgatcaagttggcattataaatcaactaagaaaaatattaaatctgagctgcctcttacatagaaagagtttattaagatgatcaaaacagagaatctgcaagtacttggataacttgagaagatttgccgagcgaacacaaaagaaggaaggggttttgatgtatggagatgaccctcaagttattaacgtcatacatttacagacaccaacttggtggttggttcttgtaatataacacacagagaacataggaacaagaacaagaacaatggctagtcacatctaactatcatattcgatagtttctacaacggtcgatgatggtgtttctatcctcgttagaacttcaggcactccttcggtatctcttactatctacgagaaaaaacaaccaaaagcggataaaactcggttagtgcaacgatctcagtctctctcaccattcttaacaaaatattcaacaaacttacaagaatctcttcatctagataagatatcatgaaaaatctttcaaaggatccacctgaagcaaacatcactagttggttcagtgcagatttgagcggaaaatggttaaatgtataaaaaatggataaagtagcttactaaggggaattctcagaccactggctagagtatccttgataagagcaggaagctgctgcaacgttgtggcagcttgtcccaaagcgctttttagctgttcaggaactgcttcttcaatgactgttggagtttcaagcataccttcaacatattcttctttcaatctcagtggtccctcaacagtcaattttgatgacagaatgattttgctttctatctgcatttttctgccactgtgagaaacctcctttgtgattctgagtaaacaaataatcaaactttggaaaaagggtttgagtgtgttaccgagttcaaaagtttgatatttgcagtcgcctttgcgttagcatccttgatcagtatctccattcttgataaattcgccaatgttgaaggaaacctcctgaaacaatacaatcagatggcaaaacacttaaaacgttgaataaagtttggtgagctttaagatgagaaaatgataagtacagactcgaatataactcgagcagcgagtaaaccaggacttccagatccaaaccactcaaaattccacctgccttcgaaacaaggagacctggaaagctataggaaccagttaaaagacaattatcctaaaaccgaagcaaaaaattgtaaccaaaagattaaagaaggacctacgtggttggtctcggagttggattaagccgctctagactcgtaatcctctcattaacatcgatcctttgcatattagttgttttccctgtaactaaagcctcaaagcctccagcatccttcaactgtacatagatggcttcaggacaaaaatagtttgacagttccaaacacacagagctctgttcctatactaagaaaaactcaattgagctgaaacatgatcattcaatttctggactttgagaaaaaaattctcttttgttatctgcaaaatctcgattacatctaacaaatacacaattcacctaaagtcttcccatttatcctcagcttacgacagagatagtaaaagagacacaatttcaaaatcagagtaaaattgaagatctaaacaaatcatatattcacataacaaccaagtaattcaaagagtttataaaagtgagagaagttatacagcgagaagtagcgattccttagcagaaaggcgctccatttctctggcgtaaaccaaaggagatccttgaactgtttcctgcaccattgctcttaaaacccttctccggcacgaattcttccaaccctgcttcaccaccggaacattgagacaaaatctcgacggtgacgctgaggttgaaaaaaccaatcgaaccgcagacgtaccaggaaccgaaccatgtatcaacgccattgaagaagaagaagaagaagaaggtgaaaaacgaaagattgagaatttgtttgctttgagcaaccaaacctcaggaaaaaagagttaaggtgggagtgtctggttcaaccggtttatatccggttcaaattaaacctcttacagttaaccgggttttgtgtttggttcgattgttcataaaagaaagaagactcttgtcgtcgattagtgccaaagttgaaagttgaaaccttttctcagaattttctgctcagttctgagtttttttttcccgccatg

SEQ ID NO: 11485 - DNA, 3000 bp, Unknown
  misc_feature (1)..( 3000): cDNA_ID_2706628_gDNA_ID_2214498_Annot_ID_133610 3000 nt of promoter + ATG
ttgggaatattcttctttttattttattttattaaggaaacgtcttcttttattggcaagaaaaacaacaacaacgacaacaaacaaagaaatatgaaagaaagaaatcagatttatgaaatgaaaatccctcaaaagaatttatttcatcagaacaaagcattaaaagaactcaaaagcatttcgtgtgaacaatggccggtccattttcttcatactcagctttagtaatccacatctgcatatatatacatcacaacaacttgacattacaacatcccaaaagagatacgcacgttaaattaataatacaattagtattatcttatttacctgttcatatgtgcttagagaagccaaaatggagcctccaatccaaacactatatttcctttccgggggagcaacaattttaatcctcatattagcggctgcaagcgcattgatctctttggtcatcctctcttcaatccctcggaacatcgtcgtcccaccactcaacacaatgtttccatacaaatccttccttatatcatcatcacacttcatgattgaattgtaagtcttctcatgaataccagaagtttccattccaatcaaagacggctggaaaagaacctcagggcacctgaatctctcagctcctatcgtgatcacttgaccatctggaagctcgtaggttctatcgattgccgaactctttgtagccttctccatttcttgctcgtagtcaagagctatgtaaccaaattgttctttgatgtctcggactacctcacgctcggcggatgtgtagccacgttccatcatgattttcatgaggtagttggttaggtgacggcctgctaaatctagccgcaagattgcatgtgggagtgctgaaccttcgtagattggaactatgtagctcacaccatctcctgaatccaacacagtacctaaacacaaataaagggaacccattattgattgtttcaaacaaaacaaaaaaatcacatttcaaggttttccaaaaaatatttttgttaagtgcaaacacaaacgccaaaatcgaccaaataaatttgcattccgattgcgtttggtatttatcgtgtatattaaccaaaacaaattgcttcaaatgttttaaagtcgtaggttcatttttaaaacatcaaaacgtaaaaactaatattgccagcaaaatccagctacatttttgactacgctgcaagtaatgttttttaaaagcttgtaaaaactttaaattgctgccttcgaatatctactgtagtaaagcctctctaccgacgttgtagttggtactaccatgcaagcaaaaaaaaccacaaaatttctagcttacaaactaaaaatttgaattgtgaaatttgagttgcagttactttacctgtggtacgaccactggcatggagggagagagcggcctgcataccaatatacatactaggaacagcaaatgtctcaaacatgatctgagtcatcttctcacgatcggctttcgggttaagaggagcttcagtgagaagcacagggtgttcttcaggagccacacgtagctcactgtaaaacgtatggtaccaaatcttctccatgtcatcccaattgctaacaacaccgtgctccattgggtagtcaagtgtaagtataccgctcctggcttcagcgtcgtctcccacaaataaatcgttctcattcattcctaccatccctcccgtatgtggtggacgacccacagtgcttggaacacaacacttggtgcatcttctccagcatatcctgccttcaatatgttttaccaatcattagatctgccacgttgttttataatgtgcattaattggttgtttacttttacattttgcatatttttccgaatcaatactcaaacatagaagaagctcactagaaaaaaaaaaaattgtattgttaaatgaaaattgaaaatagaaagtttctttgttgacattttgactttgttataattatatttcaaaattatgatatttttaaatgtaaacgcaatacaaatgcgtaaattgtgtttggaaaacaaacgacgcatcacaaattaataatagagagtgttcttattttctccttaccttgatcattccagttccattgtcacacacgatagcccggttttcgccctctacttccgacattatctagagtataacatatcacgttcacagtttcaacaaatttgttattcaaatatcatcattaaaaagttctaacacagcattaacataaaagaaactgtaaaatccatggctcattagaacacaatcgttgtcattcctcgaactatatccaaactaaaacaaagaatcaatcagttaacactactcatttcacatagcagatctaataagtataacaaagaaagtacaaacacaaaagcaagatcccttttatcatcttttaacatacacatttcaaaactaaacatcaacaagaacaacgaacaataaagtaatttgatataaatctcagtaaacttagctacaaaaaaacacagatttaacatgcatgaaatttccttgcgtgactctcaccccaacacacacctcttactgttttagcggtgctactcggaacagtcactgtcgtctcgtctttgttgataagaatgctgctgacagctcaaaaaagcattcagggatattattgtttacttcgtctcataatggcctttttatcgtcgtctttattatatgggccgaaccaaaagcccatatttctgctcttatataaattgggaaaaatatatactgtaaaacactatcatatcgacatgttgggcggacttatcgaacaaatgacactggctaaggcccattaataagagtcaaaacacaaaattgaagcatctcaatatcggaagaacgacgaatcaaaaaatcagaaagaagaagcatcgtcgtctcttttcttctctccgagtagcttaagctttcgtcgtcgagctctttcccgcttctggcgatg

SEQ ID NO: 11486 - DNA, 3000 bp, Unknown
  misc_feature (1)..( 3000): cDNA_ID_2706624_gDNA_ID_2214498_Annot_ID_133613 3000 nt of promoter + ATG
acagatccaaaacccaaatttgccaccatttatatatatatatatatatatacatataactaataataagaaatttagcaagtatttgatagtatttgcatcagcataaatcaaaattttctcaaaatgtctgtctagctatttcagaacctagacgtagttgtaaaactagtcaggggttaggagatcgatcaggtctttagtttcagggttaaaccaatgcagccaaacaagtggaaaccactttcactaaataaagctaaacaaaaagaacaaatcaaaacctaaacctataaaataatactatactacagtttacacagactctgatggatgatgtctatgactccgatttaacttttcatacttttcattataacgaatagatctttctttagatattgtataggtacaaattatcaaaaataaaaaaaagaagtccaaaaataaaactaatttggctttaactagcaaagagaaacaaacaaactcaaaatcaagataataattagaagaagaaaaaacccatttttgtatatttaaacatgagagaaagaggtttaacaaataaaaataagagtactgaattcatttatagggttgcttgcacatctgccgacaccaactagttcccttgaagtgtcacatcttttgttgtgttccaataactgtactgctcatatttcagtctttaatacttttaaccttttcacgatcagtataaaaaaatttcttatcatattcgtcgttactctttaactaactacagtatagaagaagaaactacctatttatagaactctgatctcctcggcagtttcctattggttaccactgctgagtatatagaatctatggagaatagtatttttaaatttagaatgttactattaacttaagtacaaatcaatatcagattatcaaaattggtatagttggatgttctatggctatggggagtctgaatattgctccctggtctcagatagatgctttcaaaatttaatactacttaaatttaaacatacatcgccacatgacccatcactatcacggttacttatggatatccaacattaaagagtaccacccaacactaggactcttataaaacacataaactccaaaattttatacctaatatccctggacaatatcaataaagttttattggtttcttttttgcaacaaacgcaagagaaatttttattcgtcacggattgaggttttacgcacaccggtacaaaagtgtctatgaagaaaataacaaaccatgcaaacgtgtttaacgggctttacaaatatgttcagaaattactcgcatgcgagattaaagaaatacaaaaaacaagtttggaaccggaggattgcaattatcatctattctatatcgcgtgtgtgtgtgtgtaaaattatgatttataatgtatcgaggtcttagattttaccttgcgatcctagagtttcgtacatatatatcgactattcaagttcttctttcatctttttgtatcttaataagttccacaaatttcgacgatagagaccatacatttgttgttatcctctactcacgaagacaaccagtctaacgttattgcataagttccacgtaaattaaaattgtgtttcttttgttaatattgaaaataggttaaaatgtcgccaaaaaataagctttgaaaacttgaggtaggaaaaaatcatggttcttttgcacatgctccggaccaatcatgtttactactaaaattcttactgcttttataataatcatctcgactggcgcgtgtagaactctagatgaatgccaagtcttattttctaattataaacgcaaataataaaaaggtttaagaatatttaaatttcacatgacaatatgacacaataaatactacttgaaaaatgatctttgaaatttcatattttctaatcaaaaacaattccttcatattttgaaatataatcgatctctcatatttaatttccaattagagaattatatccacatgatttgctttcaaatatgtctatttaacgtgtacgttgaacttgaacctatttattatttaattcattcccaaactaaaaatattttattttctaaaaaatatagtcgtaagcgtacttgtgtaaatatgttctaaagttaataatgggtttagacatttagtagaaatatatattttttggtttttggtttggttggttcggataatcaaaattttcagtattcgactaaaatacatttttgagttatatttctttacttaattttcataattgtaagtatttaaccttgtgtacgattaaaaaaaaaaaagtattttaaccttgtgtatcattcataatgtaggttttctttccattttgaaaaaaagttttgatattggttcgcattcatcagttgaaaaccaagtcaaatttatggtagattggcaatggacaaacacaaaatatcatctccatttattgccaacctcataatgccaaatggtggaccaaaaggaaaaacatgcatttatttattctcttgacataagagaaaatgcatttaacttgtcaaataattgcaaggaaaaactctataaaaagatagaaatgtgaacagtataaagtaaataaagaaatatgtgtacatgaaagacctctccaatgttcacttgctccagtttctccaagattagaaactgctacgtctctctctatagctccctcgttttgctatgtggtaattaacaacagacaacagtttttgtttgtccgtaccgttttacttactctctcactgtctttgtctattaccactctcgtctctttcttttttccttctgttctgtttctctctctaaacccaaaacagtcaaaatcagggaagccgaaattttctttgctttcttctcctttggtcctttctttaaacccgagacagttaggtttgtgtgagagagagaatgatgagtaaaaccctttctgtctgagtaagaggaaaccaac

SEQ ID NO: 11487 - DNA, 3000 bp, Unknown
  misc_feature (1)..( 3000): cDNA_ID_1807579_gDNA_ID_2214498_Annot_ID_183905 3000 nt of promoter + ATG
gccctcgattatcatcaagaagatgaatttcgtcgattataagaagcctcacaagctgtgtataagtgcgatctccagatttcctggtgatgatatcccacttctctggcgttgtaacaattatctgagtctctttgatttcttgcccagtaagggactgatccccactgagttccttcacagtaactccaaaatccttcaaacgttgagatagactatccacgacctcagcaacaagggctttcattggtgcaacatagacaattttgtaattaccatgattaaacgttccaccagggttcatattcaatccaagctggtgcagtatggtgagcacggcaacattggtcttcccagcaccagttggagcacaaagaagaatgttgtcagccttaaaaagagcagtgccgtacactttgctctgaaccctattcaactgctgcattcccctaaaagctggttgggcccactctggcaaatcgctaattttcacaagcttttcattactatcaaactttttagaaacccacggcacatgaacctcatcaaattccttgccacgtattctgaaagagcgatcaggaagctcacacttgttattctccctcgtgaaaccaccttggttaaaagcaaggctctccaggtccatcacctgacgctggcccttcaaccaaccattctccaaatctaaatcatcaacatctctcatgcctctgtctccgtcaacaccagaatcatcatccataagatgttgagcttcttctttgatatctttctcccgtttctcctccctttctttggctgttgctcttttggcatgcaactccttaacaattgctgccaactctgaacctaaccccaacatctcctcctcaatttgattcctctcttcctggtctcttcccctagccaaacgggtgcaccacacaactttaagacggttttgcaacagaaatttaacaaggctgaacttttcaaactgaaggtgctcaagcagcttgatctcaacatccctatcattaccctcagcaagtatcttaagcagctcttctgcgagttcctggcactcttgtgcatcaatcttctgctcatattcttgagatatctttctctgaagccaataagcatcaatatccagaacattaagactcgtatcctcctttgcctgtcttgcatcctcgccgtttattgccacacccacctggacaactccagttttgttaagctcaacaacatcttcatcctcctcatctttttcatcctggaccatatcaagatcactctcatcatcatcctcttcacattcaagggcaacaccaatatcataatcaagtcctccatcctcactagctttaccacttaaagaatcaccaccctcttcatagtctgtaatcagttttccaatcgaaacaaactgactgaaaacctgatcagtaataacgtttagtagtttctcaatctctaccttcttttcatggtttttgacggattcattcttaagaactgccaaaatctcatcagccgcaccgcaaacaatgtccaaaggctgcccacccaattgctgctggataagaccaagcataatctcaaaagcaacccttgtttccttagtcttcggctgataaacaccatcctccgtatcattaagtacactcacctccctaagacgaactcttttgctctcacgagcagacaccaaatcatcacaacgttccttcttcttcttagatttattaagccgctcatctaactcatgaggccttcccctaacgacacgatctccaaaggatttcggatcaatcctacccctgagactctccggttcaccagaagattcatgcgtatcacgacgacgctcatcactgttaagaacaagactggaattgactttgtacccatactgcttcaacctggcttgctcctccgcaccaccaccacccaaattcgtcatcaccaaatcggaaaaacaaaccccaaattccaagaattaaatcaatgaaacaaaacaaaattcggaacgaaaaactcttctattacctctctcccgttctccgtaatcgtcgtcttaagaatttgatcgagtcgatgagttttttttttttttcgttcaacagtcttatatatacaccctaaacaagtcttaaaccgacaatacattgtcggccacaaattccaaacccacgaaggcctgtccggaagccgactaaaattatggaattgtccggttcaatccgttttaactataattagaagaaaacattaattagagttggttcttgatgagtgttttcgtataatcagagcaagttatcgtatcattagaccgtaccaactagccaatccggttttctggtattagtaaaaagcagcggttggatcctatgacaattaacggtgaggattcgatcttgaaagcaatgcgtacgtaaatagaattgggccacaagcccagttttattcagaagggcaaaattgaaatctgacaaagaatttgacgaattgtgacaatgtgcgctttgaaaaaaaacgaaatttatcccgcgtgagatgaaaaattcaaaatatttcacacaggtgaaaccactttgacacgtgcgagctcgaaatttttcattttcaattacaaaacccgcctagaaaatggtctaaattttgtttgccagatcgtctctctctcaaaagcttttctctctttttctcctttgtcccctccactttaccgttcacgaagccattccgagctatcacgaaggaatctattgaagattcataggtaaatccatggtttgatttgttcaagtaggttctttgtgatgtgacggagatttgttgcgaaaacgaagagttgatctctttttcttgttgtttatgaggtttcgagaaaatctgattaacaatggagaacaagactgagttcttgggttttaatgttgcgatttcgattttgggtgtgttctaatggcatagttgtttgatttcttcagcgctcaatcacaaatg

SEQ ID NO: 11488 - DNA, 3000 bp, Unknown
  misc_feature (1)..( 3000): cDNA_ID_2706616_gDNA_ID_2214498_Annot_ID_183904 3000 nt of promoter + ATG
ccaagcataatctcaaaagcaacccttgtttccttagtcttcggctgataaacaccatcctccgtatcattaagtacactcacctccctaagacgaactcttttgctctcacgagcagacaccaaatcatcacaacgttccttcttcttcttagatttattaagccgctcatctaactcatgaggccttcccctaacgacacgatctccaaaggatttcggatcaatcctacccctgagactctccggttcaccagaagattcatgcgtatcacgacgacgctcatcactgttaagaacaagactggaattgactttgtacccatactgcttcaacctggcttgctcctccgcaccaccaccacccaaattcgtcatcaccaaatcggaaaaacaaaccccaaattccaagaattaaatcaatgaaacaaaacaaaattcggaacgaaaaactcttctattacctctctcccgttctccgtaatcgtcgtcttaagaatttgatcgagtcgatgagttttttttttttttcgttcaacagtcttatatatacaccctaaacaagtcttaaaccgacaatacattgtcggccacaaattccaaacccacgaaggcctgtccggaagccgactaaaattatggaattgtccggttcaatccgttttaactataattagaagaaaacattaattagagttggttcttgatgagtgttttcgtataatcagagcaagttatcgtatcattagaccgtaccaactagccaatccggttttctggtattagtaaaaagcagcggttggatcctatgacaattaacggtgaggattcgatcttgaaagcaatgcgtacgtaaatagaattgggccacaagcccagttttattcagaagggcaaaattgaaatctgacaaagaatttgacgaattgtgacaatgtgcgctttgaaaaaaaacgaaatttatcccgcgtgagatgaaaaattcaaaatatttcacacaggtgaaaccactttgacacgtgcgagctcgaaatttttcattttcaattacaaaacccgcctagaaaatggtctaaattttgtttgccagatcgtctctctctcaaaagcttttctctctttttctcctttgtcccctccactttaccgttcacgaagccattccgagctatcacgaaggaatctattgaagattcataggtaaatccatggtttgatttgttcaagtaggttctttgtgatgtgacggagatttgttgcgaaaacgaagagttgatctctttttcttgttgtttatgaggtttcgagaaaatctgattaacaatggagaacaagactgagttcttgggttttaatgttgcgatttcgattttgggtgtgttctaatggcatagttgtttgatttcttcagcgctcaatcacaaatgccagaagcacgagatcgaatagagaggcaagttgattacccagccgcatttctcaatagacgctcgcatggtattttacttgacgaaccagcaacacagcacaatttgtttgggtctccggttcagagagtgccatcggaagctacaggaggacttgggtcaattggtcaaggatctatgacgggaagaggtgggcttgtgaggggtaatttcggtattcggcggactggtggtggtagaagaggtcaaattcaatttagatcgccacagggacgagagaacatgagcttgggtgttacaaggcgtggaagggctcgtgcttcaaattctgtcttaccttcttggtatccaagaacgcccctccgtgatatttctgccgttgttagggttagttcactaaacctagtctcattttggatttgtctgcttattcttagatttaactggagtttttttcattgatatatagctaatttgtgatctgtttatatctggtttgtgatttgcatattggttcagaatctgctgcttataagctagattagtcttctgtaacaggcttgcttagcctctttgttaactatatcataagtcataacctgttaccaaaaggcttgcttagtctggctatttacaaactcttatatgcaggctattgagagaaggagagctcgtatgggagaaggtgttggccgagatattgagaccccaactccacaacaacttggggttcttgattctctagtaccgttgtcaggtgctcatctcgagcacgactattctatggttactcccggtccatctattggattcaagcgtccttggccaccctcaactgctaaagtccatcagattttgctcgacatcacaagagaaaacacaggggaagaagatgccctcactccagagaagaagctcctcaactctattgataaagtggagaaggttgtgatggaagagattcagaaaatgaagagcactcctagtgctaaaagagcagaaagggagaaaagagttaggacgctaatgtcgatgcgatgatgattcatcatcctctggtgattcactagaaagaggtaatcatctctgtgatgatatatagtagggagattctatcatttttctaatgataaaaaagaagaagaaattcatcttctgatgatatatcatatgggagataactgttagatagttcacgggtttatgttggatcccttttacttttaggctttttgtatgatgaggatgtcttcttgattcaggatattgtagttaaacagttgtacagaagtttggtttgttggtagaaattgcagatgttcttgtatgtgtgtatctgtaattgtcacaatctaggaagtgccttcgaataataaaaacttctaatcattttttttttttaattcccatcaaacaattttcatatatgttacgtcacacattttatatttggtaaaaggtcacatctgttgttttgttttctttacaatgagcatctaataaacaagattcgtctgtgtctggatataaatacaagcatacttcaaaaattgtatcaatacctgcctgcaatg

SEQ ID NO: 11489 - DNA, 3000 bp, Unknown
  misc_feature (1)..( 3000): cDNA_ID_3040088_gDNA_ID_2214498_Annot_ID_183903 3000 nt of promoter + ATG
tctttgaaatacatgtggaacgctgtagtgagttctcgttttcggttttcttcgagaggtgtttctctcaaggattgtcttgtttcctctaagttcttaagctgctcaaaaccaaaacacagttaagggatcagatgctgaagtatggatgaaaaagaaacgagcaattttatgcggaaagcaaataaaaaacatacgtttgtctgctgcactgccttatatgcatctggcaatggaaatggattgtctttcgtggaaccaatcgcctcacccgcaaaccagtttgggatctgaaccagagacattgatgtgagaaattaacccacgaacacaatcttaataaccaatatcactagttactagaggaaaattaaactaacaaaaaggggaatctaaccaaaaaggtagtgaactggtcagggtccacacaagaagccggttcagcttgtttatcagaggcaccagtcggatgtgatagtgagtcatgcggatcaattgctccgagcgccaaggattcgttccatttgttgatagttggctgaattcctacctcggttatgtgctcctccaagtgtgagtaaaatgtattatatggagcaacctggaacagataacagtcacattgatgccaacagttatagacaacacatcagaagatgtttccacttaactcagttgaagaagtgactttaacagcatgctcaattttccaaacaccaggaaccattaatacgatcatgactataccaggatattaacacaggaaagatttagcctagagttaaaagaaaaactgtagtctatttattaatttcagctgaatatcagggcgggaaagaagagttatgtatgcagctcaatcttaaatagacatatcacctgtagtttgtggttatcaccaactataagaggtcgctgattgactcccaaaaagaacacacattcacggcaattggcgatgcaaattcgtttggtagctacaatcacatgaactctctcacaatgctcaacttttactgcctgcaaagaacataaaatattatcactgcattctaacctgaacctcgctaacaaagactaaaacagaaaggagtatatttgccgtaccttgccagcagctcccagaacgatagtagaatcagaacacccatacacagttgcatatctcaatggcgctaacagataaataacagaatcatggcaattggcaacctgcagaatacacaaaacatgcaattgacgtgcatacatgagtaaacgaaactaaatgagggattgctgtttaaaatgcaaattagttgttcaatacggaccttcactgatctacccttaagatcagaagcctgcttgaaaagtgaggtcttagagactccctcaataatacatggacctctgtcgttagatgaaactttattaagagctacactagaatcagccattgcagcattctgatcagaggcattagatgccccattttctttcccagagattctgttagaaatgctttctaaggcggaagctatgtctttgagaagccaatcattcacttgggaagcaggaacggggacagcgggcatatcaggatcagaattcgcaaaaaaaggagtagcttggcttaaagaaggtacatcaaatcccttatcaccataatgaacaagaaacccaatgtgctccaaactctccatagacaggacctgaggaggagattcggaccatctagcatgagatattcgttcttttccatttcccataatattgcatcacaacataaaattttctatccatctgatacaaacataaaaaaagtttagcacataccaaagaatcatctccttgtccctccacaggctctgcaaggagagaaataatatttgcaatgtgcttttgcagatacgataattgatgagcttcttcatctgtcggtgatggcataaaccgacggctgttgctacgaacaagctgcaagatgatgaaaggaaatttaacttaaactcaacagctacaaggatgtctctacccatatgatagaaacagtaatgagaacaattatcggtaaaatatttcaaatatcagacaatccttttcatatgtttctgaatgataacgtaatattatttaacttgcattgcaaaattatagtaaaatccaatgcaaaatgaaattttttaaaccaaatagatcacaagataacgttttgagccacattacatgattaagagaataaaaaagcttgcctgaattggagataatgccgacaagtatccatcaaaagcagaagtcgaaggccaaacatcagccacagaagcagagtctttatgcgtcctaggcaataacttcttatacgattgaatgtagagaaacaatatcagatccctcaaatcagctcccacggaatcaacttcctcaggtttggccaaaaccaatgggtcagtctcgcaatggagcaccgaagagagagtttcgagaacgaggcgcgcatggtcatcggagatcgagagtgcatcggaaatggcagcagatccgacgcgatgattcgtcgccaaagaagctaacttttgcttgatcggagctagagtttgaatcgggtcggtaaaaacgagcttctggatcggaagaaggccgtgctcgaaaggaacacgtcttgggtggattattaaattcgaattttgaatcgggtctgggtcaggtggtggtgattggtcgatgagctcttccgtcattatgctttaaaccagagaacgagagaaaaagaactgttatgaatgaagttgcagatctttgaacataggaacaattgtcatcaagaagaagaaaaaaagagagagagtgttatgttacagtgtgtgcaaccacatgctattatcctacgcctggtgatgaacaatgggtcaaaaaggccgatatttaaatgggctttaaacggcccattaagtaacgcgattagtttcttctccgttgtaaactgcgactttcaccggccacgagattaagtcgttgtca

SEQ ID NO: 11490 - DNA, 3000 bp, Unknown
  misc_feature (1)..( 3000): cDNA_ID_1809105_gDNA_ID_2214498_Annot_ID_183901 3000 nt of promoter + ATG
acaacaacaacaacaacaacaacaacaacaacaacaacaacaatacatggcgagcttcttcaggttttggcccgatgacggttacaatggctcaaccaccacctgcacctagccagcatcagtatctgaacccgccttgggtattcaaggacaatgataatgatatgtctcctgttttgaatttaggtcgatacaccgagccagataattgtcagataagtagtggcacggcaatgggtgagttcgagttatctgatcaccatcatcaaagtaggagacagtacatggaagatgagaacacaagggcttatgactcttcttctcaccataccaactggtctctctgacttgtctttgcatcagagaatcttcttacaatgaacgattctgcaatatcttatctttttgcttctttgtttattctgttatctgctatcaataaaccagacaattgttgccagataatggcttttgattttgatttgttgttttatctccatgaaaatccaagttatgagatcagattgatttctttagcacatcaaggttccatataatgaatctataatcatcctagtatattagtcaaagcaggagctaacattaccttttaacttaaggcttaagccatagcattatcatcagctttgctcaaactcaacatcttaaacacttaattagactcagagatctatcgaccaacgaagtgaactgctttttccccaaaaccctaaccacccactttcaaagattcgtcctttatggatttagctcccctgtttccaaatgaaacctcaaaaaacttgaaccatatatactcatcagaagacaacttaactatggcagcttttcaaatatgattcttatctttataaaaatctttcgtcagaaacagtaaaagtaagacgatgatagagacctttcttcctaaagatctctcatcatctttcatggtcgtcagagctttgctacagagacgtgaagagagaatatcataaatgggctatataatgggccctaagaggcccacatgaatttccgtatgattcttgtaattgggctttctctggctctactgactcgtctcctgaagaacaacaacaaaacatatttcattgagctcctccactgaatcgctctcatccttcgcttcttcgaattccaaaggttagactttcctgaatccttcaataatctctcttcgttgtcttctgtaacatttcttctattgttagtgatggattccattattttccttgtgttacaactttgatgagctcaatgctttcacaaactaggtttcggaatttttgtttcaatccaatgtctctatttgggtctttaaaccagattatattgaagatctggaaaatgggtttataattttgtaaagaccgcgactttgaaaacttcaatttggtgaaattctttcaaatccgcatcttgtaaaaatcacatttttatatttttgttgattgatcttgttctctgttgaatgtttaacttgtgtgcgttaggtagaacagtagaagaaatcatggatccagctgaaatgagatatttggaagaagaggatggtccgttgatgaagacaatcaaaggtagtatcactggttttggtgctgggactatttacggaaccattttagccacatggaaagatgttccaagagtggagagaaatgtggctcttccaggacttattagaacactgaagatgatgggaacccatgggctgacttttgctgctataggaggtgtttacatcggtgttgaacagctggttcagaattttagatccaagagagatttttacaatggtgctattggtggttttgtcgctggagcttctgtgcttggctatagaggtaatggtttttcttcttcactcatggttcgttcgttttcattgtgtttgcataaaacaatgtctcgatggttaagtagtttagaactgatgtgattttggtgaagaccatttgaagttactggaattagcagtatgtagttcacttcatgtgttttacgagcttagtagttattgatggacaaacaatgatctcgagtgggagtaactaaaggaattgtaatgggaagaaattgattcttccttacctcaagttaatgttatttggtgcctagtgtagcaattctataggatagcacaagtgtcaagactttgatattgagtgtatacaggaaactctcaaaatcatatatatgtaaagatcgaaagtacatagctttgagtgagagatgatgctatagattcgtgcattcttatgatgctatacttaattgttatttggtttactttggttttcctctttttttacagcaaggagcatcccgacagcgatagctgcaggtgcaacactagctgttacctctgctttgattgattctggaggtcagaccacaagagtagacaatggcagagaatactatccttacaccgtcgagaaaagagctgaagctgattcctgatttctcttttggtcactgagattaataagatgtgcattcgctgatccggggatcttgagataatctcttttgtttattttatctggatatgtgatatcatgatactctttgctcttgtttcttcttgttttcttgagagcgactttctcacatcttttgtctgaatgtttcctgcaataaaaattcaactttgtctgcagatgtaaacaaatgttttagctttcagtaatcattttaatcagacatttgcttgcttctgttaacctcaagctagtttctttatctgaaactataatagatttgaacatgacaagcataaggaaacaaacatgtaacatgtataacaatcagatgatatggatttggagatctacatgtaaaagtagagtgaatacgtggcaataactcattggctatcttaaatttccttgtggtatggctaatctagtggttcttgtccaagtaactatcgcatcacagtgacgagtttttttcctagagacctctgctgca

SEQ ID NO: 11491 - DNA, 3000 bp, Unknown; identical to SEQ ID NO: 11486
  misc_feature (1)..( 3000): cDNA_ID_2706624_gDNA_ID_2214498_Annot_ID_183899 3000 nt of promoter + ATG

SEQ ID NO: 11492 - DNA, 3000 bp, Unknown
  misc_feature (1)..( 3000): cDNA_ID_3040104_gDNA_ID_2214498_Annot_ID_183896 3000 nt of promoter + ATG
actcgattacaatctgttccacaaaaataaaaccactgaggcaaactgatgatctaagattcatattctttttccaggaaaaaaaaaatggctaagggtggttgaatatcatactgaatcaactttgctgttaaagatagctccgctaattcctgtatcctcactacactcacagaggccacagtccccctggtgtgacagacaactggtgctcatctctactgactttccatcaatttttgaatggtttaaccgatgaacatagctgtcaccaacataatcccagatttgttgtgttcgcaaatcaagagaatagcagtgatgcgtttctttccagtgcctaatagaatgcccttccttgtatctaaaattggaaaacagaatccactgtgaatgaacttccacctctaaagaagataaaagatgtggatataaattcaggttaactaaatcttagaaaggcaaaccaagaattaccttccacaacctacgaagccacagacaaggcatgcccatacattctcagtttttccacaaatagaacagtttaatatctcatcttgctgttgacacaatcgacaaacctacaaacgaaatgagcatgttgtgacacaagtgcaaggtatttgttaataaatggatgaatcagattcattttatggaacaaaatgtattagctgagggaacactgccaataaatgaacaccgaaaatgcaacactaacccatcatataaagtggaaattcaatgaaaggaatgaaggagaaccactcacctgacaagacagataagtccatttcgaagtgcaagaacactgaaacgagtgatcacaaagagtgctaactataccactggtgtcaggatctaatctctctacaggagtcaaatcccaaatatagatatcagaaaaaaaggtactgaagaattcaaagtgataataacatagaaaacgtcttctttagcacaaaactcaccaagacatattggacacgtaggtaactcggtaaatccagtaggtgcttctgcagcaacctcatcaaattctgtgtgttccaccgacattacatatagaatatgacaaacctcagcctaaaacccaaagaaaagtcaatttcatgcaatcaaatgaacataaatacaaaataaacgataagctcgtttccatattataacctcagatggtgcgaactttttcccattcaagttgttgtagaaaccatcagcttcggattgatcagaaaatgtgataagaacactatatctatcttccattccatcgttcctgataatttacaagaatcatcaaatcaacataatcattctcgtcaaatcaagtaatcacaacaccaatgaatttcttgaatttgatcatctaacagataatgaatggaactttcaacgaacctgatgaagaggatgtcggagacttgggagatgcgggaatcacagaaacggataaaatcgagagaggagagataattgggaacagcgacgatgaagagagtggtggatcgggagctagggttaggcagagagctatgtgaagatttgcgatagagatggatcaagcctttgcggtcggtgagtttgagagatggttgtatgagtttaagaggaggctgagctcttttcgatgcgtaagtgaaacctgattcttcttcttcaacggagattggtctctcggagtcaacggaatgaactctgaggatgaacatcgccagaagcgggaaagagctcgacgacgaaagcttaagctactcggagagaagaaaagagacgacgatgcttcttctttctgattttttgattcgtcgttcttccgatattgagatgcttcaattttgtgttttgactcttattaatgggccttagccagtgtcatttgttcgataagtccgcccaacatgtcgatatgatagtgttttacagtatatatttttcccaatttatataagagcagaaatatgggcttttggttcggcccatataataaagacgacgataaaaaggccattatgagacgaagtaaacaataatatccctgaatgcttttttgagctgtcagcagcattcttatcaacaaagacgagacgacagtgactgttccgagtagcaccgctaaaacagtaagaggtgtgtgttggggtgagagtcacgcaaggaaatttcatgcatgttaaatctgtgtttttttgtagctaagtttactgagatttatatcaaattactttattgttcgttgttcttgttgatgtttagttttgaaatgtgtatgttaaaagatgataaaagggatcttgcttttgtgtttgtactttctttgttatacttattagatctgctatgtgaaatgagtagtgttaactgattgattctttgttttagtttggatatagttcgaggaatgacaacgattgtgttctaatgagccatggattttacagtttcttttatgttaatgctgtgttagaactttttaatgatgatatttgaataacaaatttgttgaaactgtgaacgtgatatgttatactctagataatgtcggaagtagagggcgaaaaccgggctatcgtgtgtgacaatggaactggaatgatcaaggtaaggagaaaataagaacactctctattattaatttgtgatgcgtcgtttgttttccaaacacaatttacgcatttgtattgcgtttacatttaaaaatatcataattttgaaatataattataacaaagtcaaaatgtcaacaaagaaactttctattttcaattttcatttaacaatacaattttttttttttctagtgagcttcttctatgtttgagtattgattcggaaaaatatgcaaaatgtaaaagtaaacaaccaattaatgcacattataaaacaacgtggcagatctaatgattggtaaaacatattgaaggcaggatatgctggagaagatgcaccaagtgttgtgttccaagcactgtgggtcgtccaccacatacgggaggg

SEQ ID NO: 11493 - DNA, 3000 bp, Unknown; identical to SEQ ID NO: 11490
  misc_feature (1)..( 3000): cDNA_ID_1809105_gDNA_ID_2214498_Annot_ID_133615 3000 nt of promoter + ATG

SEQ ID NO: 11494 - DNA, 3000 bp, Unknown
  misc_feature (1)..( 3000): cDNA_ID_2706620_gDNA_ID_2214498_Annot_ID_133616 3000 nt of promoter + ATG
ttccacacagagatcataagtacaaaccaaatgcaattcataagagagccaaatatgttccaagctttttcctaaaattcttagctaaaacccaaaaacaaacacgagattctttctaggcgaaagaggaattaaagtgttacctgttgaaggattttaggtctttcgaggtctcagattgcagagacgagaggctcctgcttacgtctccatttttcaccggagctcatgcggatgagaatttccgggattttagtttactagtcggagtgaaacgactgtgtttcgacgtgggccacaaatgggctttgactcagatttaaacggcgtcgttttacgtgggccataaatggtctttgacggtaactcacagttagtttgctactacgatgacgattaaacttgaccatatggattattgacgaccccaacaacactattctcctcctttgggtatgaaggaaccatgataaattataatctgcggactctaactatacatacatatagcaaagttcagtacctatgctgttttggcatgacatttctactttatctttacttatcagagcttaatcaattctaaccctaattaatcttcttacgcattcccatccgtgatctagcatatctaatattgcttgttaagtcagtttttcggaaagcggtgaagtcccacgagtaaaaaacaaagaaataaaatgggaagaagtgaaggatactgcagcctcaaaacttccccagtgagggatgagtaaagcactgtgccttgaagagtatgtagtgcttcacttgagcaactgacgtcctgcaaagccacatatcaaagtaaacatgcgagagtcaattcactctttaaacaaactaggatctctctcgatttaaagaaaaagatattgcaagagctgtacctggaaatcaacaaatgcaacaggagtcccatatgtaccctgaatcttcagcttcaagaatccacggcatctgagaggaaagagagtgaaaactatctctagtggttacagttttgcgtggagaatagagtattcttacctcgagaaaacttgaattagctcagcttcggtgcaatttggtcccatattcgctatgaaaagtgttggacaaggatctgccgccttactctgtcaaaggaacaaagattgtcatgttcactggtaagaatagtttacctcactgtttttcgtccagacagaaaacaatactcatatgaagtataaaataggcagaagcttacaggttttctagaagtcggtgccctcccagcaacattagcaattccttgactgaacgagcaaaaagaatttaatgagaccctgagtttcgtgagctaatagctaagaaagaacaagcactctcgtaaccagtatctagacatgtgagctaggactagttcagctaatccttaagtaggtcagattttcaaggcagaggtacaagaaaagagtgtgcaacaaagaaacagaatctaagcattcacaaggaactagaaatgtgctcaagtagtgcagatgacctttgtgcaggtgaataaccaattgtgttgtaagcagaactactcattccaggagtttgaaagctgccaaaacctgctagtgcccaaacgtgcaagaatgtgcagtgtgagttttcagaaacgtgaaaccatgttgacggcacttaaagcccaagtgtgaaatcttaaaccaaaaagagctagcatgcatgagcgtgatggtcatgaagattggaagtttgaaaatatatatactacacaaacattcagttacaagaaacataaaatacagaaggttacaagaagcctcaagatgaaggtgtgtgccaatgatcttaccagattcagtagtagtgttccaagacttgagttttttcaagctttcccaaccatcatctaccatatcacaaaaatcacaaaataaaaattaacacaacaatagcaaaggtcaaatttttattgagctaccgaaccgaaagaatcctactacttgcctgttcttgaacgcttagatttgggatttgatttggcaaggtcaatgtgaagagtagaatgcttttcaagatcaaacaccattccctgaaaggttcagaaataaaattcagaaagtttcttaatctaggcaaatgacaaagcttattcacttacgcatacaaatcccaaccgaatgatttcaatttactagattgaattaagaacaaccataaagataccaaatttacttaatgctttgtaagtagatacatcggcgacacattgcaagagcaagtttgaagaaatttgtactcacattgagagcatgcatcaccgctacagctgattgcagatccgagaacacagcaaatgcgaagggctaccaaacaaataaagtaagattctcagtctcttcgccgggaaacatcattacccaaatcacaaatccggagagatagaaaatgattaccttagctccatctgagctccggagatgcgaagtctcatatcctgggaactcacgaaagagattgtagatctcccgaggcttgacatcttcaggaagtccggcgacgaaaagcgtcctaacctcatcgcgagctccaattgagacatgggtaggcaaatagacggaatgagctgaagtaattggaatcggagaaactcccggcggcggaggaggaaccatcgccggtaaattatagtgagaatagtaagcttccaaatcatccattgacaacgacttaatctcgtggccggtgaaagtcgcagtttacaacggagaagaaactaatcgcgttacttaatgggccgtttaaagcccatttaaatatcggcctttttgacccattgttcatcaccaggcgtaggataatagcatgtggttgcacacactgtaacataacactctctctctttttttcttcttcttgatgacaattgttcctatgttcaaagatctgcaacttcattcataacagttctttttctctcgttctctggtttaaagcataatg

SEQ ID NO: 11495 - DNA, 3000 bp, Unknown
  misc_feature (1)..( 3000): cDNA_ID_2717442_gDNA_ID_2214498_Annot_ID_133617 3000 nt of promoter + ATG
ttttcttcgagaggtgtttctctcaaggattgtcttgtttcctctaagttcttaagctgctcaaaaccaaaacacagttaagggatcagatgctgaagtatggatgaaaaagaaacgagcaattttatgcggaaagcaaataaaaaacatacgtttgtctgctgcactgccttatatgcatctggcaatggaaatggattgtctttcgtggaaccaatcgcctcacccgcaaaccagtttgggatctgaaccagagacattgatgtgagaaattaacccacgaacacaatcttaataaccaatatcactagttactagaggaaaattaaactaacaaaaaggggaatctaaccaaaaaggtagtgaactggtcagggtccacacaagaagccggttcagcttgtttatcagaggcaccagtcggatgtgatagtgagtcatgcggatcaattgctccgagcgccaaggattcgttccatttgttgatagttggctgaattcctacctcggttatgtgctcctccaagtgtgagtaaaatgtattatatggagcaacctggaacagataacagtcacattgatgccaacagttatagacaacacatcagaagatgtttccacttaactcagttgaagaagtgactttaacagcatgctcaattttccaaacaccaggaaccattaatacgatcatgactataccaggatattaacacaggaaagatttagcctagagttaaaagaaaaactgtagtctatttattaatttcagctgaatatcagggcgggaaagaagagttatgtatgcagctcaatcttaaatagacatatcacctgtagtttgtggttatcaccaactataagaggtcgctgattgactcccaaaaagaacacacattcacggcaattggcgatgcaaattcgtttggtagctacaatcacatgaactctctcacaatgctcaacttttactgcctgcaaagaacataaaatattatcactgcattctaacctgaacctcgctaacaaagactaaaacagaaaggagtatatttgccgtaccttgccagcagctcccagaacgatagtagaatcagaacacccatacacagttgcatatctcaatggcgctaacagataaataacagaatcatggcaattggcaacctgcagaatacacaaaacatgcaattgacgtgcatacatgagtaaacgaaactaaatgagggattgctgtttaaaatgcaaattagttgttcaatacggaccttcactgatctacccttaagatcagaagcctgcttgaaaagtgaggtcttagagactccctcaataatacatggacctctgtcgttagatgaaactttattaagagctacactagaatcagccattgcagcattctgatcagaggcattagatgccccattttctttcccagagattctgttagaaatgctttctaaggcggaagctatgtctttgagaagccaatcattcacttgggaagcaggaacggggacagcgggcatatcaggatcagaattcgcaaaaaaaggagtagcttggcttaaagaaggtacatcaaatcccttatcaccataatgaacaagaaacccaatgtgctccaaactctccatagacaggacctgaggaggagattcggaccatctagcatgagatattcgttcttttccatttcccataatattgcatcacaacataaaattttctatccatctgatacaaacataaaaaaagtttagcacataccaaagaatcatctccttgtccctccacaggctctgcaaggagagaaataatatttgcaatgtgcttttgcagatacgataattgatgagcttcttcatctgtcggtgatggcataaaccgacggctgttgctacgaacaagctgcaagatgatgaaaggaaatttaacttaaactcaacagctacaaggatgtctctacccatatgatagaaacagtaatgagaacaattatcggtaaaatatttcaaatatcagacaatccttttcatatgtttctgaatgataacgtaatattatttaacttgcattgcaaaattatagtaaaatccaatgcaaaatgaaattttttaaaccaaatagatcacaagataacgttttgagccacattacatgattaagagaataaaaaagcttgcctgaattggagataatgccgacaagtatccatcaaaagcagaagtcgaaggccaaacatcagccacagaagcagagtctttatgcgtcctaggcaataacttcttatacgattgaatgtagagaaacaatatcagatccctcaaatcagctcccacggaatcaacttcctcaggtttggccaaaaccaatgggtcagtctcgcaatggagcaccgaagagagagtttcgagaacgaggcgcgcatggtcatcggagatcgagagtgcatcggaaatggcagcagatccgacgcgatgattcgtcgccaaagaagctaacttttgcttgatcggagctagagtttgaatcgggtcggtaaaaacgagcttctggatcggaagaaggccgtgctcgaaaggaacacgtcttgggtggattattaaattcgaattttgaatcgggtctgggtcaggtggtggtgattggtcgatgagctcttccgtcattatgctttaaaccagagaacgagagaaaaagaactgttatgaatgaagttgcagatctttgaacataggaacaattgtcatcaagaagaagaaaaaaagagagagagtgttatgttacagtgtgtgcaaccacatgctattatcctacgcctggtgatgaacaatgggtcaaaaaggccgatatttaaatgggctttaaacggcccattaagtaacgcgattagtttcttctccgttgtaaactgcgactttcaccggccacgagattaagtcgttgtcaatggatgatttggaagcttactattctcactataatttaccggcg

SEQ ID NO: 11496 - DNA, 3000 bp, Unknown; identical to SEQ ID NO: 11488
  misc_feature (1)..( 3000): cDNA_ID_2706616_gDNA_ID_2214498_Annot_ID_133618 3000 nt of promoter + ATG

SEQ ID NO: 11497 - DNA, 3000 bp, Unknown; identical to SEQ ID NO: 11487
  misc_feature (1)..( 3000): cDNA_ID_1807579_gDNA_ID_2214498_Annot_ID_133619 3000 nt of promoter + ATG

SEQ ID NO: 11498 - DNA, 2014 bp, Unknown
  misc_feature (1)..( 2014): cDNA_ID_2706608_gDNA_ID_2214498_Annot_ID_133621 3000 nt of promoter + ATG
acagctcgaagttttaagactatgtagcttagcctatgtcaatgtcatcaatctatatgcaatatatatagagcctcaggcacataaaccgtagtccccatataaaaaagggaatgaaacagctaataactccatagagaataaattcacattcaaagcaaattcaccaccccaatcttctcaatggttcggtttcttttttcaattcttacattgtactaaaagctaaaaattcagactgatacgatacgaataggtttttgaaaatataaaaattaatcaatttccattaaagggctgaatagctaaaaactccatagagaacaagtcgctttattggatttagattttaaaaagacggcgctcgtgaattattaaagtttaaactaagataagatttaaagagatttagaggagacgtaatctggtgtatatcgttcacatagagtcacgtcactgtataatccatcgaccactaaggttttagagtttagtttcaaatcttactttttcatgcaggtgtaccgtatgtcacacagattatagtagtcgccaacttacgttcccaatgggtgataacggcgtcaacgtcctccgtcacgatcgtgtcgtaagctgtacactgtataggttccgtgaaccttaaaatcggatttggaaagctacgtacgtacgtaaatattggttaaaaagttcaaacagttttgatctctcttttattacaaacaaactgtacttccgacaattttctttctttctatttcaagtacgttttcgtgtctaactatattaacatctaacttctgacttttatactctgatgggacaatctttaattcttaaattctaagttgtaccatgcgaatggatattagattttgtcagtacaattgctgactatgaatgaagtactctaacatcattattggttcctgaataatgagtacttaaacaaaacaaatttgaagtaacgtaaccatgacatattagatccatgtcccctaaaacgtattaaaattatttccttacgtcgttaaatttcgaatctagtgttaaattgttacattggttgttaaactaccgacccaataaaaaaaaagaaactaatatttatgattggtgcatcttgttgtaaattgtaatcgtatggcctaccagcgatttcattgtccccaacatacagatatttttgttcgtgtgttataaattagggtagaaacatcacatattttacagagacaaagaaaaaaacaagaatcgtaataaaatgatattatggatacatgtagattataagatgagaaataataatttgtcacgggtccatcagtatactcgtcaaaattgattaggtaggtaatttacttcacatgctcttcctgtatacaagtataaagtatgtattttcatctaaaatctactcttttctcaattacattttatatagaaaaattcatattcttaagaaatagtagtaaaattgttcttgaaaaaaaatatgaaaaggcattttccgtgactcagcctcacaggcggcttaaaacgacgtctttttcaattttaataaatttttggtaaaaaagcttttggatccgccgctatcttcagcaattaaagttggacgcagaaactcagaagcaaaaagacgataaatattcatcatcaccttcatctctctcttcctctcatcagacttcaccgttcttctttctctcttcttcatcttcagacgaaacctcctttacttccccttcaaggttttatatttcccaaatcctacacctgctcacatctcaagctcaagttttgttttcccgggaaaagtgacacaaacaagaacttaacaagggagaagaaaaagcttatattcatatcaacggttgacgttggaaagctattaagatttggttttctacaaatttgttcttcctgaaacgtcacgagacagagcttacaagaagagaaaacagaggaaatttcgttgcattttttttacatattgattcgattaatg

SEQ ID NO: 11499 - DNA, 3000 bp, Unknown
  misc_feature (1)..( 3000): cDNA_ID_2717452_gDNA_ID_2214499_Annot_ID_133624 3000 nt of promoter + ATG
gactgtgatcctcgtatccctatctgctcgtgtgggtttaatcacttgaagaatttcttgaagagtaggatccaggaaagggtttctactcatcgtcttgctccctctacaataacaccaaacacacattgccaagttatctcaaagaaaacatcatgcaacaataacacaaggacttcacaagctccaatcaaagtaaattcttgagattaaaggttcagtttttctgatatcttgctcacttactactccaaaggaacaacctttgtcactaaaagcaagattcttcattctctagacccagtggcccacattttagtatcatcaaaactgtgaaaactctacccaaaaccttacaaaattcctaataaaaagaatcagtgagtactgggttttcacatccactggacttacaaaaggatgattcgaaggagatgaagaaacctttagcccaagaacccagaatctaattccaatctagggtttttctctcccaaatcagtaatccgtaccgaatcacccaacttgagaatgctcggagataattttagcgctcgcaggcgaagacaatgaaaagtctttggaaggtttactttattttattcaatgcgacgaaggaaacacttctttatttcattttatttaatgaatgatgtgaccatcttttttaggaaccaataacattattacaaaatatactatagaaaattgttggatttttaaaatcaatgctaaattaaagggtatatattcaatcaaatattttgagataatttattttacatattaaaaaaattgcatgttatttgatcatagattttacaaagtcatattaaatatgatgttaatggttagtatttgtaaatatctcttaaaccctagttattaaactgatgaattttctttacatctatttttattagaaacattttagacaatgtttatttatgattttgatgtggttgcatacttgcatgcacatggaaaattatccttttgacaaaaactagttggctttcttctttttgttcaatcttttatcctcctctacacattgtctcatattttattgcaatggtaacctcaactctttttacagttaaacctccataaattaatactcgataaattagtaacctctataaattaataaattcaccagatcccaagttaggaccaatgtaaaaagtgtaacacatcgataaattaataagataataacttttttgaaagtcctatgtaaatatatagtctcatcaatatcataaattaataattgcataaatgtatcaactatatatatacattatatgtaagaaatgtttttgatttttttttacttaaatttgtagttattcttatttgaaatttagttctaatgtgttactgtatcaaaaaaaatttggtattgttttctagacatgatataattttgtacttgtaattgattttagaaagatattttctataatgaaaaaaatcttataaaactttttaaaaagttaccaaattaggaaaatttctctataattaaaaaatattaatttatcgataaattaaaacctttttaaattaataaaattttgcagtcccaacattattaatttataaaggttttactgtacttcattttctaacctcagtatgttaaaagtcatgtatgtgtactaagaatcaaacctggcacgcaaacttttgctaattttgtcacatacagttaacatttagcattgtgcgagtagctccaccacattattatcaatcgtttggttcttcaacatgtcttatatatggatcaataatagtttaatatcatatcagtaatctttgttctcttgtcttgcatgtagaacatgtacatattgcttcgtcggcagcgaatgaagcctaaaattaaaatttggttttgtccattgatgatatgatggctcgttccacatgagagaatggttgagaaaactgaaaataatgaagaggatgagaaattataatgatcagacaagtgaagtgtttcattttatagcttagtgtagaaaacgattgcttgtgattgtgaatatatagttttagatgagttgtttttatagtaactttgagggaacaataaactatgatatagttatcatttttattttaaaacaagtaaattcatatgaatttctgatatattcatattttcactatgaatttaaacactataatcttatttcatattttagcatatgatattttgcatgatgctatcttagcctcgactatctttacttcatcttctaaactatatatttatcaaatcttacgtatgcattgcatcacttgtttttacattttgtgtaaagaaaaagttgcattaattagtttttagcggtttagtacaatatggttaatttgataaccacatacttgatacctgttgtatctagagttgtatataacaaaattagaattatattctattggctaagccaatttctctccaccaatcagtttacatcggttatttggaacattattatcgataagcaatgtcattatccaaaattttggaatgttatcgtatgaagaagagtgtagaagtatcttgatcacatatgaatggcttacctcaatcctcaaaaaaaaaaaaaaaaacaatgattttccaaagcatatgtggtaataaataatgttataatcttcacttgaaaaaaaaaacaaatccattggcacagattagccatttgacgacaacctcataaacatattccacgtggaccaatcaaaatagaatcctcctaatcatcttcctcgtggcaacttggccaatccgcatcgtgtggcgatcagagagttaagccttgaagacgaagagataacgaattggttgttgatcactcgctttataaatctctcagtttcttgctcacaccaacatctctctaagcttcttcttctaccaatctaattcctctcttcagcttcttgtgttgtgacgcatactcgtcgcagtcttgagatatg

SEQ ID NO: 11500 - DNA, 3000 bp, Unknown; identical to SEQ ID NO: 11499
  misc_feature (1)..( 3000): cDNA_ID_2706669_gDNA_ID_2214499_Annot_ID_133625 3000 nt of promoter + ATG

SEQ ID NO: 11501 - DNA, 3000 bp, Unknown
  misc_feature (1)..( 3000): cDNA_ID_1807971_gDNA_ID_2214499_Annot_ID_133627 3000 nt of promoter + ATG
aaaaaaaaaaaaaaaaaaaaaaattagctcacaaaacttccattaataatacacccgacatctttaatggattactattacactaagcaccaagcaccaagtcccaaatgcattatataaaccggatcatacaaataaggcagatgatccttcatacaaggttttaatctttaaaaatatatagtttcgtaaagttgttctctctgttactattgccattgtttctagtgtcaaagtatagctcaagttgtaggttgatgaaaaggattccatggcagtacctttaaactaagttttaccacattgatagtaacaccaattcaatgcaggacctatacattctactatctcatcatatgataacaatgttgcaattaaagcacgaaaacatgtattcaaaagaaaaatacacgagtgtgagtctatataggcatctaaaagtgcagactgaaaaaacctgaaactatatgcaacccgtacctcccaagtttgctggagatgcaacaaattctaagcagaacgctttgagctgtaagaattggtgctgttcagccaacgcaagtgttgttgccacattatcaacatcaagtttttcgcatagcaaaacttcacataatatctttaaccttgcaaggtcatagaggtcagcagctgccaagagatgttgtatcatgtttgtaaacgaactggcagaagttgacccggtaatttcatgcacattaggaagtacatcggtgtaaatgaagctaagcatagcctgtaaaattaaaacatcccgagtcagcaaaactgtagttgcatgtactgccaactattcacgatgtaatattgaacaaaaattaccttgaagatagaaggttcgatgtcgtctatcactattctatccacattgttattcccaattggtccaaaaaactgagctctaaaaactggggagcgtgccgcgagaatcagtttgtgagctttgtatgtttcatctccgacttggaaagctatgtcacaaccaacttcagaatctaacaagtctttcaatccctgacccatattcgacaggggtagcacaatgccatactgttttggaccctcgagtcgggctctaacaacgccaacagtacaattgatgacaagacaatcatcctttaagtagtcagaggtttctaaagctgatcgtttgaaaaagcgtttgtaacccctgaaatttgtgatgataagtcatgatagagaaaacaccaacttccagaaggaaacctcactttcaaggaaatgagtcaatatatgaaatcaacagatgatgcaagagttcaaaaaaagattcacgaaacttcaaaagcaacatgcacacaccttaaacctctcaagggattcaaaagccatactttaaagaaagagaaagaacaatatgaaccatacaattaaaaaaacttgtgctttacacaattttagccgtaagcaaacaaaagcacaaacacattgataaagttccttaattgcttctgacagagaagcactagcagctcattccaccacaaacatttctgcaaaataaactatcaacatgcaattcaagcagaagataaacaacattactaaaacctaaatgcaacaagccacagtaacctaacaaatgcgattatatcatactacaacagcaaaatgaaatggaaacgaagcaattaccacatgcttcctttatacttaagtgtataaggaccaccttcaagcgcccgatcaaagtgactatgcaccttatgtttccctttcccactctgatccataagcgtaagctcaaacaaagccctaatatcattagaatcactcgctaaagcgatgaacaaagagatatacgaggactggtcctccgggttcttcccatcaggatagaagtaaatcgcccaatcgtatccaccaacggagaagatatcgctctgtataaacttcccagggctcatgcctttggctagagagtaaccttgaatcgtgaactggtgcgaaccgttcaccgtttcgatgaacgacgttgaaacggaatcaggtatcaactgctctatacctccgacggtactcatgatctcttcgtcgtcgattacgaagaattttccgatgggagaattgtgaacttcatgaatcgacgaaattggattaacctagaagacgagaggttgtttgtgaaaattatgagaatttgggggaaactgttttcgccttctttattttttattttaaaggatattaaatgtaatgggctcgaaagtagtgtccaacgaccataagccaacattattgtacattcttaatttcatttaaacctttgtctctctttcttttcaatcttgtttgaatggttatcgcagtcgaggtggacaaatccgtttgcgattagtccgtttcatctacaagatggacaacaaaccgctacaaatcaattatatttgtatgtaaaaacaatccattgttagtttacaatgattttttaggtaaatgaaaaacgttttaatccgtatacggatttgttcgcttcaaccattatattcatttgcatgaagactgaaccgcactgtgtgatataattttaatagtaaaacaaatatttattactattagaatctcatcgcactttatcataagaacatttaacataaatattttataaatatgattatattcaatcacatgattaaaaaaaaccagtttttagtaaaatcttttcatcatttgccgataacgtttaacaaactatcatgtactatttttttttttttttttttttttgctgaattagattttaacaagacatgctattgaaaagaccctttttatataaaactctctgcaactttctgatcttttaactaaattctgcaaattcttctgtagtgataattttaccgaacgccagaaaaatccaaaagcaacaactgtaaaattacactaatcatcctctctcacacaacaacactacgcagatccagagatcgctgatccttcacacgcaagctaatg

SEQ ID NO: 11502 - DNA, 3000 bp, Unknown
  misc_feature (1)..( 3000): cDNA_ID_2717448_gDNA_ID_2214499_Annot_ID_133628 3000 nt of promoter + ATG
ttcttctgttgttatgcttccacatgcaggtagcaagatatggccttgtatcacaaacaaagaaaaacagaaagattagcagctgtaccaaacattatcgggatcatctgattcatcacaaagaggaggtttagtcccagcctcacgactcaaatagcagtcgttgttgaaaggcttctgccagattgcaacgtatccttccttctttaccaatttccagcagaggctaatagtaagattcagcatttctggaaaacaaaatgtgagattaaaagagtacacatattggctgaatcaaagtagtaataaagaaaaaaaaaaactctccttaaacccacagagacaaactgtagtaaataataaagccacgtacaatgattactaactccaaaaagtttattaagaccaaagaattttatcaaccctgaattacaggcctactcaaagcagattaaaaggatgttacctgtccattgttcttccaaagcgggttcatgcttataaacaggctgtgcagcccaagcaaaatatcctccagcgcgcagcattctattgatctcaaggagcaaaattccatctttatcacaaagaatgaaacagcagagtgagaattttctgtacaagtaataaaagctagagcatagttcacacagggagttaaaaattacagtaggtgcaatcttaatctttttctgatgtattaggtgaagaatcaagcacaccatagaaccttaccatcacgagtccagttgattctacatcttgaacaatgaataagatcaaaagcttggcttggatataacaaacgccttgtcgcaaatgctgccgccatagcaggcacaccacgctcaagagcaaattgaatttggttctcatggacatcttttggtgcaacagacattgtcatgacatcacgagacaatagataagcaccaaaactcgccacaccacaaccaacatccatagcaaccctaatatgcttgccaaacgtaatatcagaaaccatctgcagacacaaactccagagctcaacatcagatgaaaagatacataaacagttgacgcgaaaaacaagaactactacttggaaaaatgagccaccttagacatctggtccaagtactgatcagccccatgaataaactgtgtaccacctccaggaaacttgaacttgttcttgtctcgtgaaatccagttctgacctcctttgtcttcaacaagccgagtatgaggaacattgctaaaccatacctatccataagtaaattccaaatactacttaaactaaatcccaagacatgttatccaaccaaaatgcaaaactcatgcaaacaaaggagtacctcgtcacggcttttaggccatggaatcggctgacggtaacctttaggaggtggaactaagcaattcaagcctttacctttctcaggacaatgacgctcgaatctctcacctcgctctgtcgatttaagcttctttatcacatcagtattatccaaacaaggtatatactctctcatactctcaggacacatcccaaatttcttaattctaaccctagccttagaatcaccgtcgcttttcgcctcaacgatctcagtctgattcccccaatcttccactgtatcactctcaacctcacccacctcaaaatcgtcagacatcacaccgttcgcatcaactatcccaaagctcttaaccggaccaggcggaggaggaggtgaaggagaaggaggtggaggaggaggaggattagcttccaccttaaccttctccgtgtccgccaccaccgacggaggttgttgtcgtattgtggcggggatttcaatctgggtatggttagtaggaattatcgctgataaattaaagactctgttactattcggtgaaacggagacctccgggatcgagctaccggaagtggaagaggagaagaagacgagctgttggtagccatcgtcggaccaatgcttgcctaagtagaagaaagcgacggtgacgaaaactaaggcggagatcttgatcagagttggggatttgaacagatcgccattagtgagaggcttcattagcttgcgtgtgaaggatcagcgatctctggatctgcgtagtgttgttgtgtgagagaggatgattagtgtaattttacagttgttgcttttggatttttctggcgttcggtaaaattatcactacagaagaatttgcagaatttagttaaaagatcagaaagttgcagagagttttatataaaaagggtcttttcaatagcatgtcttgttaaaatctaattcagcaaaaaaaaaaaaaaaaaaaaaaatagtacatgatagtttgttaaacgttatcggcaaatgatgaaaagattttactaaaaactggttttttttaatcatgtgattgaatataatcatatttataaaatatttatgttaaatgttcttatgataaagtgcgatgagattctaatagtaataaatatttgttttactattaaaattatatcacacagtgcggttcagtcttcatgcaaatgaatataatggttgaagcgaacaaatccgtatacggattaaaacgtttttcatttacctaaaaaatcattgtaaactaacaatggattgtttttacatacaaatataattgatttgtagcggtttgttgtccatcttgtagatgaaacggactaatcgcaaacggatttgtccacctcgactgcgataaccattcaaacaagattgaaaagaaagagagacaaaggtttaaatgaaattaagaatgtacaataatgttggcttatggtcgttggacactactttcgagcccattacatttaatatcctttaaaataaaaaataaagaaggcgaaaacagtttcccccaaattctcataattttcacaaacaacctctcgtcttctaggttaatccaatttcgtcgattcatgaagttcacaattctcccatcggaaaattcttcgtaatcgacgacgaagagatc

SEQ ID NO: 11503 - DNA, 3000 bp, Unknown
  misc_feature (1)..( 3000): cDNA_ID_1443075_gDNA_ID_2214499_Annot_ID_133629 3000 nt of promoter + ATG
tcaaagctgaaatcaaggtgctgcctaactacgatgttgctttggtatctttccataactttctctttttgtgacttttttttttttttttttttcatttctaaattccttcatttaacttttctaaagtattgtagtattactttaaaatcaaccaaaatttatacagtattgttactatgatgtgtgtatgcatatggggtcaccgcgtttgatggtggcgtgtatttgtcaaaatggactatgcttttaattaaacgttagatctggggttctctattcttcttttttagtcataaatcataatatatacgttatgatataatattgtagcctctatgtttcgatttttgttcctcgatgtatcaatcttgaaaagaatcttagtttcattctaggtaatctcaaggtgtgaaaatcctatgtacataaatatgtaaagaattctcaaccattattcttaaaccaaaaatctctatcaaaaccggtccaacaccagaacatcttgatgatctagacaaatcagtttcttaaaaaaattattgatatgcaccactttactaagaaggagaataacaaaaaaaacaaaatgaaggtaccttgtcggtgtcacgtggggaagaacatgtgaaaacaaacgaacaataattggaagaaaaaaaaatgtgaatcttgtgatggatcaaattaggtatattctttgtagctctttagtgttcgttcactcacagcctcaggccctcagctttggtcttatccaaacgactggcccgcataacagagacattacacaatacgaatgcgtttctatattactgctccatactcaaatcgaatcctggagacagattcttattttttttgttatattcaattgtttagattactaaaagccaaaatcataaaaactttaaacgatttgattattatatcaccaaaatattggcttttaatccatgttaatactgattaacttgaaatatacttatatttttggttattggggaggaaggaatacaaataatctttttcgacactgaatagtttcctttgaatgaaagctgataaaatagtgtataagttcatttttttataacgtaattttttttttggtaatgtgaacaccctaaaaagatctccttctgatgtagaaatattatacccatacacatcgataagttagtttgtggaaagaaaaactaactaacaaaataacaccttcaattcgacaaaagagcataagtttaataaaatacctacagaaatttttgacgatgataccactaccattcgccaaaaccacaataattcaattcttctaaatgtagattctattaatatggtcgattgtcattattccaaataatttatttttttaaatgaaaaattcataactctaaatatacaaaagcaattgctgatttggattcaaattttcaaagagaacttgtagttatgcatatacataaaaaggtaagtcagtttttttttttggctaataaaaacggtaaaatcatgttattgataaaaaatttgaaaacagtaaaagaaatatgaccatatttgaaaatttacctaaaaactataatgatgtaatagtttgatttacttacatttaactaatttttaaggtctgttgatcgaactcgttaccttgaacaattagtaggacaactcaaaccactaaaccattatactttaaggatttatgtaaaatttcaaatatatatagtttagtagatgcacttatcatcacactcaccaattggatgtcaacacctggttctagctttttaattaccaaagtgaaaaaactgactttttctaaaaaaaattcgttctagatggatgctcttcaaattcgttctaaaaaaaactgacataataccatccctttaaaaacacagaattttttttatcatctctgaaacaaatcatttacagtagtaaatgtcaacacaacattaattctgtttgttgttggcatttacaattgcaaaatcattttctcatttattattcgtatttattttgtcaagaacccttgtctctaaaatattcatagaaaaagaaaagagccattaattaatggcttgaagaaagattggtgtataagcgtctacgtgacctttaattaatttacttcccccaaaaaagtcaacattcaacatgtgaataaaaatcaatattggtttctaagtaagtaagtaccatattattaaattatttattttggtaaatacgcactcaatttttctctcaacggtgtatataaacaaaaggagtctcctttggaaaaaacttgcctatcattttgccaacgaacgttctttcttcttaatcacagctcagcctgacgcaaccgctcaggctgatctcttccaatttacagccatttcccagctcagatctctgatccggtgagatctctctcaaggtaatgcccctgcaattttgcttacttctctggttgtgatatgcatgttcttcgaattttcatcgtttgtgatttgaattctcattttgtatttgctgttgttggtttttaattcgattttccggaacagattatgggatttgtattcgaatcttcgatttgatgacataatgtcccagccttttatgtttaatcttgaaatgatggacttttatccgatctgggtttaaagctggaattttgattgtgggtactattaggtttcattgatttattgcttggtccaacatttttagcagctggtattgagctcttgttgtctgaattttggaaagaactatttttgttgtatcgttttgatttatttggatctgaattcattcacctttttctctgattattgttttgtgtcggttgcatccactttgattagatctgaatgaatcatttttttatgtgctcaagttattgtatggattgttctgtttctagcatgttttggttagacattgttaagatctgacgtttgcattttcaggaaaaggagttagagcatcatcaag

SEQ ID NO: 11504 - DNA, 3000 bp, Unknown
  misc_feature (1)..( 3000): cDNA_ID_2706663_gDNA_ID_2214499_Annot_ID_133631 3000 nt of promoter + ATG
gtggccttcatgttgttatcgatctgactttaaagagaaggaggtaaaacattcataattggtcctcgttagacttttcttaagtttaagtagattgatagatggtaatacaagtcatgtttttatatcataagagaagattctgagaggaggaaaatttgcagatttcaacgttgatggatggtcttgagaagtactggcctagtctcagttgtggttctccatcatcatgcaatggtgggaaagggtcattttggggccacgaggtgattatcttttcacatctgttattaacttttcatagataggtgtttccatctcctatgacattgtctttcagtcttcaccaaaactaactctgtttcatttgttggttgtcatgtatatctttgcaatacacgctggcagtggggtaattatattcaatctttacttctttaatttgatttttctttcgatttccttccacataatttgtatagaacttgattcattggtgttgttatagagttccatgcttaatctcacaaccttttgcataacagtgagttagttagcagaatacattcgggtttggttatatgctaattcgataacataggttctctctctaacgattttgctgataattttttattttcagagaaacatgggacttgttcttctcctgtttttcatgatgagtataattacttccttaccacacttaatctctacttgaagcataatgtcacggtaagtcttcatcgagttatgcttttatgttatgatataatgcatagtggactggttaaataagaaagttgggcatacggaagatttacatgtgttaactatttgcttgcattcttctgcaatgtagtttttctatgcgatgtaaatgatcatgtatcttagatttcctctgctctgtcagtttatcagtttgtgaagacactttcttacattttttctctcttggataagttcttaatgcctctgcatctgtaaatgtggtaggatgtcctttatcaagctggctatgttgcttccaacagtgaaaagtatcctctaggaggtatcgtaacagccattcagaatgcatttcatatcacccctgaagtggtttgcaaaagagatgcaatcgatgaaatacgtatatgcttctataaagattttaaggtttgttttcgagattcattcttagattgttgatttccttttaaagtctgaaattgctctcgcatgataagaaaactcaaataacatgtctccaagcattatgaaattatcagacaaagtcttaatgctgtgtgtagaaattgcttggtttggcaagatttgctaatcattaacattattactgtttttcctggtttaaagctaaaacatcttgctagactttgagaatggcaccagtttctgacagttttgttaattcatgactacagcccagggactgtgttggttcacaagatttgacatctagaaagtcatgccccaagtacgtaagtttgccggaatacacgccattaggtaagtaaaaatcatatcttgaaggaggcataattgcaagagtattagataagtaatggatatatgataaaaatgataagaagtaatgtgatgacatctatatttgtgggttatgcagatggtgaagctatggttctgaagatgccaacagaaagagaagctctttgaatcggaaaagatgggagctttgttatcttctgagagacaatacatacatgtctctgatgttgtaactttactaccaaaacctataaagattggcttatttcgttctattggatatgtatcatcattactggtaaatcaagtttctttctaataatgtagaagatcagaaaatccataagaagatatcaacatttgagttctatggtaaattgaattatatcaacttagttgcaatgattcattcttgactgatgcattgatggcttatcaaaccagtttacaaaattcgattagatatttatgcttaattgcttacgtataattaacgaatatatctgaccaacaagaaatatatacagatatatacaacgaatagatgctatagaaagataaactcatatcaaatcaactacaactgatcgtaaatcttaacaataatcccccaaattgttttataaaaaagaaaaagaaaataaaactcaagtcactgtccaaagaaaaagtgatgacaaagataacttttatgttactacaatcgtatgaattagttccaaagacaattcaagagttcctttatccacgatacaacgatcactgttcaaatcaacgagacgagctgcaccagagaactttccatcctttggcaatcgaatcttagcccgacctatggcaacttctccatctgatgttgcaggatctctagaagaatgttttctaaacaattctaggtaaagatattttgcaggagaatctaagggaatcgccaattctgtattatacttccaatagttgcctttggaaacccatacctgtgttgtgtatggttctacagggtctgtccatgcaataactttatagtagtttggatgttgcaaaagattttggtcatcggttgtgcatgcacgtaatatcttcacgattagctttgtttctatgtgatgatcaatctttctcttcccttcgcgaatcagtctccttttttgtctccctaagtttgtcattgagactctggctgttaggtcttgtgaattttaaatatatatatatatatatatatatatatatatatttctaggggaaactaaaaaaaaagagtatccttttatttcggaaaatattttataaattgcgtttgagatgaacaggctaaacctaacgaagtttcatcataatccaaacaatttaaataagtaatactaaaaagattctgagaagcttaagagtaaacacaatatacatcgtatcaggaaaaatatatatagttagaggcatatatatcgaacttatttcttttagaaaaaaattaagtcactagct

SEQ ID NO: 11505 - DNA, 3000 bp, Unknown
  misc_feature (1)..( 3000): cDNA_ID_3593715_gDNA_ID_2214499_Annot_ID_133632 3000 nt of promoter + ATG
gttccaatttttttttttttattttgttacaatacaattgtggtctatattaaaaactctttaaaacataatccataaaaattcgaggcgtatgcgttcactatctataatgtcatgttcaactatgacgcattggctctatatatatattatgtatgtattacatatattatcaatgtttggtatgagtcgggaaaaaataaaggtccgatccactatactaatctttgtgcttctttcgtatcgacgccatcatttcatcggactccattttaatctagttcatgctataataaacaaataataaacacacgtggatcaatttcatgcgagaaagaaaaagtcgtttagacatacacatcacttcttatcatttacccaaaatgctaagaaatataaattccattttcgaccattttaaaacctatttctccacgtaaacaaaaaaactacgcaaaaaatcgaaaaagtagttttttctctctctctttttcacactcattatatctataacccacatattctaacaaatactagtagcatttacgaatcaagattctccaacataaaatgtatttctcacttacttctccattatcgttttatgtacccttttttttacgtaccaatcaaaatcgcatctttcttttcaaatataattatgtatatatacgcatgtgcagctgctgcgtgtctatgcatacttgagtctaaataactatccctgactatgatatgtcgttggttacgaatgtgatctttagttaaaataacaagaataatatcacacagacaaaaacaaataagtgcatattatttcaacaagattggagtgggtgggcctaaaggcttaaaaaaatagagcacatgcacagaggaccattgattccccagagacaatcagacatctgagaccctaatcgcatcaagccgcgtgcccttcttccattaactaattttgtgtgtttgttttggcttaaacctgagaattacattgattactttatttgtttcattttctccatgaaggagataaaaagagtaaaaattagagattgatgaaaactgaaaaagaaactgaagtcggtaagataggtgttggaacttggaataatggcttggctttgaacaaaacgcatgcaccattcattgccttcaagttttttgcaattagctttgtttttgtttttgtttttgtttttgggagaggttctaatgaccaagaatcaagagcgttgtctaaaatctaaaccatatgatacggtttttaatattctcatgcattaaaatgtactatttctatatatgatcttatatacccaacatcttggaattaatagtttgattcgttatcatttgaagaagctctcaacagcttcaaaaagcgaaatgtagcatcatgaagcggtatccaatttcaagaagctaccagtagcttgtggaagttttcaagaagttttccggaagatccaacgattgtggaagcccctcatagtttttggaagttttcaatgatattagcagcgttgagcgtggcatggctagacaatgtaagagatttgatttgcaacacatttgatgtatttttttacttttgagttacaattgtaatgtattattgattttgcccagttatgatttataaaccctacaatttagtatcaaagtttttatttaaaattctgaatctgacattaatgatatctggctcatttacagagccaatgagatggatgatgttcgaaactggattggccattatttatcttttttttatctggagaatctcgaggttggcacaaacattatcatattagcctttagaaattggattggctaatcacacatttatatatattcttaccaaaataaatcacctctcccgtaattgaaaaatatctaaatactgtaagtctgaaaaaattcacaagggttcgaagaaagaaggaaatatctaagcatcattaataaactatctgtaacctgagggaaaatcatttcatgttgaaatatgtggatttggaagttttataatctatctgaatttgtgaaatttgataacaagtaagatttgtttcttaacacaaatctaaaatttgttttctaattaggtttgagagagagagagaaagaaacgctttgtatgatacacatctaggctatgaatgaaggcagcggacaaagcggtctaatttgtctgcggtttagtccatctcatttttggggtggacaataaaccgctgcggaccaagtttatttgtatgtaaaaacggtccgcagatggtccgcaacgattttcttctatttttttaagtccagaccactgcggactataattgatgaatgataaataaaaaacggtctgatccgttgacggttttgtccgccccaaccgccataaccattcaaacccctaattatttcatcagataacattatacactaataatcattgcactcaaatatgtcacacaatcatataataaaataataacaatgattaaaatgaaaaaattgttgtggcgccgcataaaatagaaatcgtgagagacgacgtcatctaaaaattgccttgctgtccacttttcactttgtcctctcttctcatctccgttcacttccacggcgtttcctcagccgccgattttatttatttcccaaaatacccatcacctatagcgccacaatcctctacatcacaccctaatctcattaccatacaccacccaacgaacacgcgccacttcatttgttagtatctaaaataccaaacctacccttagttccacacgtggcgtttcctggtttgataacagagcctgagtctctggtgtcgctggtgtttataaaccccttcatatcttccttggtgatctccacctttccctcacctgatatttattttcttaccttaaatacgacggtgcttcactgagtccgactcagttaactcgttcctctctctgtgtgtggttttggtagacgacgacgacgataatg

SEQ ID NO: 11506 - DNA, 3000 bp, Unknown
  misc_feature (1)..( 3000): cDNA_ID_2706659_gDNA_ID_2214499_Annot_ID_133633 3000 nt of promoter + ATG
tttcattttctggtaacgacattcttagttctaccgcagcacatcaaaatctaaaggtttttacatatatatgttttgtctggtgttgaccgtctcatggagattaaggaaagaaccagaccttgatgaagattgaaagaaccatttgcagaccaaatgctgcagccattacaaccgtgatatcattgttcgtctcgaggtaagaccgtagattcagggcaacaaaacacgatgatgcactaccagctaagagtataatcacccatctcagaaactctactggaataagcaatggaagctgcaaaatagaacatcctgagtgttattatgcttaaacagtatgaagtataaagttgtgatatcaagttaggttgatttatgtcattgtacatggtcattgaaagtgaagttaccaaaccattgtgtatcaagtatatgcatttgtctttagtgttactgatcatcaattgattaattttaacagcaaaagagaccgaagttactgaagatacttacagaggttggaacgaaaatgaagagagagtatccccaaaggcaccagaatcttagaagatcagctttggaccccatataacggagtgcaaaataaaatcccagaggcacaattattgcatatccatatattatagatgctgccaaattcatatagttcacatcaaagatccaaggagcattactgtcggttcgtttcttcacgagatatgtagcacaatttccgagagaagcaagcacaaacacaagcgtagtgcagatccagacaagtccatacctaacagaagcacacacgagtcattaatcaagaataatttgtgaaaggcctagcttttagccaatctttagaggataacatattatgatgctttctgttcatttgtccaagagaaaatgaggatattttaatcaatcgcctgaagtaacataggagtaaatgaatagcaagatcatgctttcggaaaggtgcagaagataacacttagaacggtaacaaattaacggcatgactgagcaatggaccgattaaagaaattcgaaagaactctctcatggtaagtacaatcaccaagaagagtgaaggagaaaaaggcattaaaagacttacaaatcagggtttgcatcaatcttgttgaaaaaatctccactagtaggatataaagagctcattaatctgttcaaaacaacgtccgtgtccacgtcgaagtattgggtatatgagtagacattaaaaaagcccttccagttgtttgatggctgttgtgctggtccttctactggagcagataagatatatcaccatataagacagaacaaggtgaaaacaaaggtatataggatcttgacatccataagaaaaacgaggttgactcacacaagtattctttcaaccattgtactgattcatggtgactacagataaaaatatctcctaaaaaaggaatctaaaaggagcatatatacctgttgggctctcaagagtttgataaccctttgtattgtttcctagattcggtggaaatatttgcatgcttgcagaagggcctgcaataatgcagaagacatacaacactcaatgtctttcactaccggaaaagttctttgcaaaagataattcaagcagaaactagcaaaagaacacaccttcattgacgcttgctattggtacatttgtgcttctcttgtcgtcgctgatcacagcctaagaatacagatgtttgtatcagacataataacacggggatagtcaatccattcactcaaaacatttatcttagcggattcaatccaaaatgaagctatcatgcaagcatttaaactcaaatacagttttgtttttcatacgaattgtctcctaaaatggtgaaaaaacttaaataaaacgccttaacaaatatagaaacccagaaatgcaaataaggaaatcgtccattgttctatgagtgtgaagactttaggcatcatcgtggacgcgaaaaaatatgacaaaaaaatctgaaaagtttcaaaattctacttcctaatgtaacacttgagacagaacaacaaacaaaatgatggcatgaacaaaaaacgttaattttcccttcacacaaacaaggatcatagaaaaactcaatcaaagagcttattgatggtgaaatgaaagaagcaatagatgtaatatagacttaccggaactgaaccaagcaaatggcttgattgtagattagcgaacgactcatccatcgatcaaagagaaaaagatatcaaagaaaaacttagaagataggttcttctaatctcattcaaaaatcgataagatcggaaaaaaggtcgtccctttttctgaatttttaaggtttctgggtttgcttctcctcctccgtcgtcgtggaagcaattgggaaaggaagagaaactaaagaaagaacgatccacgcgctttcttagcaagtcggtaaaacacgcgctgttcactttcggacacgtgatttgccgacttgggcccagacaatcacaagattcacacaagacttcaaaaacaaaggcccatatttaaattttgacccgaatcgtgatttgccgacttgggcccagacaatcacaagattcacacaagacttcaaaaagaaaggcccatatttaaaatttgacccgaattaaacaatccgacttgacccgtttgaggagaaattcactcaacagtgtttcctctcttcgtcttccctcccgagaaagctcaacggagccctagactggttttatcactctcgccaacaccaaccacgctttttctctctttacctccatttttgtattcgtcaccggagtagatggatacgagagaaatcaacggttttgcctccgccgcgagatcgatatctcttcctacgcagcctaattacagtagcaagcctgttcaggttcttccgctttatacctttttatttctccactgaattagtttagctcaggtcttaggatttctaggttcagcttaaaaaa

SEQ ID NO: 11507 - DNA, 3000 bp, Unknown
  misc_feature (1)..( 3000): cDNA_ID_3040159_gDNA_ID_2214499_Annot_ID_133634 3000 nt of promoter + ATG
tgtgccatacatttattaattggtgtagcttacaaactttccaaattatatttcaggaagcttgtaggattctacctgaaatatgcggtccagaaacctaccccaaagttgcgcaagtcctgttagaaagggataaccctgaaacagctcttatggtcttgcgttggtctggtcgtgatggtgtatcagaattggtttcaattggtgaagctgtcacagctcttcgtgtgagagtggaatgtggtcttttgagtgaagcattcacataccaaaggacactctgcttgaaagtaaaggaaaataatttgaaaaatggagctgtgaaacatgcgtctgatgatctagacatctggagttggacggaatggatggagatacttgtcaatgaattctgctgtctttctattcggagaaacttggttgatcgaatcattgagttaccgtggaacccagatgaggagaaatatctgcacagatgcttattagattcggcaactgatgacccctcatcagctgtgggtagtctcttggttgtcttttatcttcaggtaagtaattatattttcaaactttaaataacttcacttgaacaatgggctgagaattgtttttcagaacgagaatagctttagcaacaggcaaatagatatttagacagcagcttaaacctcccgagctttaagctacatattgaaaattttaataagggatctcaatgatggctctgtatagaattagctcattctatagagactggtatatgttctcgtatttgatgtgtggcttcaacaatcttttataattcgagcttggtgtagtctgggatgttggttaacaagcatgaaattatttgaacaaccagggaaactgcatcactatagaccatgcttattttctggaaagttattatcttttgtatatggtctttctttgactagaaattactggttgttcacattgctgcagcgctaccgttacatccaggcataccaagtcgatcttaggcttcagaaaatcgaagaggctttcgtatccgacaatcaaattggggaagaagttatgttcagaatgcgatcacagagtcattggagaaaagagttagttgtaagtatttcagccaactttccatgtacaagtggatccttccatagttccttgttaaaggctacatcctcacatttgcgttttagtgcttaataacctgttgatgcttgcaggattgtctagtattctgaaacttgaatgtacaatattacttgatactggctttttttaactggacatttaaacctcccgtgtctctgctcctttgaaacaggatagagccatagatatacttccagtaattcagcagcagcaagttagatctggacaattttctgagatggaagatgcctctgaaggagcaaaaaaatctgatcttcctgatgcacctgacatgattacttcttcagttccctttgccactactaattccgtttttctccaaagtgctaacaatgccagagctagagagccagtggctaataatggcagtccttttcaacctggtcatatgataggaaacgcgtcccatgatctttcacatggaaggttatttacaaacgcaaatagaggacaaaagagtgaagttagaagcgtaaccaagaatctgaaattcggtgaaatgtcaactccgttcaaagatctaaatagagctcgtgggaacagccagctccaagggaaaaggactgaagaatcctctccagaagtaaatgttgatagatacatagagaataatatgagctctccttatctccgccgaatcacagctaacaatcccgtgacagtgaaatctagcagcaaccatctcaatggatcttcacagaaaccggaatccaccttttttggcacaaggatgcaaccagacaaagataactttgttgatttggatgatccaatggacatgtcttcgaggtattcctctcttctttatctcttagccatttgttcctttctgaatcgtgccattaaagtagaggacactggtattgtttggtataaaactattgttaccgtttggtttgaaaataaagtccagtttggtttcagtctaaggaactttgtttggttcttatgtccacggcttttagtcttatattggatgagctacatatcaattgtgtgtattatgaattgcagcttaaaggacaacaacaacaatgtcttggccacggagagcagaaataacagtggtggattgagatggcggtcagatgaaacaagcgatgacgaagatgaactgactagttttggttccatgccggtgaagggaaggaggagacgtagattcgcagcaagatgaaatgaaacaaacactcgaaaagaccatcatcaattatgtttaaagcatagagaaagagagagagaggtagagcaagttgtgtaaagaggggagagagactgttacagtgagcgttgttctcctgttattttttgtgctgaattttgtgtatttcttctctagtctaccttttttggacagttattttaaagatatcattgtgatgagcggagtgatattattattatgagtatgtttaatttcttatattggtgcagctgattgttgaatcgtagaagttataacaacacattgagattaaatcattttctttttacattcacaatttcctctcaaaattttaatttttaacttttttattatttaccaaaactaataaatggaaataagtagcataagcttgttccaagtttctgatatataaatagggttttcggaagagagaatagggtctcttcctatcgttccgtcactttttgttccgatttgtcgacaaggtaaaccttaaaactaaatctttcaatatagcataaccaatgatccgaaaacctaaatctttcattctctgtttctgccttggatctgtattgaaattcataatctcatattaggttttcgtgttacttaattccgcaggtgtttgttggatccatatc

SEQ ID NO: 11508 - DNA, 3000 bp, Unknown
  misc_feature (1)..( 3000): cDNA_ID_3040159_gDNA_ID_2214499_Annot_ID_183930 3000 nt of promoter + ATG
ttgaaaacttcctttttttcttttatatatttttactccataagcaaaataagtggtagcaaacaaaaccaaaaaatgaaaaaacacaatcgttacaagcaacgatgaaaatccgccagtaaaaacgaaaccgaatgatttagcggatatgttccttcttctactttgtgggtttcattttctggtaacgacattcttagttctaccgcagcacatcaaaatctaaaggtttttacatatatatgttttgtctggtgttgaccgtctcatggagattaaggaaagaaccagaccttgatgaagattgaaagaaccatttgcagaccaaatgctgcagccattacaaccgtgatatcattgttcgtctcgaggtaagaccgtagattcagggcaacaaaacacgatgatgcactaccagctaagagtataatcacccatctcagaaactctactggaataagcaatggaagctgcaaaatagaacatcctgagtgttattatgcttaaacagtatgaagtataaagttgtgatatcaagttaggttgatttatgtcattgtacatggtcattgaaagtgaagttaccaaaccattgtgtatcaagtatatgcatttgtctttagtgttactgatcatcaattgattaattttaacagcaaaagagaccgaagttactgaagatacttacagaggttggaacgaaaatgaagagagagtatccccaaaggcaccagaatcttagaagatcagctttggaccccatataacggagtgcaaaataaaatcccagaggcacaattattgcatatccatatattatagatgctgccaaattcatatagttcacatcaaagatccaaggagcattactgtcggttcgtttcttcacgagatatgtagcacaatttccgagagaagcaagcacaaacacaagcgtagtgcagatccagacaagtccatacctaacagaagcacacacgagtcattaatcaagaataatttgtgaaaggcctagcttttagccaatctttagaggataacatattatgatgctttctgttcatttgtccaagagaaaatgaggatattttaatcaatcgcctgaagtaacataggagtaaatgaatagcaagatcatgctttcggaaaggtgcagaagataacacttagaacggtaacaaattaacggcatgactgagcaatggaccgattaaagaaattcgaaagaactctctcatggtaagtacaatcaccaagaagagtgaaggagaaaaaggcattaaaagacttacaaatcagggtttgcatcaatcttgttgaaaaaatctccactagtaggatataaagagctcattaatctgttcaaaacaacgtccgtgtccacgtcgaagtattgggtatatgagtagacattaaaaaagcccttccagttgtttgatggctgttgtgctggtccttctactggagcagataagatatatcaccatataagacagaacaaggtgaaaacaaaggtatataggatcttgacatccataagaaaaacgaggttgactcacacaagtattctttcaaccattgtactgattcatggtgactacagataaaaatatctcctaaaaaaggaatctaaaaggagcatatatacctgttgggctctcaagagtttgataaccctttgtattgtttcctagattcggtggaaatatttgcatgcttgcagaagggcctgcaataatgcagaagacatacaacactcaatgtctttcactaccggaaaagttctttgcaaaagataattcaagcagaaactagcaaaagaacacaccttcattgacgcttgctattggtacatttgtgcttctcttgtcgtcgctgatcacagcctaagaatacagatgtttgtatcagacataataacacggggatagtcaatccattcactcaaaacatttatcttagcggattcaatccaaaatgaagctatcatgcaagcatttaaactcaaatacagttttgtttttcatacgaattgtctcctaaaatggtgaaaaaacttaaataaaacgccttaacaaatatagaaacccagaaatgcaaataaggaaatcgtccattgttctatgagtgtgaagactttaggcatcatcgtggacgcgaaaaaatatgacaaaaaaatctgaaaagtttcaaaattctacttcctaatgtaacacttgagacagaacaacaaacaaaatgatggcatgaacaaaaaacgttaattttcccttcacacaaacaaggatcatagaaaaactcaatcaaagagcttattgatggtgaaatgaaagaagcaatagatgtaatatagacttaccggaactgaaccaagcaaatggcttgattgtagattagcgaacgactcatccatcgatcaaagagaaaaagatatcaaagaaaaacttagaagataggttcttctaatctcattcaaaaatcgataagatcggaaaaaaggtcgtccctttttctgaatttttaaggtttctgggtttgcttctcctcctccgtcgtcgtggaagcaattgggaaaggaagagaaactaaagaaagaacgatccacgcgctttcttagcaagtcggtaaaacacgcgctgttcactttcggacacgtgatttgccgacttgggcccagacaatcacaagattcacacaagacttcaaaaacaaaggcccatatttaaattttgacccgaatcgtgatttgccgacttgggcccagacaatcacaagattcacacaagacttcaaaaagaaaggcccatatttaaaatttgacccgaattaaacaatccgacttgacccgtttgaggagaaattcactcaacagtgtttcctctcttcgtcttccctcccgagaaagctcaacggagccctagactggttttatcactctcgccaacaccaaccacgctttttctctctttacctccatttttgtattcgtcaccggagtag

SEQ ID NO: 11509 - DNA, 3000 bp, Unknown; identical to SEQ ID NO: 11505
  misc_feature (1)..( 3000): cDNA_ID_3593715_gDNA_ID_2214499_Annot_ID_183928 3000 nt of promoter + ATG

SEQ ID NO: 11510 - DNA, 3000 bp, Unknown
  misc_feature (1)..( 3000): cDNA_ID_3040116_gDNA_ID_2214499_Annot_ID_183927 3000 nt of promoter + ATG
aaagataacttttatgttactacaatcgtatgaattagttccaaagacaattcaagagttcctttatccacgatacaacgatcactgttcaaatcaacgagacgagctgcaccagagaactttccatcctttggcaatcgaatcttagcccgacctatggcaacttctccatctgatgttgcaggatctctagaagaatgttttctaaacaattctaggtaaagatattttgcaggagaatctaagggaatcgccaattctgtattatacttccaatagttgcctttggaaacccatacctgtgttgtgtatggttctacagggtctgtccatgcaataactttatagtagtttggatgttgcaaaagattttggtcatcggttgtgcatgcacgtaatatcttcacgattagctttgtttctatgtgatgatcaatctttctcttcccttcgcgaatcagtctccttttttgtctccctaagtttgtcattgagactctggctgttaggtcttgtgaattttaaatatatatatatatatatatatatatatatatatttctaggggaaactaaaaaaaaagagtatccttttatttcggaaaatattttataaattgcgtttgagatgaacaggctaaacctaacgaagtttcatcataatccaaacaatttaaataagtaatactaaaaagattctgagaagcttaagagtaaacacaatatacatcgtatcaggaaaaatatatatagttagaggcatatatatcgaacttatttcttttagaaaaaaattaagtcactagctatggcttttgcttggtgcgtacgcaggtcagcatctaagttggcttccgcatgtggtcaagcccggtctatctccgccgttgtgaaccgtccgtctcttgctctcaacccgtctccgctgagtcctttcgtctctcgtggctttctttacacgatggctgttgataagctgagctctgagcaaacccttcaccttgtgattgactccgagctcaattctgctttgcaaaccgatgatcccaatttggtaaaactttcacatctttgctcaaaatttcattcctaacaaaacataaattagtatcgtttagctttactttgcgaataagtttctgataatattcttacgagacttttttttttttttgttctgacattctattggggtttgtttgggggcagaatgaagagatggctccaggaagcttccctttgaaaattagagacaagcctggagatcagagtgtaacattgacagcatattacaatgacgaacgtattcatgttgatgtaggaatgccttatcttggtgatgatgtcattgatgtgtttggtcctaataatgatgaactaagttttccactagttgtgactgttatcaagaagaacggagtcagcatagagtttacctgccaggcttatgctgattatattgacttaacagatttaactgtgcatgattatcagtatcaaatgggagaaactgactggcctcgtttcaagtaagctctttgaattcaataattaatattttttagagatgggcatgagcatagacgtttattggtgtgtgtttccatcgcattttgtagaaacttggacgataatctgaagaaggcgttccacaggtatctggcgaccagacttgacgcaaacataacgaaactcttgcataagtacatggtgagcaaaataaagagagagtacttgctatggttgaagaatgttaacaagtttgtggatggatgaaaggtaataagtttggatattgttaaaaaaagtctcttcttgtgttagttgatagcattcaaatgtgtttttagcaatttgcataatcttttgagaacatttgaatgtgtttaaatgactttcaagttctgatgtgagtttgatattcacttatgcttcccaattaataccaatccaaacttaaatccaaagatatagataaaaaaagaaaagaaaatgataaggagtagaggatcatctaatactatatatcagaaaggtgtaggtataaaatgttcttcatgaatcgtatttttggtgtgtgtaaatttctctttgtccacataagaaaaagaaagagggattgaagaagaagagaatgctagtttcttccactctgtttatcaaacagtgcataataatctatataagtgttaggaaaaaaaatgggtgtgtttgcaaaatagtcactttttcaaacttaattaggaaaatagtcactttactattcataatttgcaaaatagtcacttttcactgtttgattcgtacacttggattgtacatcacttttagtgtacaaatataaaatgtacgctgtgtatttttatatatatttgtacactaaaagtgatgtacaatccaagtgtacaaatcaaacagtgaaaaagtgactattttgcaaattatgaatagtaaagtgactacttttccaattaagtttaaaaaagtgactaaatagcaacttaagccaaaaaaaatctatgttcaagcacaatgttttgagaatttagggtaatgactttcaagttgagatacgagtttggaattcacttttaacaatatgttcttcatgttcttacttataatttaccttactcaataataataaacatatttatttatttttgtcatttattcacttcaataaaaatttatttatattggcacctgatctgattaattaagtaaatcaattaagaaaaaaaaaactaaaaaaattaataaaaatattttgaattttacagattttttgtaatgcaatttgttagatgataaatttccccctaatatttttggcttgatttagaatgttatttggttcgttgatttgaattaaccatcgaaccgaaccgggctgatacggagcctcaacttcaatcgctgttaaaaccttaaaacccttgaaactccattttcttccttcactcacagaagaagagagaatcaatcaaatcaaatcacc

SEQ ID NO: 11511 - DNA, 3000 bp, Unknown; identical to SEQ ID NO: 11504
  misc_feature (1)..( 3000): cDNA_ID_3040120_gDNA_ID_2214499_Annot_ID_183926 3000 nt of promoter + ATG

SEQ ID NO: 11512 - DNA, 3000 bp, Unknown; identical to SEQ ID NO: 11503
  misc_feature (1)..( 3000): cDNA_ID_1443075_gDNA_ID_2214499_Annot_ID_183923 3000 nt of promoter + ATG

SEQ ID NO: 11513 - DNA, 3000 bp, Unknown; identical to SEQ ID NO: 11502
  misc_feature (1)..( 3000): cDNA_ID_2717448_gDNA_ID_2214499_Annot_ID_183922 3000 nt of promoter + ATG

SEQ ID NO: 11514 - DNA, 3000 bp, Unknown; identical to SEQ ID NO: 11501
  misc_feature (1)..( 3000): cDNA_ID_1807971_gDNA_ID_2214499_Annot_ID_183921 3000 nt of promoter + ATG

SEQ ID NO: 11515 - DNA, 3000 bp, Unknown
  misc_feature (1)..( 3000): cDNA_ID_3040126_gDNA_ID_2214499_Annot_ID_183920 3000 nt of promoter + ATG
atcgatttaaacacatctactaaatctatagttcacaagtagagaataaaagaagcatcaaagtatctttagatttcctagttaaagtcctgattcttctgttctgtcagagaatctcaaagtgattcaaacgatcaaattcttgagctatatttgtaaaaaccaaagctattcaagtggtggataagcacaaagcgttaagattatgttaaaagtaacattaaaccactaatggagattgaagtgtaccggagctctgttgatggcaccgacggtggaaactgcggcggccatatctcaagactgcgacgagtatgcgtcacaacacaagaagctgaagagaggaattagattggtagaagaagaagcttagagagatgttggtgtgagcaagaaactgagagatttataaagcgagtgatcaacaaccaattcgttatctcttcgtcttcaaggcttaactctctgatcgccacacgatgcggattggccaagttgccacgaggaagatgattaggaggattctattttgattggtccacgtggaatatgtttatgaggttgtcgtcaaatggctaatctgtgccaatggatttgttttttttttcaagtgaagattataacattatttattaccacatatgctttggaaaatcattgtttttttttttttttttgaggattgaggtaagccattcatatgtgatcaagatacttctacactcttcttcatacgataacattccaaaattttggataatgacattgcttatcgataataatgttccaaataaccgatgtaaactgattggtggagagaaattggcttagccaatagaatataattctaattttgttatatacaactctagatacaacaggtatcaagtatgtggttatcaaattaaccatattgtactaaaccgctaaaaactaattaatgcaactttttctttacacaaaatgtaaaaacaagtgatgcaatgcatacgtaagatttgataaatatatagtttagaagatgaagtaaagatagtcgaggctaagatagcatcatgcaaaatatcatatgctaaaatatgaaataagattatagtgtttaaattcatagtgaaaatatgaatatatcagaaattcatatgaatttacttgttttaaaataaaaatgataactatatcatagtttattgttccctcaaagttactataaaaacaactcatctaaaactatatattcacaatcacaagcaatcgttttctacactaagctataaaatgaaacacttcacttgtctgatcattataatttctcatcctcttcattattttcagttttctcaaccattctctcatgtggaacgagccatcatatcatcaatggacaaaaccaaattttaattttaggcttcattcgctgccgacgaagcaatatgtacatgttctacatgcaagacaagagaacaaagattactgatatgatattaaactattattgatccatatataagacatgttgaagaaccaaacgattgataataatgtggtggagctactcgcacaatgctaaatgttaactgtatgtgacaaaattagcaaaagtttgcgtgccaggtttgattcttagtacacatacatgacttttaacatactgaggttagaaaatgaagtacagtaaaacctttataaattaataatgttgggactgcaaaattttattaatttaaaaaggttttaatttatcgataaattaatattttttaattatagagaaattttcctaatttggtaactttttaaaaagttttataagatttttttcattatagaaaatatctttctaaaatcaattacaagtacaaaattatatcatgtctagaaaacaataccaaattttttttgatacagtaacacattagaactaaatttcaaataagaataactacaaatttaagtaaaaaaaaatcaaaaacatttcttacatataatgtatatatatagttgatacatttatgcaattattaatttatgatattgatgagactatatatttacataggactttcaaaaaagttattatcttattaatttatcgatgtgttacactttttacattggtcctaacttgggatctggtgaatttattaatttatagaggttactaatttatcgagtattaatttatggaggtttaactgtaaaaagagttgaggttaccattgcaataaaatatgagacaatgtgtagaggaggataaaagattgaacaaaaagaagaaagccaactagtttttgtcaaaaggataattttccatgtgcatgcaagtatgcaaccacatcaaaatcataaataaacattgtctaaaatgtttctaataaaaatagatgtaaagaaaattcatcagtttaataactagggtttaagagatatttacaaatactaaccattaacatcatatttaatatgactttgtaaaatctatgatcaaataacatgcaatttttttaatatgtaaaataaattatctcaaaatatttgattgaatatataccctttaatttagcattgattttaaaaatccaacaattttctatagtatattttgtaataatgttattggttcctaaaaaagatggtcacatcattcattaaataaaatgaaataaagaagtgtttccttcgtcgcattgaataaaataaagtaaaccttccaaagacttttcattgtcttcgcctgcgagcgctaaaattatctccgagcattctcaagttgggtgattcggtacggattactgatttgggagagaaaaaccctagattggaattagattctgggttcttgggctaaaggtttcttcatctccttcgaatcatccttttgtaagtccagtggatgtgaaaacccagtactcactgattctttttattaggaattttgtaaggttttgggtagagttttcacagttttgatgatactaaaatgtgggccactgggtctagaga

SEQ ID NO: 11516 - DNA, 3000 bp, Unknown; identical to SEQ ID NO: 11499
  misc_feature (1)..( 3000): cDNA_ID_2706669_gDNA_ID_2214499_Annot_ID_183919 3000 nt of promoter + ATG

SEQ ID NO: 11517 - DNA, 2281 bp, Unknown
  misc_feature (1)..( 2281): cDNA_ID_3040253_gDNA_ID_2214500_Annot_ID_133637 3000 nt of promoter + ATG
gaattcttgtttttaactataaggataaattcacaattatatctaaaaatgtgtgtgcgtgagttgtagacaattaaaactattgatcattaaaatttactataaagtcgttggagaaaaagtttactataattgttggaaaaaaaaaatttactataaggtctcattcgtattctgaccatagttttcattggactgttaaatttgttatattctttgtatgactaaaagaacatctacatgcatgccaaataaagcgaccacattaaaaagtttgatccagttttggttcgaatttaatttggaaatttgagttttgtgtttattttgtaatgtagaagaataaacttgaaagtgttaatacgttcaattatatttggtttcgattgaaattcaatctaatgtggttagatgagtcctatattaccatgtcattgttaatacccattgccaaaaataaaagtgaagcagaaggagaaattgtttttgtatacccgaaggaattaagatgtacgatcttaaaatagacatttcggccatctatcaaaataaatgtctaaaagttttgtggtcgtcttaaatactacttcgagttcagacgtatacgtctcaccaaagtaatgcacatacttgatgttaagtttatctctttttactatttcaaatttcgcgtttgacaacactttaagtctacattatccatagagaatataacataaagatcatgaacttctcatgaatgtataagacaaatcaagcttatatatgagatctatttagtaatttgatatgtatgtaatatatgataaatctttgatgcaatattttattatgattattagatatacactagtcaactttaactttagaagattaatcattccgtcgcaaaccataccataaattagcaagggatcgacttaatatctccgatccgctatatatttaagaagcatttagattgtttataatacatgtcatgattttataattatgtatatataaatactaattgatgtatgaagtacgtagataatgttacgatctattaatctatttacattaacttttaattagtgttgagtagggaaaattaacatataaacctttagcagttggttgtattattaaaaataatttgaacttaaaatccaccttcgaaaagataaatcaaacaagtataaaaaatgctataaatccagaatatttacctaaggtttttattcttctacttaataatgtaagataaaaccggcacaatacttgttacgtatgcatggtaggtaccgcaattgtgtaagcaaatcggcacaatactaaggttacatatactaactaaataaaacaatctgatttcagtgacaccgtatatctaacctttattcaaatccaagggaacatgacttgacttcttctgttggaactaactcgatccctcaaccatctccagggatagaagagttagtaaaatcaaacttgaagtgaggaagtaagcagtttaacgactccatatgactacagttatatacaaagttgggcacaaagtacaagtactaaatactcaaagtcagataataattttaataagtacaaactatatatatgcagtacaattattgagtatatataaacgagactggtgatttggggcattgtccaccagggtgttatatcccaattgaaatttgaaaatttaagtgtgtgagtgttacgacaaaaaaaagtgtgtgaattgtaggcgcggtgaaaaggtaaattaagattggaactagaaaaatagttgaatatcctttactaaaagttgtcaattccggttttagtaaaaaaaaattttaaaatagaaattttatccaaaagacttcaaacacacatattcgcatatataacataagatatcattttttgtaaacagttaaaaagaaaaacacatgtttttttttttaatttagaaaaaaacatgttattatacaaaacagagttttgcccacttttaatatgttatgaaaagaaaaatgattttcttgggtttggtcagagagattggttgtggtaagaatgggaatcttaattacaaagaattggattttgggtcgacctaccacctaaaacgacgtcgcctccatctctggtttccaaatctctttctcctctccctttataagcttgcgttggccagtcgctcatctcgaaaacagagagaaaaagactaaaaacacagtttaagaagaaggagagatagagagagaagagaaagatagagagggagatggggtctcatatg

SEQ ID NO: 11518 - DNA, 3000 bp, Unknown
  misc_feature (1)..( 3000): cDNA_ID_1020005_gDNA_ID_2214500_Annot_ID_133641 3000 nt of promoter + ATG
ttttatgctgaatgtagatagctagaaacctaattgtttaaagatggagaaaaaaaaactatagtgtcctccataaaaaacaggtcatctccgaagagttattttcaaaatcgacattaatgatcagttacatattttttaatcattatttgaaacaattattttataattttagctaagtatgtgattaaaacaaatgaaaaaaaaaaactctaaaatggagggatgaacatatttggggaagtgatagacaatgatatttcatatttaaccattcgttattgaatttaggagttgataattgaatgcctatgaaaaatatgttcctattgttagaggtgggttggagtcttgaagacagaagacgctctaatatacaactgaagtttgagttgcttgtaaattcaagttttgtataatttattttcattaactgcaaactaaaatttatataatattgcgtgaaacagaagcaaaagcaagcaactcgttgggtaaaatctgcagtttctgcaccaaattaaagaagacctgcaacattgccgcctttacataaatacacacactagatacataggctctatgtatcttatagtatacgatatttgtttagaatattctgcaagttgattaaatttcatggatcagtagacttgtttatattctaaagtttcaagaaatagtcaatttgtctacgtataattaaaccgtttcttagctggaagtttacgataacgtatccaacatttaagtattgtcgagccatataattagagaaaatgactagtgagaacactgagaggtttagcagctgagcaagcaagttacttacaaaacttggaaacaaaggttgtcacactaatattcacactacgtgagaattcgtacagtgcacatcaatataatatttttaaaacagcaaagtgaaaaatgaacatgatactatatatatccaatttattaacaaaattttataacttatagtatcaaaaatagtaagactcatattagaccaatatatattaatgcctacctacctttgaccttaggagaaagtatgaataattaacatgtatccaggaatggcattgtagaaaatactattttacattactatttcatctaaggattgagatttcatatgaattcaatgatttatatttactgccaatatttttttatcttactaatttaaacgaaagagatattttaacttgaaataattagaaaataggttatagatcattcaaacataaaattattaaactgttcaactatttctaaatgatttatgttagccgtcagataattaacatggaaaattctagtttcatcatgataatactccaactatatgtgttaatatgcgtataagagagagtatggcgtagtatccaatcatttcttagtatcatgtagtatttggtatatgccgtatagtagtacccaattatttctttgatgggcaaatgctaatgactaatgagtattttgcaaactcatgatcactgaaaacatgagccttcggtcgacgatcaggtgtcttaaatttgtctgctctttaatttttgtaggataaaaaattgaaaaatttgaactttagaccatagaatagattattccagctagtaatctagaataagaatgatgtgaaaaacttgtatttagtggttgatcatataaccaaaccaaaggatgattacgttttccttaaactctaaaaacatgcagattattgatctgtccatcctagttttaggtacggtattaaatttagatagctgttgaaaaaaaacaaaagtgaagatatctaaatctagatatgttggagcaaatccagtagtggattctaagcaaagtttctaacctataataataataataaaataataaataatattatttaattaagatagtttataaggaaatgtgagagagtttctaattcaagagattttgaagactcttctaactatttttagaaacttttcaaattaaataatattatttcttattttattattattttagtagattagaaactatggttagaaaccaccattgagtatgctcttaatttatatcctataacaagtcaataaatcgtcaaacattaatacgttgcattatttgtttgtcatcatatcttaaatatttcgaattaaatgatacgttttcgtcacacaactaatgctttttagtagatgaaatatagtaaaatacgattttatgtattttgaacccatgtggcgttatgttttaatttattattggatagtagaagaagccggaaattctggatgtcaaatagtcacattaatattcaatgcgaaaacgtaaaaaaaagtaagatgctaccgttacctaaacaaaagttaatggtgtgattttacagcacctgtttaatatttttaaaattacataaaaaaaccaaagagaagtaagaaaaaatgaaaaagagagattggtatataaaaaggaggagtagggggtgaagcccgaagcatcttatagtatttttagcttcattccttcttttgctctgatcaaagtcttctccttcccttctctctctctttcctcctctgcacatttctgggttcttctcttcttatgctctgtttcttttaagacacagaagaaacagtacagagttgagattttcttaaacaaaagtgaaaagagaagaaacaagtgacagctcaaacggacaaaaaccactcttgggtctttcttgcttctgattctttctcttctctaatagaagaaaacgtaagtcactctctctactctcttttttcacactgaagaagagaaaaaacgtgaacaaagaactgtcaattctctttccctctctgttttatcttcttgaattctccaagattgagatctctctcagtctcttatgtgctctgttttctcctctctgttttcacttagttactaaacacaatcgattctttcgctctgttttatttctcagatctagaagctaaaaaa

SEQ ID NO: 11519 - DNA, 3000 bp, Unknown
  misc_feature (1)..( 3000): cDNA_ID_2717466_gDNA_ID_2214500_Annot_ID_133646 3000 nt of promoter + ATG
tttcatttatgattatgattctttggaagaagatatgattttttatgaggcatgattacgataccttctaagaagatatgatctaaatgataacataagtttcttattccgtacacattagaggacccactcgtcatatggtttgtgaccacgttaggctaaatgccataacaagtaagactgtaagaacacatgcatgtaggagctttgattcccatatagtatagaaatcttatataacaaagacaaaaatatattaatagattgtctaaccaagaagggtcgataacaacatctaaccacatgcaagtgagaagtgcatagacgtatcctcaagaaggcagcttccgggaagtttcctttaaggcttttatcgttgattacatttttttagtttcttggccttttcatcattgtgacccctactcctttcgtttattgttgcccatacgtatataagattgaaccaaatcaagaagtttgtgtaacttccaaaatcactaaagatttgtggggctttaataatgttgttctgtattcggacaagacaaatgagtttctcagctgtgtttgcgtctttatttacccacttggattccctaattctctaaactttggcagtatgcgtacggttgagtacttaagtatggttttagaaatcataatttcaataagtacttatattttgatagatttaacttatattctcaggctcaatcattgtcagtggacaaggactacataactagagagcttatgctatcggttttacaaccaaatttaattctccgggactactggctctataatctaattaagattctctacgccactgagttaggagaaagatttataaaaatgtacaatagatgggggtatatgtggatgcactatgcataaatatttatgaaataattttagaatcttttacttgagctttatttgtttcaatactatatagcctaattctcgtatcttcggcagcatccgcttgagtactgcagtgcagtttacacaccataattcattaaatactaatattttgaatctttgatctatttaaattctcaggctcaatcgttatcaatggacgaggactacataaatagaacacttttttctctttggacaaagcatagatagatcacttatgatctttttttataatgaaaatttagttatccgggactaggggcgctataatctaagattctctaggccattgagttaggagaaagaacttaaggaaaggaacaattgatagggatgcattacgcaatgtataagaaatcatcttaaaaggatttatttacgttgttgcacaatatataattatatatagttaaaatatcatttaattacgcaccaccacacagtatagtttaaattcatcgatccttgatttattcatgacatctttccaaaatctccaatactcttatttaatggtatagactcgatggtggtagcaaagtcattataatgttttggagcgtaattgactttagataaccctatttttatccctatagttagatctaaggtcctaattaaatatcgatgacatccaataaatttggaacgataaagaaagtttactgatttgtttcgacaaagtcaatatttctgatttgagacaaatcagaaacaaagtgaatttgtcaaaattccaagagcgatggcgtgacgaattgcgtgaagaacagccgtagcttcagccgtgagcttctatggccctgatttaaatcataattttatagatgaatatgaaataacatcatgctagaagttaaacataataaacactagcgaacaaaagccaccagccaccttctgccttttatgaagctattacctcctcgttaaccgaaaaagccacatggcaaaaccatcaacatcgcattcgtactaacgacacaatttggacccttaggatattctaaagaatactcttaaagcatgtgttatagacttatagcgacgctaatttgttttcgtatgtgaatttcattttgatacagaagtacagatccgggtgtcttgaattctccggtttactgtgtataaccagttttcaaggcttttttttattttttaatttcatttttaggtttctcattttcggtcattcatgtcataccaacctactggagtggctaatgaatcatggttcgataacaattcatcaccgacgaacttctctgaaggaccatgttgacaaaaaatgtcttgacacccacgcaactagtagacctttttactaaaaccttgggtcaaaaagagttcgactgtttctagtctccacatttccacttgaagagttgtacggagacttgagatatagtatatttttaagttatagattttggttttacttttttttttgtagctatctcaaaacttgtaaagaaggcaaataacatcaataagaagattatttaatcaatgatttttaggatactaatgaatttttgattttatagtatatatttttccttacatagtttttcctttccaaacaccattgaatgtgaaaatcaaattttagtcttcaacatattccttgcttagtaatgaaagataagaccatcacataactcttttgctattagataaatatattactaagcaaaattaactttataatttagtatgatttccaaagagttatttcccaaaaatcaagatttgagagccatgtgttacaactttcaactgcaagatctatattaaccatttctgattttggtttccaaatattaaaaccataaatcccaaaaaattaaataattaaaatctcaaagggaaacttgggaaacttcgtggaagttgccttggtggacccaataaacaaaactaatcagtagtatttaaacaaatcatgacgccatttctttacaaaacaaacataaagaatcagcaaagcaaaattcgaagagacacaaaaaaaccttcgtttgtgtctcagaatttacaaagttttgagtcagtagagaaatg

SEQ ID NO: 11520 - DNA, 3000 bp, Unknown; identical to SEQ ID NO: 11518
  misc_feature (1)..( 3000): cDNA_ID_1020005_gDNA_ID_2214500_Annot_ID_183949 3000 nt of promoter + ATG

SEQ ID NO: 11521 - DNA, 3000 bp, Unknown; identical to SEQ ID NO: 11519
  misc_feature (1)..( 3000): cDNA_ID_2717466_gDNA_ID_2214500_Annot_ID_183956 3000 nt of promoter + ATG

SEQ ID NO: 11522 - DNA, 3000 bp, Unknown
  misc_feature (1)..( 3000): cDNA_ID_3040210_gDNA_ID_2214500_Annot_ID_183962 3000 nt of promoter + ATG
ggtcatggaatctaattcagggttagtcaaatggaagttcctgcttaagatgcattgattacattgcttatcatgagttaataaaagttctttacagggagtggtatgattcaattggatataagtaagtctaaaggttattatcttactgtggctaacttgaagaggaaggacgtagaggtaattataatcaagttatgactttggattaagttttggtttctgttgtgtttctgcacagtccacagtacactgttttacttgacataatgtttgttcaggtggaactggatattgatgtgaaggttgtcttgtatgatactaaacaatcatcctacaattgttccttcagcaatggcgagtgctcattcaaaatgaatgaaaggtcccctgttgaaaattatgctgtcgtaacttcaccagcactgggtcaggtatgtactcgtaatacgaaacactaacaatattgttactgttattattattatgactcttagctgaatgaatgtttgtctcactgccttagggagtatccatcgatgatgaatggtatatcgagttgtcatatcaacctagattgattgcatatggaagcttcacaggtaaacttttcaatcttttcaaagtcaacttgattattggatttaagcatttgttagtttctctgtaacaaggaagcaattacatgtagtattattgcgtatgcaggtgtgttgctttccttcatgctggtagctatacacttctgcaacaagttaaagtgttgtggtggagagggatttttatccgaagatgattcagtgagaacatgtctacttgcagacaaaggtgacaatgattgttgtaatgatgtcgaagcaagtaacaaaagtctctgtgccatttgttttgatgctccaagagattgttgtttcctcccgtgtggccattgcgtctcctgttaccaatgcggaacaaagtaagttttttatcaactaagtacaacttctggattgcataattgtaatggtaatgtgtttaccatattgggattgatctaaaatattgaacgttgtgatttgacaatatttgcaggataaaaagaaccaaggggaggtgtccaatatgtcgaaagaaaataatgcatgtgaagcgaatctatacagcttaagatgtattattatctgtccaatgtgatgttgaatcgttagagcattaataaaaatcatataatttgatattgacaaggctcaggtctttctttgcattaattcgtttcatctcttaaccatctttgtgacaacaccattggttaactaccatagggtaggcaatatagtgaaccattgtttgttgactcacatcacaaaatggttcgaaacccgaatcgataattaaggatttcataaattaattgttaatttctgaataaattcggattttgtatatttcctccgtttcgtaatataagtagttttggaccaatttttttgtttcacaacataaattgtttttaactttctatgtaaataatatattattttaatattttttgattatttatattatgtaatctcttttatgattagctaaactttttaaaaataaatatttttaatttgcatatttttatttaaaacaacgtatattgtgaaatgaaaagagtataaattattgattaaataattaaggactgtaatttattttattaaatttaatattcttttccaaattctccacatattttataccataaaaaaagaacaacacccttacacacataacatatccgaatcagtggttcttcgacatcacacgatggtatagggaaatgagcttccacgtcaacaagataataatctcttcgggactatacatttacaacaaaaagaaacaaatcttgtggtcaaagtttccatacgtagcttctcttctctacactcacgtccaccacaatcctcgtgctccttcctctaaacccgtccgattcacgtacttttactatcttttctcaatccaacagctcacagtccacaaacaaatttcaaatcgcgtcctataaaatcccctctcctctgctccacactctctcaaaaccctagaaaaaatggcaggaaccggagttgtggcggtgtacggcgaaggagccatgacggagacgaaacagaaatctcccttctccgtgaaagttggtctcgctcagatgcttcgtggcggtgtaatcatggatgtcgtcaacgcagagcaagctcgaatcgctgaagaagctggcgcatgcgccgtgatggctcttgaacgtgttcccgccgatattcgagctcaaggcggtgttgcacgtttttgttagttgacatggtcatacttaattaggagaaaccattacataatgtttttaggcactgtattttttttttgttaaaataaacattatgtaattaattgtgcaataatacattcaataattgttaagataacacatatgaataaacaatttcacataagtatattgaaattgctaagttcaatcaatatattttgttttagaatactaattaaacactaaaacttaacagttgattaattttaacttactatactgttaaacttaacagtttaattaacgttaaccgaaggataaaattggaatttcacgaaagaatctcttcaaataatataataaaaaaacaaaatcctcacagacacaaacaaaagtctgaaaaataatgttattattttatataataaagttataaaaataccctcaagactctggtcgtcattaccgttcaaacgacggagagaaaagaagaagactagccggagaaccaaaatcgaacgataaccgttacactaataaacttaccctatcatcttatctttcatggattcacttcctcacaaattctcaggtgttttattttatctttacttatcctataaatctctagggtttcttctatccaattcatttcttacctcataattttttttttgttatctctttctctaagaatcaccgaa

SEQ ID NO: 11523 - DNA, 3000 bp, Unknown
  misc_feature (1)..( 3000): cDNA_ID_2706677_gDNA_ID_2214500_Annot_ID_183965 3000 nt of promoter + ATG
catcttctgtttggcgcaacattgttgaatgattttggatgactgaaattcccaaaagaataattataaaatactcaaaaactaatttaaatgattttttttcagttatatctctaacatgtctatgatatataacaaaacgtttaagacaaatgtttaaacatgagaatagaatcacgctttcaaaacgtgacaactaaagaaataccatttatcaatctaactctgttaaattcgattatctattgtttttctttgtacaaatggtattttgatgctatacattagcatatataataggaacgttcttttagatggtattaaattcatttcatcctatatatctatttctttcatcttctagatcgagatatgtcaaaaggaaatactagatccgtgatgttgacaaaagaaattgtccgcctaatatgttgaatattgtgaacgtaaatgatgtgatatagtgtgataaataaataaataaatgaatcaattaccagataaggatttttagtggcattcatagatttgccgaaaaaattatatctaaagttacaatttacacatttaggtttacttggttctatttttttagggtataatatttgttattatgtattttataaaaaaaaaatggaaacataatgaaacaaaattctcaaatacatatttttatttaaaaagtttctcaaaattttagcttttaagtggcagaaaatagttttttttttttttatagataaagtgaaaaatctaaaatggcaaaatcaacaataatccaaaacaacaaaatcaacaaatctaaaaaactcgttgattgttttgaagacaacagctatgtggtgaagaaaaaatgaagaaaaaccaaaatcgacatgtgggctactgtgtaagatgcattcatttacagctaccaaacgcacacgtgacaattttttttttttttttttttttgtttgtatatattatataaatttaaatacaatcgaaaacaaaaattcttcgttaaactcttttcaatgctgtatttgaagcttcctatttttattattaaaaatatgttgtttctaaaaaatatatatatatatatatataaaaattcttttcttgactctacaaaatttttgtttgctaacaattttaccttcactgtttactatacaaaaaatctctgttttagtgaataatatatgcaactaagtttttcgcaataaaaatacaataaaaaaattgtagctagctatagtctggtcacaaaccataggaaatgtagcctctaaaaataaaatcaataacaaatttgtactgatctttttatatcgacataaatttggtgaaagtccaaataacatgtttttcgtaccataatcaaccaagtggtgttccttcaacagatacataaaacgaggcaaaataaaagtgaacgaggcagacaaagaattttccaaacctcatttaagggactaggttgactttagtcctttactttagaagagagttgcagttttcatctattgtaggggttacacaaaatttgttcttatgtgagtccaattgccaaattgtacatcactcgaagacaaattgggcccaaactgtgtagaatgggtttgggctgccaacccataataaaccttaagttgaaaatgaattagtttggcacatgcttttttttgtcatgttcatgcttttaaaaaaattcaaaattggcctaacaagtttcacatctctagaatgttgttcctagctggctagttccacgcacgtgtcacactataatttgtcatttcgtgaatgaagaaatcattccaacacttttgttattttgataaccatacaaggaataacacgtgaaggaatttaggaaacgagagattctagagaagtcacctagttttgtatttaaaaaaggtgctcaaaattagaaaaatatcgaattttgttgaaaaagggaaaaataaacaaagacaaagtagtaaatagaaacttgggcatgaagctaaggatatgactggtcgccgagaattaataaccacacagtattattacaaaaagtatacaaaccgaaacttctcgcggtgatgatgaaacctcaacgcaatgttatcgtcacatcaatttgattcctcattatagtatgaatgaaaaagcagattaaacagaaaatacataaagagctctataactcaataggaaatatttaccactcacctatgtttttcttacactttcactctaatttattttgacaaaagaaaaattgtattatattatttaaagacttgactttctctttaatattttactgttttttatatttaaagcaatataaaaaattatcatcattttaattaaatttattatccctaccattttaccaaaccaactcagtaataaactcatttcatacacatatttgacaaatatgtcgactgtcagaatctagaatactatttgtcaaatgaaagtgattacattatgagataacgatagaaatatccacatctctcctgatcaccagtcaacatatcttttattaacgaattgactggtagtttaagacgctaattatcctttgctctataataccatttcaatcgatattttaactaattatatactattagaaatgaaatgacaaatctgccgaaagcttttttctttttaatattttgtcaaaagaagacacacaaaaaaaaagtaaattgtattagaaaaaatccaagacagagaaaaaagtaaacgcgtagacagatggcgacaggagaaagagagagtggagaagaagaaaagaattgcgatcaaagaaaattagacttctttcttccaacgttttcacattacaaatacacaaaaaccaaaagataaagaaaaacaagaaatattttgtttttcgatctgaaaaagtgaaagcttcttcaaaatctttgctttagagatcgtttggtgattttttttctttattttttttttatagtttcttcttcttgattctttcat

SEQ ID NO: 11524 - DNA, 3000 bp, Unknown
  misc_feature (1)..( 3000): cDNA_ID_2706721_gDNA_ID_2214500_Annot_ID_183957 3000 nt of promoter + ATG
aattagcgtcgctataagtctataacacatgctttaagagtattctttagaatatcctaagggtccaaattgtgtcgttagtacgaatgcgatgttgatggttttgccatgtggctttttcggttaacgaggaggtaatagcttcataaaaggcagaaggtggctggtggcttttgttcgctagtgtttattatgtttaacttctagcatgatgttatttcatattcatctataaaattatgatttaaatcagggccatagaagctcacggctgaagctacggctgttcttcacgcaattcgtcacgccatcgctcttggaattttgacaaattcactttgtttctgatttgtctcaaatcagaaatattgactttgtcgaaacaaatcagtaaactttctttatcgttccaaatttattggatgtcatcgatatttaattaggaccttagatctaactatagggataaaaatagggttatctaaagtcaattacgctccaaaacattataatgactttgctaccaccatcgagtctataccattaaataagagtattggagattttggaaagatgtcatgaataaatcaaggatcgatgaatttaaactatactgtgtggtggtgcgtaattaaatgatattttaactatatataattatatattgtgcaacaacgtaaataaatccttttaagatgatttcttatacattgcgtaatgcatccctatcaattgttcctttccttaagttctttctcctaactcaatggcctagagaatcttagattatagcgcccctagtcccggataactaaattttcattataaaaaaagatcataagtgatctatctatgctttgtccaaagagaaaaaagtgttctatttatgtagtcctcgtccattgataacgattgagcctgagaatttaaatagatcaaagattcaaaatattagtatttaatgaattatggtgtgtaaactgcactgcagtactcaagcggatgctgccgaagatacgagaattaggctatatagtattgaaacaaataaagctcaagtaaaagattctaaaattatttcataaatatttatgcatagtgcatccacatatacccccatctattgtacatttttataaatctttctcctaactcagtggcgtagagaatcttaattagattatagagccagtagtcccggagaattaaatttggttgtaaaaccgatagcataagctctctagttatgtagtccttgtccactgacaatgattgagcctgagaatataagttaaatctatcaaaatataagtacttattgaaattatgatttctaaaaccatacttaagtactcaaccgtacgcatactgccaaagtttagagaattagggaatccaagtgggtaaataaagacgcaaacacagctgagaaactcatttgtcttgtccgaatacagaacaacattattaaagccccacaaatctttagtgattttggaagttacacaaacttcttgatttggttcaatcttatatacgtatgggcaacaataaacgaaaggagtaggggtcacaatgatgaaaaggccaagaaactaaaaaaatgtaatcaacgataaaagccttaaaggaaacttcccggaagctgccttcttgaggatacgtctatgcacttctcacttgcatgtggttagatgttgttatcgacccttcttggttagacaatctattaatatatttttgtctttgttatataagatttctatactatatgggaatcaaagctcctacatgcatgtgttcttacagtcttacttgttatggcatttagcctaacgtggtcacaaaccatatgacgagtgggtcctctaatgtgtacggaataagaaacttatgttatcatttagatcatatcttcttagaaggtatcgtaatcatgcctcataaaaaatcatatcttcttccaaagaatcataatcataaatgaaaatgaccattaaatccacgaatataaccgcttattcatttataattgtttatcactcctgcatcaatctttgaacagatcgatagaagcatccgagatactctcttcactagcaaatatcctaagagtaagagatgtggttgattgcgtcttagtggttgatttgtttagtttctgtctggcttttattttaattcctcttttgccaaagaagtttcttgttaagtaatttgccattagaatttacatataaggggacgacgctgaaaatcaagctgaatgattgtacaaaattcaagatgaaaattgcgttctacttccagcaacctaaagaaaatatgcttaagcttgatgattagtgatgctcatataaaataaaacaaacatataaataatatgtgacctaatcacattatataaaacaaaattatatcacattattaaattccatcatttaaggtagcttgattttgttttatcagaatgaaatatgatttataaacctaatggagcaggtgaaccaccccaatgtgagaaccactcaaacctaaaaaagcatgacaactttaaaggtactaaaactgtattggaagttggaatcaaaattgtttattcactaaacgaattttcccctaggatcttctgatttgactgattcgtttagtatattgtttaatcttcttttttttttggaacaaaagaagaactgttgagtactagagaattaaaaaaaataaaaattgattctttgattatttttatttttttgtttacctgaattgattctttgattattttaagaattctttttaaggaattttggtcctgatgtgttgctttttttcagtagtgcgatctgacgactgtcacaaaggcataaaccctttatgcatggactaatcaattaaattaattaaatagcttctcttatttttcttataatctcgaagttggtcgaagcaaagcaaaagcaaaattctcttggccgagagaagaaacattgatcgtcgatc

SEQ ID NO: 11525 - DNA, 3000 bp, Unknown
  misc_feature (1)..( 3000): cDNA_ID_3040228_gDNA_ID_2214500_Annot_ID_183954 3000 nt of promoter + ATG
ttttactgtcaaaaactgcataactgttgcttccgccaaaaccgaaaaataacattttccgtttaaactgcgaaattctgttttatgtgattgtaacttttattgaaaagtttgtgaaactacataggctagtgaaaaataaatatccctggaaactaagagaaaatgttgaaaaatgttgaaattctcgaagaagataacaactctcactaaaaacatttggtcttcacgttcattgttttttcacaaaaaaaaaaattctcacaaaatccacgttttcttgcaaaaaccgtcaattaattgggtataaataggtttaaaattaattggggtgggttccaatttaataagattactacatactacatgctactactagattgacaatgataattattccctaacaccaaattgtgataattttatctttcagaacaaaatgccattcacttgggacatcaagcgatgaacaatgtcgtcactgcaacaggaggaggagttttctcatcttaaacgaagacaagtaccaatgtgttgaaacaaaatttccaaagcgagagacaatggagaaaggaaaacaaaaaccaattttcttgattcatttataaatattgaaagatttgtcagagagattcctgagattcagtgagtattatttcatttttcaaaaatgttgggtgtcttgatgaagatgagttttgagaactttataaattcttcttgtgggtgggttttgcaatgaactatctatgaatgtcttgtgtcaaatgttctatctctttttattaatggttttatcattttttctgagtagtcaatactataaaactataaataaatggaatttttgattttcctttataatcgaggtagaacattgtttctaccaatagaaatccaaattcaaataatcatatatctcatcaagtcaaaatcagaccttcggtgggattgagaatgtcagaaaaaaaaaagggtcagacctttattggtgagcttttgtgggttaaaagcccaatgaataagctattgggccatttagatttatatctgcaaaacaaataaatgaagtgaagagtttgaattcacacgaaaaacgaggctgcttcattggtcagtccaattcaaatatcaaccgtcaaatcagtcaatcgccgttgtatatccaacggttcagatcttagattcattcactaggccctactttatttacatctataccctctcctaacgctccacctccagaaaaaattttaaagaacacctgagaaatcagaacagtggcagtttcgtgaatatacgactgaatcaatctctgtaaaatttcttcttcctcctttttagccattatcactcttcttcttcttcgttttgtttctccattgttaaccttgtgtttcgctgttttttgcttggtgctatgatcttcaacaaatgatcagctagaagtgatattacaacgaagaggttttgagaaatggagaatgtggtggtggttcgtgatggagatgaagaactctctctatttctggagatgcgaagacgcgagaagcttcaaggcgtttcttctctttcacaacctggtgagttttatccgatcttcgtttctctaaattttgacttcgatttctctgaatctgagctcctggaacctaaatctaagaatatgactaagtaattatgcttaatctctgcttatttgaactagtttcgtgcatttggattcactttagagtaatttagagttgactggtcagctcttgttgctgatttcttgtcaacattttaatttcacggcgttttgttgtgtgtgtgtgtgctcgtggtgactgtagctatgattgatttgatcaagttgatgaatttttgacaggagcaaacagtgttgagaagactagcacaaagagtttggagcttttgaaaacgagctgtgttaagttgcgtaggagttctgttgaaaagttcttggactctgagaacgacaagtcagattatgagtggtaacttctttggttgttgtttttttcttgtggattttgagatgtttgtgtgttatctgtcacagtagagtttccaatgtgatgcttctaataggcttatatgtctgcatgactggtcacatctggttgccattggatagaatcttcgaatagagtactctctttattgttgagatatattcatctagagatgatttgattccaggttacttgcggctcctgagatcacactactaggaggaaaagagaactcaatggttaaactcaaggagcctaaagctaagtccactgctttaaaacaacgggtgagaactagtccccttcttagccatcttttgtctttactaaagactctttagggaacatataagattgatatgtgtcatgttatttaaggtttttgccagtctatcctagacttcctagtcttaagtactatgttcacatcattgtggtattgtggtccatttttacaactactagtagctagtttcagcattcctcaggtttagatttatgcgtacctttaatgattgcttggtgctggttcatgttatgcttttgttttaaggttgaaaacatcccgcaggaaccattgacacggagcgttaaggtttccaagccaaccccaagaactgtttctagcaagcaagccaacacagctgcagaagtaaaaccaagcattaaaccgtcaagacaagccacaccaacttcacgtgctacattaccctccacaagactaaccaactctgctcagaaatcaaattcagaaagtataaccacttcaatcaaatccaatacacgagcatctgcttttcctcgttcatcctcggttggaaaatcagtttctagtgctaaatgtacaactccaaaaatccctgaaacacgtgctagacctgtctcaacctcaagaagcagagtctacagttcaggtgacagatcaacgggacgatcgaagattagtaatgatgtgaatcctgtgttgatggggactcaaatg

SEQ ID NO: 11526 - DNA, 2269 bp, Unknown
  misc_feature (1)..( 2269): cDNA_ID_3040253_gDNA_ID_2214500_Annot_ID_183944 3000 nt of promoter + ATG
gaattcttgtttttaactataaggataaattcacaattatatctaaaaatgtgtgtgcgtgagttgtagacaattaaaactattgatcattaaaatttactataaagtcgttggagaaaaagtttactataattgttggaaaaaaaaaatttactataaggtctcattcgtattctgaccatagttttcattggactgttaaatttgttatattctttgtatgactaaaagaacatctacatgcatgccaaataaagcgaccacattaaaaagtttgatccagttttggttcgaatttaatttggaaatttgagttttgtgtttattttgtaatgtagaagaataaacttgaaagtgttaatacgttcaattatatttggtttcgattgaaattcaatctaatgtggttagatgagtcctatattaccatgtcattgttaatacccattgccaaaaataaaagtgaagcagaaggagaaattgtttttgtatacccgaaggaattaagatgtacgatcttaaaatagacatttcggccatctatcaaaataaatgtctaaaagttttgtggtcgtcttaaatactacttcgagttcagacgtatacgtctcaccaaagtaatgcacatacttgatgttaagtttatctctttttactatttcaaatttcgcgtttgacaacactttaagtctacattatccatagagaatataacataaagatcatgaacttctcatgaatgtataagacaaatcaagcttatatatgagatctatttagtaatttgatatgtatgtaatatatgataaatctttgatgcaatattttattatgattattagatatacactagtcaactttaactttagaagattaatcattccgtcgcaaaccataccataaattagcaagggatcgacttaatatctccgatccgctatatatttaagaagcatttagattgtttataatacatgtcatgattttataattatgtatatataaatactaattgatgtatgaagtacgtagataatgttacgatctattaatctatttacattaacttttaattagtgttgagtagggaaaattaacatataaacctttagcagttggttgtattattaaaaataatttgaacttaaaatccaccttcgaaaagataaatcaaacaagtataaaaaatgctataaatccagaatatttacctaaggtttttattcttctacttaataatgtaagataaaaccggcacaatacttgttacgtatgcatggtaggtaccgcaattgtgtaagcaaatcggcacaatactaaggttacatatactaactaaataaaacaatctgatttcagtgacaccgtatatctaacctttattcaaatccaagggaacatgacttgacttcttctgttggaactaactcgatccctcaaccatctccagggatagaagagttagtaaaatcaaacttgaagtgaggaagtaagcagtttaacgactccatatgactacagttatatacaaagttgggcacaaagtacaagtactaaatactcaaagtcagataataattttaataagtacaaactatatatatgcagtacaattattgagtatatataaacgagactggtgatttggggcattgtccaccagggtgttatatcccaattgaaatttgaaaatttaagtgtgtgagtgttacgacaaaaaaaagtgtgtgaattgtaggcgcggtgaaaaggtaaattaagattggaactagaaaaatagttgaatatcctttactaaaagttgtcaattccggttttagtaaaaaaaaattttaaaatagaaattttatccaaaagacttcaaacacacatattcgcatatataacataagatatcattttttgtaaacagttaaaaagaaaaacacatgtttttttttttaatttagaaaaaaacatgttattatacaaaacagagttttgcccacttttaatatgttatgaaaagaaaaatgattttcttgggtttggtcagagagattggttgtggtaagaatgggaatcttaattacaaagaattggattttgggtcgacctaccacctaaaacgacgtcgcctccatctctggtttccaaatctctttctcctctccctttataagcttgcgttggccagtcgctcatctcgaaaacagagagaaaaagactaaaaacacagtttaagaagaaggagagatagagagagaagagaaagatagagagggagatg

SEQ ID NO: 11527 - DNA, 3000 bp, Unknown; identical to SEQ ID NO: 11524
  misc_feature (1)..( 3000): cDNA_ID_2706721_gDNA_ID_2214500_Annot_ID_133647 3000 nt of promoter + ATG

SEQ ID NO: 11528 - DNA, 3000 bp, Unknown; identical to SEQ ID NO: 11523
  misc_feature (1)..( 3000): cDNA_ID_2706677_gDNA_ID_2214500_Annot_ID_133654 3000 nt of promoter + ATG

SEQ ID NO: 11529 - DNA, 1151 bp, Unknown
  misc_feature (1)..( 1151): cDNA_ID_2706705_gDNA_ID_2214500_Annot_ID_133656 3000 nt of promoter + ATG
atgcatttcaaggcactgaatctagtccttgagcgtggtaaggagcgtaaagagaaccctgatggagacgagcctcaaaatccgaccttggtgaggcggcggagccaagttagaaggaaggttaatgaccaatatggtcgcagtcctgcttctcttccagatgccactccttttaccgatggtggcggcggcggcggcggtgatacaggacggagcaacggtcacgtttatgtcgatgaaattcctcctggtctccctaggcttcatacgccatctgaaggtatgagaaccaaacctgaattgatcagattagattgtggattataaaaattgatcctttaatcctttgatgatgctgatagatagtttgtgattgctttttttcagggagagcttctgtacatggagctagtagtatcaggaaaactggaagctttgttagaccaatatctccgaaatcccctgttgctagtgctagtgcttttgagagtgtggaagaatcagatgatgatgataatttgactaatagtgagggtttagatgcttcctacttgcaagctaatggtgacaatgagatggtgagtttctttatttatcattactttttcaatccctgttctgtgattgaataggtgggtttacaagtaagatgttttttgcagcctgcagatgctaatgaagaacaaatatctatggctgcttcaagtatgattcgatcccatagtgtgtctggtgacttacatggagttcagcctgatcctattgctgctgacattcttcgtaaggagccagagcaagagacctttgtccgtcttaatgttcctcttggtaagaatggtcactttttgtttcgttctgtcatcttgccttacttctggttcctgtatgcttagtactcttttcctattgttacaaatcatgacatgtttgttttataagtcccactacttgaaaagttttttgctagtggcaagtaattaagtggagttacggacaattaaataagtagtcttgagtaagagaagcaagggtcagttaaggctttactcagtgtgggagctgagccattgaaattcttagattatagtttaagaattatagcttgaaacggttaagacgtcaacacatatcttattcatattttactcatg

SEQ ID NO: 11530 - DNA, 3000 bp, Unknown
  misc_feature (1)..( 3000): cDNA_ID_2706769_gDNA_ID_2214501_Annot_ID_133658 3000 nt of promoter + ATG
aaactcttaaaatcactacataatctaagacttcctaagacacaaatactcctatggacattaaaacaagattttatcaacagtgaagccatattatcatcactgtagttctgaaaatgccatattgcccaaagtcttttctagctagtatgccatagtggctaacatcttcttctttcttttcatctctctaaataagcaaaaaattgagaggctttctcttcctcttctattcctctccaacatagtattcattctctcctcatctcatctcttgtttcttttcagccggagcttgtgccgatggttctacgtcgatctcactctctcaacgacgaagaaaacatcccccaaagcctccttctatgtccaaatgtaaagcttctccgcagcacacaaccttccaccgctgtaccaccaccgttcctacttttctgacatggaactgaagctttatcaagttttatgttaagtaatgttaatcggaagtcctttaggcaagatgtctagctaaatgttatagaaattctagggtgacaatttttgttttcaggcagacaatggtaactagtaactggacaaattaatttgaagtatacaaattattatggacaatatttttctaatatttgtagacaatttttattacatataagatcaattactcaaattttgttttaaaatatattttttcgaacgaaatatgattttaggatgaaacaagaggccatatagtacgacgaacatgacccatccacaagcttaatttgttcttgttttccaactcactcttttctaatttgaagattaatgcttactgacctttaagattaagatgttgtagttttgtttttcaagttttcaccgtttaaaatacacaaataccaaaagtctttagttacactttgttatgtaacaaaaaacattgctggcatagtggcatattgacaaaccttccaaaatttgatttatctgtttgaaatatcacagttaaaaaaacaaacccaaaaaaaagagatgtttatgacaaatgaactccatgaatatgtattattccctggcatatgtaacaacataactttattaaccaactcttgtctcattataaatttctgaaacaatgtatacaataattactcactaattcttgtagcaaattaaacccaaaaatagttaagaagaaaattaacaaaaaaaaatatggttgcatacgagaagagtcctattgtttttctatttgctacaatgatgcttgtaatgtttttgttttgtggaagtggagaagcaagaacattagggtacggatctattaaaggagaccgaattccggcatgtggctataaaaaccccaattcatgtgtcaaacaaccagttaaccattaccatagaggttgtgaaaaaattaccaggtgtgctcgtgatgctgctcgttatactgaatccttcaatgtcgatgacgatgaaagtcccattattaatctccattgaaatttaatctttaatttactttcgttgatactacaaagattcatgtatttatacgtcgtgtagcttgaatatattcatatacctaattatcagtctattaaaatgtgaaagattatattttattaatttgtgtttttatgtaaagtcactaattgttgtcttaaatttttatgtattctatgcttttcctgagattatttatttatttgtttataatttttttttaattaaaaaataaattatgtgtgactactctttctctagatatgccttaagcaataaaagggggaaaaacattttttgatgacaaattagtttgtcatatgaatgaaattgtggtttagatgaatttcatccaagaattcttaatagaaccgaaaatctctttaagttttaacataatcaacaaagataaattctatgaacattcctaatatttcctttaagattactcaatgaattcttgtccgagcgcttgcatttgtctaatcatcaacatagacgaatcatacatttgcttgcggctaacgtcaccttcctttcctccttcctcttcgaagagcctaccatccaatatactcagcacatagacaaaaatctatatgagttacaaaaattcatccattgagttgttacaatttaatttgattgaaaattgttcattagacattaggtgaggaatgcaatgttgtgtgagttaaatttaagttactactgctactattgattcaagtccgtcatacaaaattctagagaaaattaatatatatatcctctcgttttcccatatcttaaaattgttaaattgaaatccagagggtaagtgagagaagcaatcgacctcagcaagaggtgtagtattcataaaagttttacgttgtatatttaatgacactacaaagtcattggaaaatatatttttgtaaggtatattcttatagattcttttaaatgtacttttcgtttctagagttctctgaagactttagttccacttcagcgtttcaacagttcaaagtttccacctcatgcatgtgttatgtgtacatatttcttctatacatccttttttttcagtgaactatatgttataaaacagtaactcttatagttaagtgtaaactggttggtttaagaataaactaaatattttttattaaattgtagtaaattgattagtttaagatagaaaccaaaaccaagcttaataaagttagattgattcctaacgttagaaaaaaaaagttagattgattcctcacgtttcaaaaggggatcgttggttcttggcctcacacatacttttccttgactctttcaaaaaagacaacctttgacaaatcgcttataaactgcatttaattttacatagataactgcactcactgtcacatgcatgttcacaatatcttgactatataataattacatttataaaatactagcctatgtgatcaaaaattgttgtatcaagattttctctcaggtgactgaacaacagagaaaaacatg

SEQ ID NO: 11531 - DNA, 3000 bp, Unknown
  misc_feature (1)..( 3000): cDNA_ID_2706737_gDNA_ID_2214501_Annot_ID_133660 3000 nt of promoter + ATG
catcccgcccaatcgtttcaatttaattataggataaaaaaaagactatcatttactatatatgaaatcatatacacccataataaataatgacgtaccttgtaacgggtatagaagtcgactccctcatctccatcgccattttgttgaaccttctctgaaagatgccacaatattggtgatacattttcttttaagaaaagcttttggtaaaataaaatacaattcataatcacttggtaatttataccaggaaacatgtgtgtaaattcgtcccatgaggtcaagcctctcccagaaccctttttagcaccttcaacctaaaagtcaaaccaatttgaaaatgataagactgatcttctatatatcatcaatgttataatgtgtttatatgtatgttgacctgatatgcggaaacagatgttccaaatatgaaatctgcggggaaatcttgcttgtggatctcaaactcgggtccaatgatggtgcccaaatcatcatcatttaggttggtctgcggtccaacggtggtgcccatgtccatgtcaatgtcttcgtcatctacggtcgcatgtggtccaatcacgatgcctatctcgtcatcgaagctagtttgatgaggtccaatgatggtaccaagatcctcatcacttggttgaggcctagcatcggcgttgaagctaagtatggtactagttaaggctaagagccctaggaaaagagtgagagtagctgtagccatatgagtgttttttcttgtgaattttattagttttttttttttttatgcttcttccatttccaatccattctatttataggaaagaagcttcaagtgtgtgttatgtgaaagggaatttgtgatttccttgtgttgcactcatattttgcggggcatctttagtttagttataggattagttaaaaaaagtttataatattatgaacatttacttcctttatatttctgaattcgtcaagcgtcattgtccataacaaagcacgaagtgcattttaatgactttaataaaaaaaaaagtattctaataccttgctcaaaactttaaatattataatattccaatcgtctttactagcatatatccatcattttcatatatttcctttactcacctcattttctacttattaacacaacaataagagacaaagcggcattcctggtgaatatccacgatactacattcatttaaaacaatttcgtcaaagtttacatcaacttcacattaatcccaaaatagtccaaagacccaacaaaaaataaaaactgagttctaagaagacatgggcttgttaatatcattttcatgggaatagatagcgccagtttagtttttttagaagctgttttcatataaaattcagagaagaattgttgaacatagtcaatcttaatgctgaatgcaaatccttgatgcacaacatttctcttaagataggttctttaaggaatgacattctgaaatccaatccaataacattacccctatgtccgcttgtgtccagcatccgtacgtcggtttctacagcagtggttggctggcttatgtctagggtttcaccgttcgtctcctgtatcttgtctagggtttattttgttttggttttggtgaagtggtgttgtagatctgtgaaagtttcgacaccggtccctttggtgatgatcaataatgtgctcaagccatcgataatctaaagttacaataagttcaagctttttttttggaagaaaaaccttgtgttatagctttgagtaaaccggtaaatgtccctcaagtctccttccgagaaccgaattctctaatcatttttcagtgctttttattaagttcaagaacccacatgtcgcgatttgattgtagccaattctgataagaacatgcattctagaattagagcaaatcaacaagtgtaaaattgtaaaatcatctctatatttgcaacagaaattacctaaatgtatctcataacgtttaaaatacaaactttatgataaaatgtacaaatgcgtcaacaaatgtgaaataatcaaataaaaataggtattgggagggtcacggtccacgttcaggttcacgtcttaattttacggcttattatacaaaaccataaccaaaatgttcttatctcactttcctttctattcccggatttgccgctttcttcttcttcatcatctctctctcaaaatcaccccttttaaagttgtttcctttatacgcaaaagtgaacgcagatcttaatgcagctactgtgatttcgattcttagggtaaatatattcttttactcattggattggcactcctcagcatctgggtttttgcaaaggtataatttttattgtctctttcgattggatttgattgatctgccgattctctgtttctcccgagctttgtgggttaagatctcgattatctatctgggaatctttagattttgtgttcatcggagctgttaatcgttggactcgctagtgttcttctcttgtaaaaactttgtggaggagaatctgattgtaggtatagtgtgaagtgagtttgagctgaattctgtagctttacatggaagtttttggttgatgataacgtcttgtactttgataccatatctgaccatagtcgccagattcttaatcggatctagttcgagttataagactcttcaatagtctctccttaggttcttatgtttttattgtgtgttgatctggtttctctgatcaaggattcagcttttagctccctttattggtcatataagaatagatctgtttgattggtttcttaactgagcaattgtgtagcagattaggtgcttatcattatctttgtttttgttctgtgtatttgaatatctcattaggatcttggcatctcctattgatcatgatatcttgttctccgaagtttgtttggttttgtaacagattttatgtttatgcagcattcttattacttccactgattcaaacatg

SEQ ID NO: 11532 - DNA, 3000 bp, Unknown
  misc_feature (1)..( 3000): cDNA_ID_2717493_gDNA_ID_2214501_Annot_ID_133661 3000 nt of promoter + ATG
ataggtgcatatccagtcaaacctcaggagctctatatgttggtgttgtgtattttctaatattatcttcttcaattcccatctcttctgctctttcaaaaatcttgtgatttgtcgaaacgcttccaaaatcacacaatttccattgtccatctgagctcaatagaagattctcagccttcaagtctctgtcacgattagcaacaccaatacagtatcaattcacatcgcttgctaatgtaaaaacgaaacgaaatctaataatacaacatgtatacctgtgagcaatgcgtggggattgacaatgcattgcaaagacagcattacacacatctctaaaaatcgtaagagcttgtttctcttcaaagtaaccagcacctctattctcaagcacatccacaagagatttaccacaaaaatccatagccaaaagagcttcttttttattcctccccatatccaagataccatgtgcgtagagcgtgacaacatttggatgtcccttgagggatttcagaaccgagatctctttcattacgagttcaagtgactcctcgtcattgcatatcatgtgcttcaaagcatattgctttgacgcgtgatttacatcttgagctaagtaaacactggagaaacctccttccgcaatgacatttctaacttgaactttcagatttcctatctcgagaaatcgaccttcgagacccgcaggttctttttgagcaaaaggtttaaacttccacatgtttgaatcagtggaagtaataagaatgctgcataaacataaaatctgttacaaaaccaaacaaacttcggagaacaagatatcatgatcaataggagatgccaagatcctaatgagatattcaaatacacagaacaaaaacaaagataatgataagcacctaatctgctacacaattgctcagttaagaaaccaatcaaacagatctattcttatatgaccaataaagggagctaaaagctgaatccttgatcagagaaaccagatcaacacacaataaaaacataagaacctaaggagagactattgaagagtcttataactcgaactagatccgattaagaatctggcgactatggtcagatatggtatcaaagtacaagacgttatcatcaaccaaaaacttccatgtaaagctacagaattcagctcaaactcacttcacactatacctacaatcagattctcctccacaaagtttttacaagagaagaacactagcgagtccaacgattaacagctccgatgaacacaaaatctaaagattcccagatagataatcgagatcttaacccacaaagctcgggagaaacagagaatcggcagatcaatcaaatccaatcgaaagagacaataaaaattatacctttgcaaaaacccagatgctgaggagtgccaatccaatgagtaaaagaatatatttaccctaagaatcgaaatcacagtagctgcattaagatctgcgttcacttttgcgtataaaggaaacaactttaaaaggggtgattttgagagagagatgatgaagaagaagaaagcggcaaatccgggaatagaaaggaaagtgagataagaacattttggttatggttttgtataataagccgtaaaattaagacgtgaacctgaacgtggaccgtgaccctcccaatacctatttttatttgattatttcacatttgttgacgcatttgtacattttatcataaagtttgtattttaaacgttatgagatacatttaggtaatttctgttgcaaatatagagatgattttacaattttacacttgttgatttgctctaattctagaatgcatgttcttatcagaattggctacaatcaaatcgcgacatgtgggttcttgaacttaataaaaagcactgaaaaatgattagagaattcggttctcggaaggagacttgagggacatttaccggtttactcaaagctataacacaaggtttttcttccaaaaaaaaagcttgaacttattgtaactttagattatcgatggcttgagcacattattgatcatcaccaaagggaccggtgtcgaaactttcacagatctacaacaccacttcaccaaaaccaaaacaaaataaaccctagacaagatacaggagacgaacggtgaaaccctagacataagccagccaaccactgctgtagaaaccgacgtacggatgctggacacaagcggacataggggtaatgttattggattggatttcagaatgtcattccttaaagaacctatcttaagagaaatgttgtgcatcaaggatttgcattcagcattaagattgactatgttcaacaattcttctctgaattttatatgaaaacagcttctaaaaaaactaaactggcgctatctattcccatgaaaatgatattaacaagcccatgtcttcttagaactcagtttttattttttgttgggtctttggactattttgggattaatgtgaagttgatgtaaactttgacgaaattgttttaaatgaatgtagtatcgtggatattcaccaggaatgccgctttgtctcttattgttgtgttaataagtagaaaatgaggtgagtaaaggaaatatatgaaaatgatggatatatgctagtaaagacgattggaatattataatatttaaagttttgagcaaggtattagaatacttttttttttattaaagtcattaaaatgcacttcgtgctttgttatggacaatgacgcttgacgaattcagaaatataaaggaagtaaatgttcataatattataaactttttttaactaatcctataactaaactaaagatgccccgcaaaatatgagtgcaacacaaggaaatcacaaattccctttcacataacacacacttgaagcttctttcctataaatagaatggattggaaatggaagaagcataaaaaaaaaaaaaactaataaaattcacaagaaaaaacactcat

SEQ ID NO: 11533 - DNA, 3000 bp, Unknown
  misc_feature (1)..( 3000): cDNA_ID_2717489_gDNA_ID_2214501_Annot_ID_133662 3000 nt of promoter + ATG
ggtaaaaatatgtttatcttatacattgcgcacatgtttcccatatatatgaaccaggaaactagtaatgtacccaagaggaaccggagatgggaaaggaaactcgttgtctttgtatttgaatgcgtctaattacgtcaccaataatggtccaaaggggagaacattcgcggtctataaattgagagtgttggaccaactccatcgcaatcatttcgaaattggtatgtatgtatacgtaattatccttttgttttctaagctttacattttctatatgcatatatcatctatataataagccgtttgctactactaatgatcacatgtttgataaagactgccaagattggtttctttatgatccggttcatccaagattatgctcatggggacgtaccaagttcttgccgctggaggaactccacaaagcttctaggggatttctggtgaatgatcagatatatatcggtgttgaattcttaattgtatccactactgagtatctctgatgcgcattcacgggtttgatcaagaccacaccaataaatagctcccgttgaacctatctacctattgttctatacttgaatattgtcatgtacgttgctaaattatcttattgagggatgcatgcttcatgcttgtgtttgtgtttaagtgctatttcttgtttgtaatatatacataaacaattaaaaacctcaccacgttgaaaaaatcaatttccataacaatatttatacatatttcttaacatttatggatactatggccaaattataggtggctttgaaatttaaatgcctatctctctacaaaatattactagaaactttagaccatccttattggtcatattcttattcgtgtcttaaaaaaaacaaagacaccatcattttgggatctaaaactgtcttcctagtaacactaatctcactaattcacacatttaaagacacccccatttcctttctttttttaatatttagagacaccctcatgggatgaccaatgagggcggtagttgaaaatttatcattaattcgtaaaattatgattgttttaatgcataaaggttcaatttatcttttaaagccatagaattctatatagttcagaagtaaatcagtgttaagtttttttatatttcgactcttagaaaaatataacttataaatgagattcttgtttataactgctaaacttcaaaagtaatgatataaaacatatgtttgcatcattttataaaaattctttcttatactttttcattaattatatacatatatgagtcacacatttctaaggtcgactgtctttggcatgtagtcctaaagttcacattagtagtttcattttaattataggttttgtaatttcggtttagatttccaaaccttttaatgaaaactctttctgttctattttactataagatttttaggtaaaagcacggtctttaaaaactggtaaaatatttgatcatttctacaattccacctaacattttggttcaaatttcttagagatagacaaaacaaattatcattaaaatgaaaaaaaaaaacaaatatgaagaattttacataaaagagtcttagttctaaatataaagtaaaaaatatagagagatttttaagttaaacagaagttaaatataaaaaaatggatgtaagaaaaaaacagaagacaagttattgatagagaagaaatatatctaggcacattgcgttgcattactaggaaagaggatattgcgttgctcgtctctagacacatatctcgccttcacaattgcactcactgttgttagattctcgataacgtgggaataaatgtaggtgcttaattggtcatacatatgtcaaaacaaatgtgcttggtggaaacaaaataaaaattagtgtgtttgaggggaccggaggatatggttcgtattagatatgatcgaatctgtctaattctatgcgggaattcagttatgctctctagggtgagattttctagactggccagaaaattaatgtggtagcaactaattattttgcaaagttggacatgatcaatgcaacgtggttggagatgtatcataattgtatcaacacttgtacgtagcatatgtacaaatgatactcccaaagtaacgtcccaggcactatagctcctctgaataggctcatatttatccgtcgattcattagcccaagaaaaaaatattgtttttgtcaggtttaatacacaaaaattcagcattagttttcaattggggtgtgtatgaagagatctaagatctttaaagtcatgaatataatcatgaactaatttaacttggtgaagttttcaagccgaaaatagtatggatcaaacacctaaaactttttcataaataaaaaagagtatttaatacaaagtaattatatatattcttcacattaaaatcaaaaaataaataattatatatgtatgttgaatgtaaaagaaataaaatgtcatgtcgtcgaatgatgtcgtgtaaatatatatacctactgcatatatacttaacggttaattatcaattggaccatatatacatattcttgtcgagtccaaacaggtctagggatatttcaaccttacatcttagcctaaacccgatcctaaacagcttggagatcgatatcaatcgaaccaaagatttaaaccatgaacaacagttttcgaaataaaattcatgaacagtcgaaagaaaatttatctgatgaccggcacaagaaatctgataggaccctaatcgtgtttaaccggaaaaccccgctctatttttatttttttgagcaagtaagatatataaccggttctatttatatcctaattgaaaccccttcgtcaaggaatctgcctatatatagtaacatatgcataccaatttcttctcaccccaatacaaactatagaccaaagaaaagaaaaaaaaaccctcctacggtatatttgacgaccattatcctcataatg

SEQ ID NO: 11534 - DNA, 3000 bp, Unknown
  misc_feature (1)..( 3000): cDNA_ID_2717485_gDNA_ID_2214501_Annot_ID_133663 3000 nt of promoter + ATG
tacttagccttaagaccagctcaaaagaaatcactctactccattaatagtaaattccatttcttatataagcacaattgtaagagaaaagcataacaaaagaacatagtaaataaaaagaacaaaagcttttaaagtaagttggattaatctatattatcatttgtttttcagacaagagaaagagagatagagagaaagtgtctgatccatggctgcatctagagaatttattatatgttgcttcttaacacttctcctatgcaatttcttcatgagagtcgagtctggtgctgctgctgacgtcagtagaggaggatgcggcggcggcgatggcagcctcggggacgataatgagcggtgtgtggaggcggtgaaagaagacgacgacgatgatgtggatgatgtttacaaagtgatcaacaagatgaggatatatgcttgatcatgcatgcatgatgcattctttatatatagggctatttatttattacttttttttcgtttccattttcttttctcaagttttttccgattcttctgtttttctcttaatctatttgctttttcttttttccccttaatgagagagattatgatccgaagaagaacctgttgccttaaatatatggtttactaactttcttggatccgacaagaatgtacttatcctagcgttacacattttacctctattataagtacattatttatttaaaaaaaacaacaaaatatattaattattttcttatataacaatacacatgaattttctacataaatatccaaaaatataacaaatgactggtaatatacaattatcttttgctaagttagacaatactagcttaccatacacgtaccagtctcagcttgctgctacttaaaaaaacattattctcatagaattagttacaaaaattttgtattttatagttttactaatttagttgaaaaattaagttttatttatgtaattttatcttttcttcttttttcaagaaaaattatatctcatagtatcaacccccacgacatctttggctagcttcgcaacctggtttatacggattagccggttgcatcttgcaaccagctgaagatccaggagcacaacctttgggtaaatcttctcgcatagctggagcgcctatactgtttgcctccgttgtgctcatgacgatagatataataattataagagcaaatgattgtacaactgttttcttggatatacccatttttccttattgataaacttttttactttttacttcttattcccaataaacatttgcgctattatatagtgaagatttgttgctaaataaagaattttctgattggtttagtcatttgtaaccgttgaatgttttgtcgggtttgcgcattgtttggtgaaccatacttattattattatttttgtaaaaataaagatatctctaatcaaagccgtttctaatattttagaggccaaaacaactaaagaaaatattaaaatatggtcgttttttgatattcaaataaaaattcgttataagttttacttcaaattaaaacaaaaattaacatagtactgttaaataagtacattataccatatcttggttcaaaatttgtagagatattgtaaacaaaacaaataatgaagaaaaaaaaaacaaaaaagccatgaagaatgtttcataaaagtaaaatttctaaatataaagtaaacaaaagagagagagaaatgttttaagttaaatagatgttaaataaaaaatggatgtaagaaaaaaaagttattgataaaagaagaaatatatctaggcacattgcattgtgttgctcgtctctggctaggcgtacatatctcgcctttataattgtcaccccactgttgttagattctagataacgtgggaatacatgtaggtgcttaattggtcgtacatgtcaaaacgaatgtgcttggtagaaacaaaataaaagctagtgtgtttgacgggaccggaggattcgtactagatatgatcgaatatttctatttctatgtggaatttagttatcttctctagcttggattttgttagaccggccagccagttcatgtggtagcattatattagcaacactagttacgtaaagttttgtgctcagatctgggacatgcaacaaatgatattataattttgtatgcatgcaacgtagtgggagatgtatcagctgtatcaactaatgatattatacaatatgtacaatttacaaatgatattcccaaagtaacgccccatgcactaggtccttctaatagggtcacatatttatcggtctattcatttacccaaggaaagataaattgctttattatgtttaaccaaaattcagcatctaatatagcttcgaagtcatgaatttgaaaccctttttttgtcaacaatattatattaatcttcgaatgcgattacaaccgaaagaaaccgggtactcgatgccgaaaagtcccggaatgatacataaatgagatagattaaataaacggttacaaccgtagataagattaaatacaaaacatgaatttgaacttaacataggaaacgaactattttaacttgttgtagttgttaacccgaaaagagtttggatattcttacatttaaaactttttggttaccaaaaaagtatttaatacaaagtaatttttatgttgaatgatgtgcaaatgaatatatcctcaaggttatcaatttggaccatacggattcctgtcaagaccaaacatgtgtaggggtgaataaattagccgaaaaaccggctctacattaaattaaacttgttttttctttttttctttctaagagcaactaagatatatataaccggttcaatttataccctaattgaaacccctttgtcaaggaacctgtctatatatacagacatatgcttactactttcttctcactccaatacaactaaaaaaatctactacggtgtattatacgacgaccatcatg

SEQ ID NO: 11535 - DNA, 3000 bp, Unknown
  misc_feature (1)..( 3000): cDNA_ID_2717478_gDNA_ID_2214501_Annot_ID_133665 3000 nt of promoter + ATG
attcaacataaaaattactttgtattaaatacttttttggtaaccaaaaagttttaaatgtaagaatatccaaactcttttcgggttaacaactacaacaagttaaaatagttcgtttcctatgttaagttcaaattcatgttttgtatttaatcttatctacggttgtaaccgtttatttaatctatctcatttatgtatcattccgggacttttcggcatcgagtacccggtttctttcggttgtaatcgcattcgaagattaatataatattgttgacaaaaaaagggtttcaaattcatgacttcgaagctatattagatgctgaattttggttaaacataataaagcaatttatctttccttgggtaaatgaatagaccgataaatatgtgaccctattagaaggacctagtgcatggggcgttactttgggaatatcatttgtaaattgtacatattgtataatatcattagttgatacagctgatacatctcccactacgttgcatgcatacaaaattataatatcatttgttgcatgtcccagatctgagcacaaaactttacgtaactagtgttgctaatataatgctaccacatgaactggctggccggtctaacaaaatccaagctagagaagataactaaattccacatagaaatagaaatattcgatcatatctagtacgaatcctccggtcccgtcaaacacactagcttttattttgtttctaccaagcacattcgttttgacatgtacgaccaattaagcacctacatgtattcccacgttatctagaatctaacaacagtggggtgacaattataaaggcgagatatgtacgcctagccagagacgagcaacacaatgcaatgtgcctagatatatttcttcttttatcaataacttttttttcttacatccattttttatttaacatctatttaacttaaaacatttctctctctcttttgtttactttatatttagaaattttacttttatgaaacattcttcatggcttttttgttttttttttcttcattatttgttttgtttacaatatctctacaaattttgaaccaagatatggtataatgtacttatttaacagtactatgttaatttttgttttaatttgaagtaaaacttataacgaatttttatttgaatatcaaaaaacgaccatattttaatattttctttagttgttttggcctctaaaatattagaaacggctttgattagagatatctttatttttacaaaaataataataataagtatggttcaccaaacaatgcgcaaacccgacaaaacattcaacggttacaaatgactaaaccaatcagaaaattctttatttagcaacaaatcttcactatataatagcgcaaatgtttattgggaataagaagtaaaaagtaaaaaagtttatcaataaggaaaaatgggtatatccaagaaaacagttgtacaatcatttgctcttataattattatatctatcgtcatgagcacaacggaggcaaacagtataggcgctccagctatgcgagaagatttacccaaaggttgtgctcctggatcttcagctggttgcaagatgcaaccggctaatccgtataaaccaggttgcgaagctagccaaagatgtcgtgggggttgatactatgagatataatttttcttgaaaaaagaagaaaagataaaattacataaataaaacttaatttttcaactaaattagtaaaactataaaatacaaaatttttgtaactaattctatgagaataatgtttttttaagtagcagcaagctgagactggtacgtgtatggtaagctagtattgtctaacttagcaaaagataattgtatattaccagtcatttgttatatttttggatatttatgtagaaaattcatgtgtattgttatataagaaaataattaatatattttgttgttttttttaaataaataatgtacttataatagaggtaaaatgtgtaacgctaggataagtacattcttgtcggatccaagaaagttagtaaaccatatatttaaggcaacaggttcttcttcggatcataatctctctcattaaggggaaaaaagaaaaagcaaatagattaagagaaaaacagaagaatcggaaaaaacttgagaaaagaaaatggaaacgaaaaaaaagtaataaataaatagccctatatataaagaatgcatcatgcatgcatgatcaagcatatatcctcatcttgttgatcactttgtaaacatcatccacatcatcgtcgtcgtcttctttcaccgcctccacacaccgctcattatcgtccccgaggctgccatcgccgccgccgcatcctcctctactgacgtcagcagcagcaccagactcgactctcatgaagaaattgcataggagaagtgttaagaagcaacatataataaattctctagatgcagccatggatcagacactttctctctatctctctttctcttgtctgaaaaacaaatgataatatagattaatccaacttactttaaaagcttttgttctttttatttactatgttcttttgttatgcttttctcttacaattgtgcttatataagaaatggaatttactattaatggagtagagtgatttcttttgagctggtcttaaggctaagtaactgttgcagtattttacttgaatattcatagcaaaaataaagaaaatcatttaaataagtggtacgttagtgacaaggaacaaaaaaatgacatgttttcgatgtcaaaaaacatacattattacaagttcccgatgaagacttgggccttgagcctaacattttatttgataggcccaatagtaaaagtaaaataaaaacgtccgtgttcaataaggtccatcgtcaccgccaaatctatcaccgccaattactctctaatcggaaaagagccccgacgacaacgaccaccgtccctccgtc

SEQ ID NO: 11536 - DNA, 3000 bp, Unknown
  misc_feature (1)..( 3000): cDNA_ID_2706773_gDNA_ID_2214501_Annot_ID_133667 3000 nt of promoter + ATG
agcaggttcagaactctactgggtcgattcgatctcccgacaaaattgaaggtagttactctcttttttttcattgaagatccaacgaaacgggttttttccgtaatgtgtttgaagatcatataatttctgttgttgtttttgatcattcaagtcttattgtgatttcgtttattttttctgagagttctgatcattcaagtcttaaaagttcgaaaatttagagttttgtctttttggagttatcttgttggattcgtcttgtcggatcattgattccgaatgcttcttctacatttatggaagttaaagatcatgttttttttcattgtgtgatattgttctgattctgattgctctttgtcggatttaaagtttgacattgtctttttgtctttggaatgtggattcttatgatttgagtttggtttttcttgttatttagatatataatgttcttggtgttatgattttgtagataccttcaggaggatgaaagttaatgaagacaatatggagcaatctagtccatatcctgatcgtcctggtgagcgagattgccagttctttctgagaactggtcagtgtggctatggaaactcttgtcgatacaatcatcctcttactaatcttccacaggtgagaaacttagtttatatggctgaatcttctcttcatctttcctgatactcgagcttacagtttgtaacattttgcagggtattatttattacagagaccaattgcctgagagagttggacagcctgactgtgaggtgcactgcttacattatgctgcaaaacataccttgtcttgagtctttccttatttggaaagtgttaatacagtagtttggatagttgatgcaccgtattgttttacttttctctgaagatgtttaacgaacattttcctcttctgtatgcattttctttgcagtattttctgaagacaggagcctgtaagtatggcccaacatgtaaatatcaccaccctaaagacaggaatggtgctggacccgtgctgttcaatgttctcggtttgcctatgcggcaggtaagattacatcgttgcatatagcctgcttttcatccaccagtttcatacttgatagaaaactttatatgtttcttctctctccagggtgagaagccatgtccatattacatgcagacaggattgtgtcgattcggagttgcctgcaaattccatcatcctcatcctcattctcagccttctaatggccactctgcatatgcaatgtccagctttccgtctgttggttttccttatgccagtggaatgacaatggtgtctttgcctcctgcaacatatggagctattccacgtcctcaagttcctcagtctcaggcctatatgccctacatggttgcaccctcccaaggccttttacctcctcaaggctgggccacttacatggtaagtcttaaatatagtttctcagtgcatagaccttgctttctctctgtgaagttacaataaatagacagagattctgcttttaacaaatttcactttcttttacaacattcctattttgcaatagattgtcttaatctgaaaattctctcttttcctttttaccgtggtgcagactgcatctaaccccatttacaatatgaaaactcaactcgactccagttctagcgcatcggtggctgtgaccgtgacatcacatcatcacagtttttctgaaagagctgaatgtaggttttttatgaacactggaacttgtaaatatggtgatgattgcaaatacagtcatccgaaagaaagattgttacaatcaccaccaactctcttgaaccctattgttcttccagcaagaccagtaagtctcttgtccttctttgttattttttgccaacttgacatttccgcaactcgttctgtttattctgttaaagccaacaagctttggtgacactaatttctctcattttgctgtgttcagggacagccagcatgtggtaacttcaaggcctacggattttgcaagtttggagcaaactgcaaatttgatcactcaatgctgctaaacccttataacaatacgggcttggccatgtcttctctgcctactccttatccttatgctccacctgtttcaactaatttgaggatctcatcgccaccaagcccctctgatatgactaccctatccaatggtaaacccgctgctgcagaagctcaaagcttggagactgagaaacaagacgatagtccaacagaaccagaaaaatcagaagtggaggactcattgccaccaaacggctctgattcaacctccctgcccaatgataaacctgatgcagagactgagaaacaagacgatgattctgcagaactggacagctcaaaagtgcaggattcatctgataaatctacatgatcacgatcatgatctcacaatctggcagagtctttccctgtcaggggtatctaacggtctcaaaatgatctctctgccctttttgttaatttttttggaaagagggcttggaaatgttctatctttttttttttttttttttcttcttctttggtttcggagacagcaatggctgaaacaaaataggaaaagaacagtgttttgaattggttaataaaacttgacatcctttagcacaattttcagattctcaacatatcaagttccatgatttttctatttctttatcaaactgtatattcgatttccttgatgcagcaactagaaaatgttgaacctaactagtttttggaacccaacacaaatagtaaccctctttctgagccagaggcttgcctagttaatgttacaaaagaaaacgaagcgacatcttatgctgatgtgtcaggatattattggttagactacgtaattccacggagcttgtgttcttaaatctgctgcttcgcaggatcgcgagagagaaaaggatacaattttacagaagaaagtgaaaagaaagagagaaaggggaagaagaaaaatg

SEQ ID NO: 11537 - DNA, 3000 bp, Unknown
  misc_feature (1)..( 3000): cDNA_ID_2706741_gDNA_ID_2214501_Annot_ID_133669 3000 nt of promoter + ATG
ttcatcctctacccacaaccactttcaatttctcgagctgtcaatccagatgaccaagagctgagtagctaggcatggtagtaactgtaacacaatcactggggcctaattgtagtaattattcttattctttaatagacaaatatcttaaactttaatgccattgtccttttaccatttcagcataaagatgttgagtagacaaggaggaacaaacctgagcatgaatccgtttctttctagccattgagacagttgactgattcaaactttgcgaatctgacccactcagcgcatccttctttggtagcccatgagagcttccttgtgccttcccctctacctttttgttttgataattgcctacaaaatttcctcctcttatgctgagagaattggagttgaaaccaatctggttcttctcatgtggccatgcatttcttgtgcttggatcatctccgagcatccgcaactttacagaatatctgtccctagctcggtataaatctattctatgtctctcaacggcatttatatcttctttaatatactggagatcagtttgcacctacattaagatagagaagacataaatgacagaattctataatattctgagatctcatctaacattcaggggttatacgtctcatgaatagttggatagatcatacatctattgatagaaacatggtttatggctttcttttacaacaactatacagtctaaacccagtgaagattttgaagcaaatggaatgaagagcaacgagaataattatcaataggtagcccaatgctactccataattcagacaaaccaacctcatttagttcatcaactttttgcttccttagacaatgcaaaaagtccaaaagtatctgcatgttcctctcagcttcttcctgttccatttttctcttcctttccgcaagaagtgtcagaagattatcaacctccttaattgacacatcacaaccctgtctaagtatgaacgcaggaagtcaatatttgatcaaaagaaatgacttagaattgctttttactccaataataattctgagaaagcaaacttaaagaggaaaaaatgaaacataaaaagcttgttaagaaccgaccctttgtagtgcttcccgaaactgatccaagggcgatgcagtttttgacacatgccgagctgaagttttcttcaatagctacacaattgatacataaacgtcatataataagctgcattccagtgataaatagtttcaatacactatcattcctataaacatgcttctatttagctgtaataagcagaatcctaccacaatactacacatcaaaaacaaaacaaaaccttcctaagaaaatctaatggcaaggttcattggaatcgattaaagactaagctagcttacttgtttccacaaaaaccacgacaaaaaccaaacttgattacaagctaagactcaaacaagcaacacccgaacttgaactgaaaagctaaggaccaaacacaaattacgagtaaaattagaaaaagaaaccttatcgagcaagaaattagggtaaagctgattattggtgaggtgttggctacaacagggacaatcactcttgttcctaagatgtgtgatgatacacatatagcagaaactatgaccacaagccgtgaggaaagcatctttaataatctgcatacaaatcggacaaagcaagtctttatccagatccggtgctccaatctcagaaccgccgcttcctccgtcgtcattttcatgacgattagcaccttcaccaactgaagatgttctcgggtcaggtttcaccgctggaacaaccggatccgtcgaaatctcttccattttgctttcaaaagatttcttcgattgtgattttggtttttgagaaaatcggaattgtgagaaaagagtggtttgggtatgacgtcggagatgaaggaggagtgaggctgaggtgtggtgggatccaccgtggttcttttctgaggtgacaaatcctacacgttctggtctacgcgcttcttttcgcgcgtgtgtctggcgtttctccaagcgctggtacggtttaattatccggcttctaatttatagtccggttcaatgaaatttcttacaattaccacgacggtctaatttaatttcttacaaccattcattttatttcttactatttgaaatgaataagttgggaatttcaatccattcaaccggagcataaccctagaaatagaataagttttgaaggattcggtttaataattttggaataaaccatttttatttcagttcttaaattttgttactgtaaaaaatgactgaaaagtgaaatatattttaattttcccatcactggaaacgttccctccattcttttgcttgtctgggaaacccaaagagactgtgacggagaagagaaatgagctaaataaattcctctctttgattcaccggaaccctagaaatcctcttcttaattctttcaaaggtgcgctgttttcactagatatcgctgttgtaattgttgttgattcggagctaggttttgtttttgtctctctttcggagaatttgcatgaagctaggatttgtctgttgatagttgtatggttttggctgcgttgtttctctcttgaaagtcttgttatgctactgtatgacacactcgaatgagtttttgtttgtgtaatgtttctcaattttgaaggcgaccaacagttaaaggtgccattttttttccagattaagtttgttcctcatctgaaatttataccatttctcgcgatttagcaggatatgcccagaaattaaaatcttagaacgacaatggtggtaaagtttttagctttttaccttttggagttgtcttcttaatttggtgtttttcttttctttcttagtctcctgagcattgtgttttggactggtttttgcacactgtaaccaacctccacttttctctcttgcagattattttcccctggaaggatg

SEQ ID NO: 11538 - DNA, 3000 bp, Unknown
  misc_feature (1)..( 3000): cDNA_ID_1807111_gDNA_ID_2214501_Annot_ID_133670 3000 nt of promoter + ATG
tacaagattacaaaactgcaagaaaagaattagaagttcaaacatacacacctccagaagtgggataagagactacaaaaaaattaacgaaggaaacactgctggagatggatacctccagtggaagatagttgggccgatctggcttgccaacatcaaggcatggaaagtacgcagaagaaataggctctgtgtaggtttgcttgaaatagtcatacacagtaatctctctaataggtacctcacgttcaccatctttaatcttcattgaaaacctggaaaacggtgaagaaagtcaagcaaaggctgaaaaagaggacaaaatatatattgatagtacaatcatggggaacctacagttgctgattgcacggtttcgaacttagacctataattttaaattccatgttacggtgtgttgccttaaccctcatatgtttaagcattttcgcagcctgccaagtttcaatgaaaacttcacaagctcaaaacaaaagcagccagtcatgttctcagttattgcatttaaaagccagaactaccttaatccagtcgatttgccgtggtgtctcaacactctgattggctttcaggaattcaataactggaccaggttctaagatcattgttgttgacacatctgcaaaccatcacaaaacgaaaacagttttgcttattaataaaactatccacaattaagacaagtttatgaaagctggagatgagaaaggtatactgaaaaataccaatgttaagcgagagtcctccatgagttggacgaaagctcgaatgtaaacctcgaatacctataacacctcctccaactttcatggggtgcccatcgctatggaaaaatgcctgtctgaccaaaaggcatcccctgcattatcaacagttttctatagtaagcatcgagcatggtcacaaaatgcaaatagttgtacattgattaaatttcaccaacaaagtgaaaatatgataataaaaattggtccattagaacgtagagtatctattttaataaaaatataaactgcacaaaagcaaacagatagaaagatttacctttcagctgcttgctgcctcagtacaatgtcaagcactctaagtgcatcctgagcactcttatctggtgtataagctcctctctgagtgccaagaacagtcttcaacggtatttctgcagcataatgtatctgaaccttgtaacttcttggcaagaaagaacgttttgatcgcttgcaagtaccggaagaactaccaccatcagagacaccacaatcactataaacttaacaagactgcgttagttagaagatcaacaagatctatcttgacaccttgaaacgattaaatatcaatccagataagagggacataccgttttgaaaatgacccttccacgatgactagaaagtcaaattcgttctgtggtagaggaccaacagtatataaagtcttctctccatcatatgccaaccttttaccatcaagatcagaagagtaagtcttgaatagttggtccataagctttctgcttattcctgtcccatcaacagcatcaccgttttctgtggtgatactaacctgcaaaaaaggtaccgatatgtcaaacatctcacacacgcacagacactgatgaaagaatgcagaaaagtgactaatgaatcttacagtgtactggtaaaatactacatccggctgtctcacagaaacattaaagtgattggtgcacaattctattgggttgcctgtggttccaaccccacgtctagttgtgatgtcataatctcgatggctgggctgttctggttctatacttatgggtgacagtggcagagatgaagatgtctccatccttccaggggaaaataatctgcaagagagaaaagtggaggttggttacagtgtgcaaaaaccagtccaaaacacaatgctcaggagactaagaaagaaaagaaaaacaccaaattaagaagacaactccaaaaggtaaaaagctaaaaactttaccaccattgtcgttctaagattttaatttctgggcatatcctgctaaatcgcgagaaatggtataaatttcagatgaggaacaaacttaatctggaaaaaaaatggcacctttaactgttggtcgccttcaaaattgagaaacattacacaaacaaaaactcattcgagtgtgtcatacagtagcataacaagactttcaagagagaaacaacgcagccaaaaccatacaactatcaacagacaaatcctagcttcatgcaaattctccgaaagagagacaaaaacaaaacctagctccgaatcaacaacaattacaacagcgatatctagtgaaaacagcgcacctttgaaagaattaagaagaggatttctagggttccggtgaatcaaagagaggaatttatttagctcatttctcttctccgtcacagtctctttgggtttcccagacaagcaaaagaatggagggaacgtttccagtgatgggaaaattaaaatatatttcacttttcagtcattttttacagtaacaaaatttaagaactgaaataaaaatggtttattccaaaattattaaaccgaatccttcaaaacttattctatttctagggttatgctccggttgaatggattgaaattcccaacttattcatttcaaatagtaagaaataaaatgaatggttgtaagaaattaaattagaccgtcgtggtaattgtaagaaatttcattgaaccggactataaattagaagccggataattaaaccgtaccagcgcttggagaaacgccagacacacgcgcgaaaagaagcgcgtagaccagaacgtgtaggatttgtcacctcagaaaagaaccacggtggatcccaccacacctcagcctcactcctccttcatctccgacgtcatacccaaaccactcttttctcacaattccgattttctcaaaaaccaaaatcacaatcgaagaaatcttttgaaagcaaa

SEQ ID NO: 11539 - DNA, 3000 bp, Unknown
  misc_feature (1)..( 3000): cDNA_ID_2706753_gDNA_ID_2214501_Annot_ID_184000 3000 nt of promoter + ATG
ttaataaagtttattcgcagctcatttggttcctttatgatattatactcaagctaagtaatgggttcgattcccatcttctcatttctttatcaaaaaacaagtaataaagttccttaaatattgtcttaaaatactatcgtagtaactagtaaggtggaatatatagtgtaactttggagcttgaggtcgtcggtgatgtgctggtacgaagagacacgtggcgctcaatcatttgaaaataatttagtttttttctttcttttggaatatgggaaccaccaacgacaacattattaattccatagattcggagttaattgagcgggttgcacgaaccacaccacacaccagatgccgaataaaattttatgcataagctaagcgaataatcaatgcatagttaaactttataagactgatatttaacgactggattatcacaactaagaggcgttttatttgttttaaacattttaattaagttattaatggtttgcgactcaagacgataggaaacgaccatctttttctactcatgaatatttgaaagaatattgttcttgcgacaactgatcaagctactatctttgaaaagaacgttcttctgccagtctactgaagaataactcaaaaaatgcacttggggctcactgatttttaacaacatttctttttatatacatcctttgaaagaaaactgaatcgtagcaaaaactagactaggaaactgaaaaaaaaaaaaaaaaaaattaagaggaagactaggaaaactgaaaaagaaagctttattaaaccagcatgcaacacaacttaatcatatgaattactttgtttttttccacattagttgccgtctgattaatttaacacatttgaaactatagtcatctttttgaagaaaaagttcactaataaaaacagagaaaatccatttaaaaaaaaaagacattttaaaagaatatcgagtaggatttttaatgtaaactttatataaattttataatataacatcaaatcgaaactaattttaaaaactaactttattttataaaagatacagtataatgaaagtgtataaacgaattttgttgtggatcaacatgaaaattaattagtttgtcaacagctattcatatagttaaatgatacaagtaatgataaacaaataaacgcatgttccccgttaacaatttttacgtctccatgcttagtggcgctaatcacctttttggttcgctcaagtcaaattattttgaccaagttgtcggtcgagctagctcgaaggtaacaaatagttaggcccactttgaaaatgtcggtgctcggaaaaaagataaaccgctaaattaaaccggtcatcatgaaactccggaaacctgaattactgccaaatttatggttgtaggcactgcacacgtgtaggtgtctcttagtccccattgtcatacccctcagtttttattggtggtgggcaaacttatattaagatgacccaggtccatctttcaaacccatttagatccatcctatatttttgaatgtttggtgtttttgctttagatatcaatagaggtgaataaattagtattcatactctgcagatttgagtttaacatttgtgatagtttttgtaaactttataatttgtaacagtgaacccagccaaaaccaaagttttgatttgagaaattagccttactattcacgattctctcgcctaacacagcagccttaacgacagaaacagaaacgaatctctgcctagcaatgacattctacggttccgaaaatttattagtattaattggaccgtttcatggaaacttgaaataattaagagaaactaattaagagacaaaatcgtccactttaactgttacactatcaacaactgacactctccttctacttttcaaaattacacaagatcgctaaatacattgaaattatcaccaccttttgaaacaaaaattgaaatcattaggaaaagtatcataaaacaccctctcacacagtacaaatgtaaaatttcaacaattgtaaatagtatgtaaaatgactttactacatgcacttttaattaattcggtctagatttagcacagtaaaagcaataactagctgcataaattacggccattaccactatatggaaaaagcaaaagtctccacattttctcatgtggaaatattttagattaaaaacaaaagttaaccataaaaacaaagtcacgtcatctctctcctccaccactccacagagctttcaaatatatccctctcctgcgagagcagagaaatagagagagactagtgagtgagagagtccatcgctttctttctttctctctctcgctctctcttcatctccaacagagacttctttctagagaaagagatcttcacaaatatgactgtgatgaatcaccgacacaagcaatgtcattttctcctcctccttctgatcactgtcttctctgccgcgttggatggtgtttcttccgagacagacgtcggagggtttgactacggtgaagcattgtctaaaagcttactctactttgaagctcagagatcaggaagacttccgtacaaccagcgcgtgacttggcgtgatcactctggtctcaccgatggtcttgaacaaggggtttgttttctgttcaaaactcttgtcattttattttttaattaattttatttttgaattcaaactaattcagtttactatcattagtttgaattttaataagagaattgaaatttattgtttgtattaatttataaataatacataaatttattgtagatttccatttaaagaaattattttctttggtttggaatgagacttgaaaaccttttgtgaattaagtattgaaattaattatttgttttattttgtgatgtgactttaattttaaaattttggtaataaaggttgatttagtgggaggatatcacgacgccggagaccatgttaaatttggacttccg

SEQ ID NO: 11540 - DNA, 3000 bp, Unknown
  misc_feature (1)..( 3000): cDNA_ID_3040280_gDNA_ID_2214501_Annot_ID_183996 3000 nt of promoter + ATG
tctatgtgtttaaactctttgcatcaagagagaaggagattgctacttttacgtaatgtgttgcataacagttgttgatttcggttttacatgctataatctcaatctctctactctttttttccccaacaaaattataggaaatgctgcgtccaatacctgtggcactagcgtcatgcacgagattctttgaggccatgtctgcgatgagagaatcattcgcgactcttcaagagcttcgagttggtaactctgcagtttctttaccaacaacaccaggaggtaacgaaatgacacatagagactcagattgtgtgactccacctcaagggaggatagagtcaagcttcgacgatttagctgttcataaaacaaggagacaaaacaatgatcaaaatgaagaagaagaagaagaagaagaagaagaagatggtaataacaatgggaaccggagactatcttggcctccttctgtaaaaaagagtagcgtttaaacagttgcttttgtctttgcttgagctttttaatatcgatcgtgttttgtttcatcagcattagtgttctttatggatttacttatttctatttgatagtctttgagtgaaacttaaaacagtgtatattttgttaacactggttttcatggtccatgtgactatcatattttagtctgttcgtttgttcgccgcttgcggctgcggcagaccgcggcaaaactaccgcaaaattaaaatatttcatagatgtgggaattgttttagtcgagaaatctaaagaggggtctataaaaaaaggattagcattcataggcacaatcgttccactaaataactcgtatggtctaaatattgtagtatgtagactgtagagagtagaccatgaatttaagacaactttaattgagaaccggtggcacctaatcatattttagccacctagttacatagcccggtctggtcttaaaagtagtttgtgtaaattggacaataaaacctcatatatcatttacatgatatttaaactgtaaaactcatcactatttaaaactataaaacgaaccacaaaagtgtttgcaataaaaaaaataccacttatatataaaattcatatcagattagattgcataggttcactgccaatccatggccaacatttctaaatgatatacagtacatgaaagactattatattcaactattcaaagttatctgatggaaaattattacatgaaatcaaataagtagttgaatctggatgatcgatctcaatattcatattaaaatggaacacacttttgttgttagagtattgatataatgcatgtaacgtgaaattgcaataatgcatcatatataggtttatatagattaactgagagacatcacttgcgttggttactcaataattacgtagctaaaattaataaagcggcgttaaggacccacccacgagctctatctatatatttccgtggtttttgtattcgaaacagaatcgatcacatacgtccaaattttgatttgttcctggcccactccttatccttacgcgcccgaacgcgtgtccttttaaattgactctttcatataaccaaaatatcagaccaacctctggtttattcggtttagcgattatactcattattacacattttccagacacacaaattgagattatttaatttctcacatttcaagtatatattaaatttcggatgcgtgcaattaaatgaaacgaataaatatgtgcaagcgattaatgtaccgacgcaggcgatgaatattcgtatttctcgcaactttaaatgtcgatgatacacttttcaaagcataactttaatgtcaaatgtcaattcattgtccatgcgtccatttcccactctcgacacctattttcatgtcttaaattcttgatttattgcttcatttttgatttttatttttattttgttgtttacaattcattatttcttgttcattttctgtaagacatttgacaaattatacaaaagaatcgaatctacaaaacatattctaatctaaacaacaaaatctaaatctaacagtctcaaaaatatttgacaatcatgcaaatatgttacagataatatcaatttttcatgatgcgagaaaataccattttagtgctcattgaataaagatgcattattagtttgcggcttttcagaagacatcaagtctcaaaggaccattatgtaatttgaagaaaataggaaactacacgcgcctgccaaagaaggaccttatcccacgcgtttatatatcttccaatccataagcagagcttctcttcaacgtgctccggtgaagattaaaaaccgacgagaccctggcgccatcacaactacgcaatctcattcctccgtcttcttcggctttcaaatttaccattttacccttctctttccctgagacgtcttctttggaaatattcttctcttcttccattccaagtaaacccaaattctctctctctctctatctctcaaatttcaaattccggatttattgattctctggtgataaacctaaacctctggttttgatttgtggttgttattgttgctacattaatggtgcttttaattttttctctgatccatttctcgccgtgtgatttcaaatttctccggctgtttttgttcgccggcgggcggtgttgattcgattctatacgatttgaatttcctttttctttaggttttagagtttccttttctattaagtaatcacacaattttacaaatttgttcctaaatttatttatgtcattttaccaactaactaccattaatttgtataaaactcgtcggcaatagcttcatgacctctttctctcaaggctaagctcttgtaatctctgttgagaatttgttgtggagtatgatgataatgacgaataatctggaattacgtctttcgatttttcagtgattttgaggttaattggaaattagagtgcaaaattgggatttagatg

SEQ ID NO: 11541 - DNA, 3000 bp, Unknown; identical to SEQ ID NO: 11538
  misc_feature (1)..( 3000): cDNA_ID_1807111_gDNA_ID_2214501_Annot_ID_183994 3000 nt of promoter + ATG

SEQ ID NO: 11542 - DNA, 3000 bp, Unknown
  misc_feature (1)..( 3000): cDNA_ID_3040292_gDNA_ID_2214501_Annot_ID_183992 3000 nt of promoter + ATG
ttaatacaactcacaagtaaacaaaattgagatacttattgcaatttgagtataaattaccaaaccatcttataagataaaacaaataaacactttatattttgtatcagaataaatataatttgacgaaggacagaaaaggattacaagcatatgtatgtaaatcttcttcgtgtttaagctcctaaaaaaaatcttaacttgtgagttcagttatataattagattgcttttaagacaataatcctagttgtaaacctgaaccctatagtctatagctaagtctacacttgtcttgtgccgaattaaaaaatgatagtatgatacaatgcagcaaaaaggtctcttggtagattctgccaaactgcattaaatgtttttattatttattcttttttaaacccaattgcttgctatatcgtgcgttaccttaaaatcgaaatttaccccaaaacaacaaaacaaattggtcgtaattctaagagattcagctaaaaacaggttttgaagagtactatcaaaccgatttaacaactaattagatgatcattaaatttatgtatttttgtttgtaattagacagtggagttgattcaacattcacattcgatttgtttttaaaattttaactcttaaacctaatttatttgtattagtttggaagcgaacttattgaactcatgatttagatatagattcgaactgatggatagaaatccaaaatattatagttcatgattatttgagttaagttcctttcacaaaaataatttaacttacaatctaatttcttgcatgttaaatttcataacgttttctaatataaacataaacttattatatgaaagtattataaaaactaaactaaaattcacgtaaaagaaaacaaactggtggcctgaattttgcaattagtgtgcattcttaatcaatcgtactgagtacaacagtattggtcattaagcagctacaaattaaggaaggattcagcgtgggccctacagcagaattaaactggtccaaaccgcagattagcgtacgaagaacattttagtatgaggctctattttattaaaaaaaaaaaagctcccttaatctttataaatcagtattttttacctttctcattaaataaaataccgtgtagctcacgctttcctttttatcctttactccacactaaatgacgaaaacacccatcaatttcttttctttctctctctttaacttaataataatatatttatatttcccctaaattctgaatttataatgtctcatagaagaaatagtttagtttctactttcaagtttcaacgtagttttttgtattgtgaataaaactatttgttgtggagtcaattgtaaaatggggtataattcaaatgctaaacaaaattagagtcgtttatcaaatagtagattcatttgtagaagaataaaatataataatgatgtaatagactacaaacttgtcttagataatttcatctctaatcaaatacatgtttcattatattctgtttgttctcataataacatcttggtaaaaaattgagcttatatgtcaatgagacataattattttcataaaaaaagttatacagtaagtcttaattaatttacagcattagttacaatttggatcaacattaagtatcttttaatgataccatcaatttgtttatagagatcaggagtcaataaatacatttattcattcagcataatatagttggaaatctgtagaattttagtgagaagatataataattaagaaaaggacccacgcaccgtcatttagatacgcgaataaactgctttcaaattaggtgtgtcatgtgtgattgcatattaaatgttaacaaaccttaatttggccaaaaaaataaacaatttacaacactaatagacttatttataaaaagatcagaatatgttgataactagagataacatttaagaaattataatcactttacattcatattaaatcataagtttatcactattttttattgaatttagtgctaaaactatgtgctagaaataaattattttagaaaagtatgttgagttattaattatgaaaaaataaatactacattaagattacattatacaattgaaaagttcagtattaactctattaagattaattaacatataatagcttttttaggcagcataatttcatttgtttaaattaaaatgcaataagagaaaaaaaattaatttttattaaataaggttcccaaacaaagaagaagaatagagggggtcccacaaggtttgtatccaacggctcagatcgaaccaacacattgaaaattaaaccacgcgcaaacgagttaaaggaacatataggggtaatatagtcatttcagatggaccggcagaatttattaatccgtacacggggggggggggcaaagactcattactcagcactgttatttttattttcattatattatataaatgcaatatttgttattatattattatttgatctcgttttcacattgaagaagaaactcttcattacattgggagaaaaaaaaagaggcaaaaaaccaaaaaggaagatccgaaaattttcccacgaaaatctcagattctggggaaaaagaaaggaaatcgccaagcagagaataaggcaaaatttcattcctattggaatatttgggctgagatttttctcttttcttttggatttgttcaaacgataaatctatctttgggacacaaaaaaaaagttaaatttaagagatcgttttttattcttttcaagttttcacattttgttcttcgtttgatctttcatcggaaaaaaggaaaaatcttattttccttttgtgtttgtttccttttcgtttgtttgatcattgtgatcatcgtctctacttacatacaactcataaacgattttttctcagaggattagagacgagttttgattttgtgtctgtgactgtgtttgtttcataacgagccatg

SEQ ID NO: 11543 - DNA, 3000 bp, Unknown; identical to SEQ ID NO: 11535
  misc_feature (1)..( 3000): cDNA_ID_3040300_gDNA_ID_2214501_Annot_ID_183990 3000 nt of promoter + ATG

SEQ ID NO: 11544 - DNA, 3000 bp, Unknown
  misc_feature (1)..( 3000): cDNA_ID_3040308_gDNA_ID_2214501_Annot_ID_183987 3000 nt of promoter + ATG
ttaagaccagctcaaaagaaatcactctactccattaatagtaaattccatttcttatataagcacaattgtaagagaaaagcataacaaaagaacatagtaaataaaaagaacaaaagcttttaaagtaagttggattaatctatattatcatttgtttttcagacaagagaaagagagatagagagaaagtgtctgatccatggctgcatctagagaatttattatatgttgcttcttaacacttctcctatgcaatttcttcatgagagtcgagtctggtgctgctgctgacgtcagtagaggaggatgcggcggcggcgatggcagcctcggggacgataatgagcggtgtgtggaggcggtgaaagaagacgacgacgatgatgtggatgatgtttacaaagtgatcaacaagatgaggatatatgcttgatcatgcatgcatgatgcattctttatatatagggctatttatttattacttttttttcgtttccattttcttttctcaagttttttccgattcttctgtttttctcttaatctatttgctttttcttttttccccttaatgagagagattatgatccgaagaagaacctgttgccttaaatatatggtttactaactttcttggatccgacaagaatgtacttatcctagcgttacacattttacctctattataagtacattatttatttaaaaaaaacaacaaaatatattaattattttcttatataacaatacacatgaattttctacataaatatccaaaaatataacaaatgactggtaatatacaattatcttttgctaagttagacaatactagcttaccatacacgtaccagtctcagcttgctgctacttaaaaaaacattattctcatagaattagttacaaaaattttgtattttatagttttactaatttagttgaaaaattaagttttatttatgtaattttatcttttcttcttttttcaagaaaaattatatctcatagtatcaacccccacgacatctttggctagcttcgcaacctggtttatacggattagccggttgcatcttgcaaccagctgaagatccaggagcacaacctttgggtaaatcttctcgcatagctggagcgcctatactgtttgcctccgttgtgctcatgacgatagatataataattataagagcaaatgattgtacaactgttttcttggatatacccatttttccttattgataaacttttttactttttacttcttattcccaataaacatttgcgctattatatagtgaagatttgttgctaaataaagaattttctgattggtttagtcatttgtaaccgttgaatgttttgtcgggtttgcgcattgtttggtgaaccatacttattattattatttttgtaaaaataaagatatctctaatcaaagccgtttctaatattttagaggccaaaacaactaaagaaaatattaaaatatggtcgttttttgatattcaaataaaaattcgttataagttttacttcaaattaaaacaaaaattaacatagtactgttaaataagtacattataccatatcttggttcaaaatttgtagagatattgtaaacaaaacaaataatgaagaaaaaaaaaacaaaaaagccatgaagaatgtttcataaaagtaaaatttctaaatataaagtaaacaaaagagagagagaaatgttttaagttaaatagatgttaaataaaaaatggatgtaagaaaaaaaagttattgataaaagaagaaatatatctaggcacattgcattgtgttgctcgtctctggctaggcgtacatatctcgcctttataattgtcaccccactgttgttagattctagataacgtgggaatacatgtaggtgcttaattggtcgtacatgtcaaaacgaatgtgcttggtagaaacaaaataaaagctagtgtgtttgacgggaccggaggattcgtactagatatgatcgaatatttctatttctatgtggaatttagttatcttctctagcttggattttgttagaccggccagccagttcatgtggtagcattatattagcaacactagttacgtaaagttttgtgctcagatctgggacatgcaacaaatgatattataattttgtatgcatgcaacgtagtgggagatgtatcagctgtatcaactaatgatattatacaatatgtacaatttacaaatgatattcccaaagtaacgccccatgcactaggtccttctaatagggtcacatatttatcggtctattcatttacccaaggaaagataaattgctttattatgtttaaccaaaattcagcatctaatatagcttcgaagtcatgaatttgaaaccctttttttgtcaacaatattatattaatcttcgaatgcgattacaaccgaaagaaaccgggtactcgatgccgaaaagtcccggaatgatacataaatgagatagattaaataaacggttacaaccgtagataagattaaatacaaaacatgaatttgaacttaacataggaaacgaactattttaacttgttgtagttgttaacccgaaaagagtttggatattcttacatttaaaactttttggttaccaaaaaagtatttaatacaaagtaatttttatgttgaatgatgtgcaaatgaatatatcctcaaggttatcaatttggaccatacggattcctgtcaagaccaaacatgtgtaggggtgaataaattagccgaaaaaccggctctacattaaattaaacttgttttttctttttttctttctaagagcaactaagatatatataaccggttcaatttataccctaattgaaacccctttgtcaaggaacctgtctatatatacagacatatgcttactactttcttctcactccaatacaactaaaaaaatctactacggtgtattatacgacgaccatcatgctcaaaatg

SEQ ID NO: 11545 - DNA, 3000 bp, Unknown; identical to SEQ ID NO: 11533
  misc_feature (1)..( 3000): cDNA_ID_3040312_gDNA_ID_2214501_Annot_ID_183986 3000 nt of promoter + ATG

SEQ ID NO: 11546 - DNA, 3000 bp, Unknown; identical to SEQ ID NO: 11532
  misc_feature (1)..( 3000): cDNA_ID_3040316_gDNA_ID_2214501_Annot_ID_183985 3000 nt of promoter + ATG

SEQ ID NO: 11547 - DNA, 3000 bp, Unknown
  misc_feature (1)..( 3000): cDNA_ID_3040320_gDNA_ID_2214501_Annot_ID_183984 3000 nt of promoter + ATG
agaggggtagagaagaatgctccatagtaatttaatccgacgaaatccaaagattttcttagtttctcagattcttctggtgtaaattcacgcagtcggatgtttacatcttctaacatttccgctggatactgtccatatgtgagagggcgaagaaacctgcccatttgtagttcagaaagcaagaatgtcacatcttatgtatgatcaatttaaacattattttaattaatcatggatacatactaagatcgatcccaaaggaaaaatagttaaaagaaggaagaaaaaatcaccagccgagttggtactcgagggatcgtctagctgctttgacgtcttcactcgaatttggatctttaggctcgaaccagtgagataccaacactatcccaattttccctccaccctcttggcactatattgtaacatagtaaagaaattattaaatgaataatgtatgtatggcatactatttttgtaattcagatatgtataggatttatgatttaagctttataatatatgtggaaattagttagtatataagcaccgacctttttacagtttcggaattcatcaacagcagcaagatgagcaagaatttggttgtgagcaactatgtatggctcctcggatgaatctcctgtgggacattttggggcttgccatttagagcaccgtcctggtgctttcttacctttcgagtaaccagcaacgctgtataccgatggctcgttaaacgtcgcccaattcttcaccctatctccaaattccttgaagcaaaagtttgcaaactcacggaaatcctctctacattaatttgttagcgacaaaaaaattatttaagaaaatcagatagttgaatagttttcttaattatactagaagaagaaatcttgagaagtttttatcaacaaaattacttacactatcctttcgtttaggaaacctccgtactccatttctagagcaagtggagattcccagtgaaagagagtaaccgaaggctgaattcctggcaattagtattacaaacgattaaaaacaaaagctggtataatatacacaagttggaaataacaattaagattgaataatataagagacattaagttataagatgtttaaccattagctaaaagttcatttataagatcgttgtagaacttcaccccctcctcgtttacaccttttttaatagttccatctgcaaattatatataaattttcatgagttataaaagtaaaaagaatcattacgtcattgcaatatagatttaagttagagataatatgtgtggtctggtaaattaactgtaaggacaatgagattgacttacaaggcaagatcctggtccatgagattgaaaatctgaagccattcgtgttcaactccttcattaattttatatcatcctataacgtcacatcccgcccaatcgtttcaatttaattataggataaaaaaaagactatcatttactatatatgaaatcatatacacccataataaataatgacgtaccttgtaacgggtatagaagtcgactccctcatctccatcgccattttgttgaaccttctctgaaagatgccacaatattggtgatacattttcttttaagaaaagcttttggtaaaataaaatacaattcataatcacttggtaatttataccaggaaacatgtgtgtaaattcgtcccatgaggtcaagcctctcccagaaccctttttagcaccttcaacctaaaagtcaaaccaatttgaaaatgataagactgatcttctatatatcatcaatgttataatgtgtttatatgtatgttgacctgatatgcggaaacagatgttccaaatatgaaatctgcggggaaatcttgcttgtggatctcaaactcgggtccaatgatggtgcccaaatcatcatcatttaggttggtctgcggtccaacggtggtgcccatgtccatgtcaatgtcttcgtcatctacggtcgcatgtggtccaatcacgatgcctatctcgtcatcgaagctagtttgatgaggtccaatgatggtaccaagatcctcatcacttggttgaggcctagcatcggcgttgaagctaagtatggtactagttaaggctaagagccctaggaaaagagtgagagtagctgtagccatatgagtgttttttcttgtgaattttattagttttttttttttttatgcttcttccatttccaatccattctatttataggaaagaagcttcaagtgtgtgttatgtgaaagggaatttgtgatttccttgtgttgcactcatattttgcggggcatctttagtttagttataggattagttaaaaaaagtttataatattatgaacatttacttcctttatatttctgaattcgtcaagcgtcattgtccataacaaagcacgaagtgcattttaatgactttaataaaaaaaaaagtattctaataccttgctcaaaactttaaatattataatattccaatcgtctttactagcatatatccatcattttcatatatttcctttactcacctcattttctacttattaacacaacaataagagacaaagcggcattcctggtgaatatccacgatactacattcatttaaaacaatttcgtcaaagtttacatcaacttcacattaatcccaaaatagtccaaagacccaacaaaaaataaaaactgagttctaagaagacatgggcttgttaatatcattttcatgggaatagatagcgccagtttagtttttttagaagctgttttcatataaaattcagagaagaattgttgaacatagtcaatcttaatgctgaatgcaaatccttgatgcacaacatttctcttaagataggttctttaaggaatgacattctgaaatccaatccaataacattacccctatgtccgcttgtgtccagcatccgtacgtcggtttctacagcagtggttggctggcttatg

SEQ ID NO: 11548 - DNA, 3000 bp, Unknown; identical to SEQ ID NO: 11530
  misc_feature (1)..( 3000): cDNA_ID_2706769_gDNA_ID_2214501_Annot_ID_183982 3000 nt of promoter + ATG

SEQ ID NO: 11549 - DNA, 3000 bp, Unknown
  misc_feature (1)..( 3000): cDNA_ID_2706745_gDNA_ID_2214501_Annot_ID_133671 3000 nt of promoter + ATG
tggagccaacacttttactacgacttttgttttgtggtataatcacaaaatcatacagtataataaagacaaccagatactctcaaaatcactaaactcggcattgctgtttagtgattatcaaaactatataaactgttcatagctaatataatgtggattttagtttgcgtgttaaaatattacttaaataatcaaataaatatattttaatcataaattgcaaaattagatgaacgttggttttcatgttaaatagaactatatttcctaataatgtacagaaaaaagccataaatacaaactttcactataaatagaaataaattcgttatcgattcacatgggcggagacaaagaatatatttagacacagaatatattttatacgatatgatttttagtctgttgtcctttaggtttgaagagaggtgggaatgattggatcggcttctcatctccacttcttccacagtgtccaacttgagaaccgaaaaataattggagagataggaatcgtttctcatcaaattcccacttacttatgttaagccacttaagtagtggaacaataattcaaaacttataataatattcttttacccaaaactcttttcatttgaccaaattagtaatcgagttggtaattactagttatgtatacattctgacattcactatccaagttgttttccaataagtagaaagtttaaagtatgcgtagctcgacattaattaattagcttctgttaattatatgattaaggacggttcataaaatagtatttaaactgctttttacaagtagtttgagttttagcaatcatgtgatgattcagataaatttatatattttaaatttatattgaagcaatcgttaaacgaagttgaaaatgcgttaataaagtatctgacatatggtaagtttaatgggtgtaagaacaatatccactatctactaataacattactcaagtgtaacgacatggtgttaacaacattacaacaaattttaagcatgtatataagaatatacatgaactcaattttccttgattaaactagtcatggaatcaagtaaagagatccaatattgaagttttaattatcaacaagacaaggcaatataaattctaatgatggtatcaaatatgaggtgggataatattgagagaacgagagatagaccgagatcaacggtacaaatgattaccaaataaggataattgttttttgacaattatatcgatcaatctttgattttaccaataaataatgttagttttcaaaatattcttagcaaggaatggtaaaattagccattagttcccaaacatttgtttagctcaagtgtcattacaaaattcatttttatttgctgagtattatatcgatgttattagtttcagttctcgttcaattctgtttgttgataaaaccttttatgctcgttcaattctgtttcgaaagagaagtatgaacctatttttaatattggttggaagttggaacagtctatagatcaaaactctaaaattgcttggtacggttaaaaaaaaatattcccaagatttgtaaaaaaaaatagtaacaatgaaacaaaattagggttttactgtacattcttaagtcttaatacggaagctctttacggtgtggagcccagctcagctcgggacccaaaacctttcctaatctgaagcatattccatagaatgtaccttttcaatttctccattagtttattttagtattttcttttcataaaatctcgttacattttcaaaaaacagttatatagacatagacggaaaaaaaaaaactaaattttttttgtcgaacactttgcagcatgtgtattggttcggagctcatgagaggcccgtacaggcatacaatcttttatatgtctcttgagtcctgactcttgtttttcacaatatatattgatggactactaaaaatagtaggagaacattagttgcttaaatggtttgaggagttatgtgaacaactgaacataacatttttgttaatcatacatgaagataagtcttttttgaaaatatatctcaattaatatatagagaatttgagaaagcgttagcgttcctaatttcatatatggagtatagcatagtttataacacgggactgctatagaacatctataataatcccattaaatttttagcgatcgatttacaaattacaaatctatagtaattgttcgatcggttgatggaattactacaacgagaaacaacaatttgattttgttgactagttaaattctaatatacatatatatatatataaaattatataccaatattagctttttgtcggtatttaccaacacaattaactataacaatagatattgtaataaatcacatatcatatagatatatcttattaacacgatatgtaagataattgctctaaaataaaaacttctatagtagtttatttttgtcaccaattgaatatttttccttttggggtggaaaatatttgtggtatctcaataagcttcttgtgtatcccaccccccaccatggcattcctacaatttaataaagccgtattttcactttcactctgagtcatttttattatattgtcattttcgacaaaatcgaatttagattgtgcattatatattctgacgaaaacaaagaaagattgttgcattaatttaatttaaaaaagttgattgaaaacgcaagtctcgttcatctcctccaaatgttctttttctttttttatgttctttctcttctaaaagtccaacagcgacaacataggtttctctctctaccatggcgtgtctatataaagcaaggtcgtcgattcataacgaccatctccattacttctccataacctttcaagaaacaaaaacaagataagatctcttcagattcctacactccaacaaatataagtttcattagattctttcttagctagagaatgaaactgattgagaagacg

SEQ ID NO: 11550 - DNA, 3000 bp, Unknown
  misc_feature (1)..( 3000): cDNA_ID_3040280_gDNA_ID_2214501_Annot_ID_133672 3000 nt of promoter + ATG
acaataaaacctcatatatcatttacatgatatttaaactgtaaaactcatcactatttaaaactataaaacgaaccacaaaagtgtttgcaataaaaaaaataccacttatatataaaattcatatcagattagattgcataggttcactgccaatccatggccaacatttctaaatgatatacagtacatgaaagactattatattcaactattcaaagttatctgatggaaaattattacatgaaatcaaataagtagttgaatctggatgatcgatctcaatattcatattaaaatggaacacacttttgttgttagagtattgatataatgcatgtaacgtgaaattgcaataatgcatcatatataggtttatatagattaactgagagacatcacttgcgttggttactcaataattacgtagctaaaattaataaagcggcgttaaggacccacccacgagctctatctatatatttccgtggtttttgtattcgaaacagaatcgatcacatacgtccaaattttgatttgttcctggcccactccttatccttacgcgcccgaacgcgtgtccttttaaattgactctttcatataaccaaaatatcagaccaacctctggtttattcggtttagcgattatactcattattacacattttccagacacacaaattgagattatttaatttctcacatttcaagtatatattaaatttcggatgcgtgcaattaaatgaaacgaataaatatgtgcaagcgattaatgtaccgacgcaggcgatgaatattcgtatttctcgcaactttaaatgtcgatgatacacttttcaaagcataactttaatgtcaaatgtcaattcattgtccatgcgtccatttcccactctcgacacctattttcatgtcttaaattcttgatttattgcttcatttttgatttttatttttattttgttgtttacaattcattatttcttgttcattttctgtaagacatttgacaaattatacaaaagaatcgaatctacaaaacatattctaatctaaacaacaaaatctaaatctaacagtctcaaaaatatttgacaatcatgcaaatatgttacagataatatcaatttttcatgatgcgagaaaataccattttagtgctcattgaataaagatgcattattagtttgcggcttttcagaagacatcaagtctcaaaggaccattatgtaatttgaagaaaataggaaactacacgcgcctgccaaagaaggaccttatcccacgcgtttatatatcttccaatccataagcagagcttctcttcaacgtgctccggtgaagattaaaaaccgacgagaccctggcgccatcacaactacgcaatctcattcctccgtcttcttcggctttcaaatttaccattttacccttctctttccctgagacgtcttctttggaaatattcttctcttcttccattccaagtaaacccaaattctctctctctctctatctctcaaatttcaaattccggatttattgattctctggtgataaacctaaacctctggttttgatttgtggttgttattgttgctacattaatggtgcttttaattttttctctgatccatttctcgccgtgtgatttcaaatttctccggctgtttttgttcgccggcgggcggtgttgattcgattctatacgatttgaatttcctttttctttaggttttagagtttccttttctattaagtaatcacacaattttacaaatttgttcctaaatttatttatgtcattttaccaactaactaccattaatttgtataaaactcgtcggcaatagcttcatgacctctttctctcaaggctaagctcttgtaatctctgttgagaatttgttgtggagtatgatgataatgacgaataatctggaattacgtctttcgatttttcagtgattttgaggttaattggaaattagagtgcaaaattgggatttagatggggattgctgatgaatctaaatgtgttttccccttgacgagtctccagatcgggtaattttatctatctatttgatctgcattgccgcttttttttttttttataagttatgattcacaggatcaatgattctgcagttaattacgtgacctgtttttgaatgaagtacaagcttgttgagcctttaattggaaaactatgttgtctttccagacaaaacaagatctgtttttgtggttttgacaatttattatctaagttctgcaattaaagctatcacttatttgtgtttctttcattatcttgattccaggcttatgttcctctcctgaatctgaactagtaatcagtttttggtgttaatgtcttaaacatttccctctgaagtgaattatatttgttctagcaattctcttgtccagtttcttgaaattttcttctacgtatgtgatattttaaagtctcactcgtgttggctactttttcttagcagagatcttaatctgatgatactttcgtgtgttttttaagagttaactacattgtcacactttatttgcttgattgttctctgcttttctggttaacctttgtttttttggttggttacagagacttgcaatcatatctttctgatctcagtattttcctgggaaataaaagtaaaaagatttacatattggtggataaccggccatggttgaatcctggcaccagatctgctcatttttggcaactaatggtcacaaaggttgtaaaagctgcttcaagtacatttctctgtggtgtgtaggtgaaaaattatggtaaagtgacacatctatctttgtttgcagtccagactctccccttttgcaaacacgaaacttcgaggggagaagaaaaatcagaatcaggacagggagaagaaaaagtcgaagcaggaggaggaagagaagcctaaagaggcttgttctcagccccagccggacgataaaaaaatg

SEQ ID NO: 11551 - DNA, 3000 bp, Unknown
  misc_feature (1)..( 3000): cDNA_ID_2706753_gDNA_ID_2214501_Annot_ID_133674 3000 nt of promoter + ATG
aagcttgaatctttcttaagattgtttttaataagattgctctgagaagcttctagcttatggcacgtttattaattgtaaagtcgaaacaatgtgagaccgtcggtgggagatttatgaaatatggaacgtctagaagcaaaaaaacatattttgatctaataaaaagttcttcactttatactaaaagactctttaatatcaaagatttgacagatctggttattaacatatttattaactaaaaacattgggatttgattgttacatttatttattttataccttgcatttaatattctgcattattatggatcgccaatttttttattctgcatggatttaagagagagagggagagaaaacaaaacccatgcatagaaatttcatcgaccgactcttgtcatatgaatctaaaataattatcaagaaaaataaacacatcaaatctgcttaaataaacaagaatttaagttttcccaaatgaaattaaaccatcctttcccaaatgaaagtttgaactcagcaccaacaacaagcaaaattcaatccttctcgtactcaccaaataagctagacatatggggttaataaagtttattcgcagctcatttggttcctttatgatattatactcaagctaagtaatgggttcgattcccatcttctcatttctttatcaaaaaacaagtaataaagttccttaaatattgtcttaaaatactatcgtagtaactagtaaggtggaatatatagtgtaactttggagcttgaggtcgtcggtgatgtgctggtacgaagagacacgtggcgctcaatcatttgaaaataatttagtttttttctttcttttggaatatgggaaccaccaacgacaacattattaattccatagattcggagttaattgagcgggttgcacgaaccacaccacacaccagatgccgaataaaattttatgcataagctaagcgaataatcaatgcatagttaaactttataagactgatatttaacgactggattatcacaactaagaggcgttttatttgttttaaacattttaattaagttattaatggtttgcgactcaagacgataggaaacgaccatctttttctactcatgaatatttgaaagaatattgttcttgcgacaactgatcaagctactatctttgaaaagaacgttcttctgccagtctactgaagaataactcaaaaaatgcacttggggctcactgatttttaacaacatttctttttatatacatcctttgaaagaaaactgaatcgtagcaaaaactagactaggaaactgaaaaaaaaaaaaaaaaaaattaagaggaagactaggaaaactgaaaaagaaagctttattaaaccagcatgcaacacaacttaatcatatgaattactttgtttttttccacattagttgccgtctgattaatttaacacatttgaaactatagtcatctttttgaagaaaaagttcactaataaaaacagagaaaatccatttaaaaaaaaaagacattttaaaagaatatcgagtaggatttttaatgtaaactttatataaattttataatataacatcaaatcgaaactaattttaaaaactaactttattttataaaagatacagtataatgaaagtgtataaacgaattttgttgtggatcaacatgaaaattaattagtttgtcaacagctattcatatagttaaatgatacaagtaatgataaacaaataaacgcatgttccccgttaacaatttttacgtctccatgcttagtggcgctaatcacctttttggttcgctcaagtcaaattattttgaccaagttgtcggtcgagctagctcgaaggtaacaaatagttaggcccactttgaaaatgtcggtgctcggaaaaaagataaaccgctaaattaaaccggtcatcatgaaactccggaaacctgaattactgccaaatttatggttgtaggcactgcacacgtgtaggtgtctcttagtccccattgtcatacccctcagtttttattggtggtgggcaaacttatattaagatgacccaggtccatctttcaaacccatttagatccatcctatatttttgaatgtttggtgtttttgctttagatatcaatagaggtgaataaattagtattcatactctgcagatttgagtttaacatttgtgatagtttttgtaaactttataatttgtaacagtgaacccagccaaaaccaaagttttgatttgagaaattagccttactattcacgattctctcgcctaacacagcagccttaacgacagaaacagaaacgaatctctgcctagcaatgacattctacggttccgaaaatttattagtattaattggaccgtttcatggaaacttgaaataattaagagaaactaattaagagacaaaatcgtccactttaactgttacactatcaacaactgacactctccttctacttttcaaaattacacaagatcgctaaatacattgaaattatcaccaccttttgaaacaaaaattgaaatcattaggaaaagtatcataaaacaccctctcacacagtacaaatgtaaaatttcaacaattgtaaatagtatgtaaaatgactttactacatgcacttttaattaattcggtctagatttagcacagtaaaagcaataactagctgcataaattacggccattaccactatatggaaaaagcaaaagtctccacattttctcatgtggaaatattttagattaaaaacaaaagttaaccataaaaacaaagtcacgtcatctctctcctccaccactccacagagctttcaaatatatccctctcctgcgagagcagagaaatagagagagactagtgagtgagagagtccatcgctttctttctttctctctctcgctctctcttcatctccaacagagacttctttctagagaaagagatcttcacaaat

SEQ ID NO: 11552 - DNA, 3000 bp, Unknown
  misc_feature (1)..( 3000): cDNA_ID_2706757_gDNA_ID_2214501_Annot_ID_133675 3000 nt of promoter + ATG
cctccaccactccacagagctttcaaatatatccctctcctgcgagagcagagaaatagagagagactagtgagtgagagagtccatcgctttctttctttctctctctcgctctctcttcatctccaacagagacttctttctagagaaagagatcttcacaaatatgactgtgatgaatcaccgacacaagcaatgtcattttctcctcctccttctgatcactgtcttctctgccgcgttggatggtgtttcttccgagacagacgtcggagggtttgactacggtgaagcattgtctaaaagcttactctactttgaagctcagagatcaggaagacttccgtacaaccagcgcgtgacttggcgtgatcactctggtctcaccgatggtcttgaacaaggggtttgttttctgttcaaaactcttgtcattttattttttaattaattttatttttgaattcaaactaattcagtttactatcattagtttgaattttaataagagaattgaaatttattgtttgtattaatttataaataatacataaatttattgtagatttccatttaaagaaattattttctttggtttggaatgagacttgaaaaccttttgtgaattaagtattgaaattaattatttgttttattttgtgatgtgactttaattttaaaattttggtaataaaggttgatttagtgggaggatatcacgacgccggagaccatgttaaatttggacttccgatggcttttacggtgacaatgttgtcatggagtgtaatagagtacggtgactcactcgcttccaccggagagttatctcacgcgcttgaagccatcaagtggggaacagactacttcatcaaggcacacacaagcccaaatgtcttatgggccgaagttggcgacggtgacactgaccactactgttggcaaagaccggaggacatgacgacttcacggagagctttcaagatcgatgagaataatccgggatcagatatcgctggagaaactgcggcggctatggcggcagcttcgatcgttttccgttcaacaaatccacattactctcaccttctcttgcaccatgcccaacaagtacatacatactcattttaaatttaatttaatgttacagttggaacagacattttaatgtttttgggtaggacatttaaataagttatggttatggttttggttgtagttgtttgagtttggagacaagtacagaggaaaatacgatgagagtctaaaagttgtgaaaagttattatgcctcggtgagtgggtacatggacgagcttttatggggtgccacttggctttatcgagccaccgacaatgagcactatatgagttatgtggttgacatggctcaccaactaggtggcctttcttgggccatgtccgagtttagctgggacgtcaagttcgccggtgttcaactcctagcttccatggttagtacttacatattgttcaattttgtgtgtggtaaaagtgaaatatttatagcactaacctcttagtagtctaatttaagatttaagtagaatcttataattgccttatgtgaagtgattatcaagtttaaatattctcacgtcgaattaccaaaagtaaggtattccccaccccacgttacatatgtacaacaactattcaaatattttctctttgtatgcaaatgaaatactttataactaaatattagtactagcatttagaaaaaagtttagttatgaagcagaaacaaaactaaaggtcacgtgcttttgttcctctaagtctaagcggatacgtctctttaaatggttctgttttatggcacgtgattctaaacctacttgataaattagctatattctgattgacaaaaaaagaagaagctatattcttatgtatgaactagtctacgaaattctacttgagttttaagcactaacaacacttgcctcatttttcagttgctaaaagaagaaaagcacaagcaacattctaaagtcctacaacaatacaaatcaaaggcggatcattacctatgctcaattctcaacaagaacatcaacggcacaaacgtccagcgaactcctgccggtttactctacgtccgacaatggaacaatatgcaatacgtatccacagcatctttcctcctaaccgtatattctgatcatctccgaaaatcaaacaccgatctcgagtgtcacgaaggaaccgtaactcctgacgagatgcttggctttgcgaaatctcaaatcgattacattttaggatcaaatccaatggaaacaagttatctagtcgggtacggtccaaaatacccgattagggttcatcatcgaggcgcgtctatcgcttcttttaaagagcacaaaggttttataggatgtactcaaggatatgataattggtatggacggtccgagccaaatccgagtgttttagtcggggctttggttggaggaccggatcaccaggatgattttgatgaccggaggggtaattacgttcaaacggaggcttgtacgtacaatactgctcctttggtcggtgtgtttgcgagacttatagagcttgaggagcaaaaacttgaagaagaagatgtgagcttggttgcaacttataagagatagtttttatttaatcaatacaaaaaaaagaaagaaaatgtggttttattttgcacccattttgccatttctatattgttagagtttttcttctcaactttttttttttgttttgtttttaaataaaaagtgtgtataaaatatcaattatcaatatagatttttgtcaattttattagttaagaagttcgaacggtctcttctttttgcctctgttttgcagtttacacttaccatttttacccctgccgtttttgtggattaattgcgttatacgacgtcctcttacactttcactccaaacgacgctgttttaagcaagaaactccatcgtcttcttggcaaaattctgg

SEQ ID NO: 11553 - DNA, 3000 bp, Unknown
  misc_feature (1)..( 3000): cDNA_ID_2717509_gDNA_ID_2214502_Annot_ID_133678 3000 nt of promoter + ATG
agattcttctctcagacaaaagcaaaggctccgactcaaactgctttgccattgttcctcagaaaaagaccggcggagttaagagcctctggagaaagctgttggggagaaataagaaaggtaagagcaagaaggtccctaatccatttgccaactaagaagatggtggcatctgtcatctagactataatctaataccttaatcctgtttctttatatggtcccaaagacccaaactatgcaaactaaactgtcattttctagatttttttggcagtatatatataatctccacgtagagtattactctataagatgatcattctgctttattccacttttagtctcagaaaggatacaatcagtaatcttgacccaatgaatctttagcagggttaatgtaaatcttcaacgtagacactaaatgcataagatcatttgatataatgtcatctcaggtctcaaaagaacaaattgtggcctttaaaagagacttctcaatctctgtacagaacaaacttggcgatgtcgttaagtccagcttccttgtagcactgagcaacccgttccagtgattcgtcccatgtcccttcaagtgacgctagattcagtaagaacgcagcctcgtccaaagatgcctgagaattacaagttttgtttcaagcctttgtatccataagcatgatatgagtatctgataatgaatacaggcaaagaacaaacctgagccattggctttcccctgtctatatcccgttgttttccttctcctgtaactctctccttatactgcgcaatttgctcttctccccactctgctatttgagcaatttcctgggaacccgtttcatatgttcaacacttttttcccttctcttttcgattaccaaaattgcttgtcgatagtcaaggaattgtacctcatatctgcatcctaaggtccaccacgaagatttcaaagcacccctagctgcgtctttcgcttctaagttacgcccaagtctacaaaatatatagaggtcttagagttttctagaaaggacgtaagcatttacctgggggtcgttcacaagggagaaagagggatgatgagaaaggatcatacgaacttcagtaaaacttttgcgttgaaagcgaatggccgggcaaatccgggaaagttccctctctttgtataaaactcggtagccaccaaagctgaaaccttgtattagcacgtgaagatagtttaaaaagagaaaacacgtcaactacaacaggatagatataattactagccttacatggtctccattctcgatatgccgaataacttttcgttcaagagaatctggaaacaatccaacctgaattacaaagctaataatcatatcccagtatccatgtgcagaaaagattctgatattaacaggctcaatatatgtacctttcttaaaagataggcatctaaatccatcagtcttgaactggcaaagtcacccttactgtaaagtttcttcccagcttcaccagcagcattgaagatttcttggctgcattcttcgggtttggaaacatcttcttccaccaatattctgtgaatgaactgatcaacctgaatgttggccaatgaagtcagatatgagaatgaacactcaacaaaaataaccctaaattaacgcatcagtaatgctataaaaagactcattacattattagctagaaaccaaaccccatgtttctgaacttccaccacaggcatctccatactgcaaacaccacaaacaatgataagctacaaaagaagagaaacatgacgatattaaaaaagcaaggaggatctaacctagaaggagctgttggccaccgtaatagagcaattgaagaacctgaaaaaggaaagtcatacaaacttaatatgaaagtgttacaacctcagataagaacttatgtacaagtccagaatcatacccgggctcattttcaccaacggaatagtaagaggtaacaagccttgcttggcaccaggagaaactatggatttacctgatccaatgtcattaccacaagcaaaagtcaccattccgcaagttaacaaacaaaaacttcgaaaatacgatcagcaagtcagtgtaagattgatttacctctagctgtgaatatattcagcagctgcatcagatgcttaggaggctgagcttttgctatatccttaatgaaacattcatgttctgcacataatcaatcgttaacttcgattcactgattgttcaaattcggcaccgtaagaatcataaaccaatctcaagccatcgcacagcttccagaagttgcaaatgaaatagcgaagatgtgaatccctctcaccagatagtgaagaagaagagcaaaaggatctggcgaagtttctgctgccatggagaagtatcagtctacgtttccgtccgaaaaccgccgcgccgcgatgcatctcagagttttccgatcgccgtactgtttctcgtccgatgagattacagagagacttcgaaaagctgttgctgaaaaaaaaaacaaaaaataaagcccaaacaaatagggtttaagagcccattaaatcagagcccagcaacgttcgtgtttgttttgttcagttgatatagaaccagtctcgaactctagtagattcgttgtctcgagctacgtgatattccggtaaaccgtcgccggagatgtacagtagataattcaaatcgagctgccacgtcgctattttcccaccaacttttttttttttaaataattggaaaaagtttctaatttacacgcttcccaattcgtaaacaatgttctttaaaagtaaaacgaaattttttttggatttgaagataaaagatccaaaataaaaacaaaattgaagataaatttttagggtttataacgacccgccaaattccttctctcctccaacatttcagatttcgcgacccggatcttaacccggacccgcatttgtttcggttccgatctggtttcttgaca

SEQ ID NO: 11554 - DNA, 3000 bp, Unknown
  misc_feature (1)..( 3000): cDNA_ID_2706847_gDNA_ID_2214502_Annot_ID_133679 3000 nt of promoter + ATG
cattgatcgagagagagcttttgacaaattgtagtgacttcccaagtcctgatttaatgattaggacaagtggagaacagaggattagtaacttcttcttgtggcaacttgcttattccgagcttttcttctcgccggtattttggcctgatttcgataaggataagcttctagaggctcttgcttcgtatcagcgtagggaaagacgatttggttgtcgggtttgatccacctttcatcctctctattatgttttgttcatctgtaatttctaccaaacttcttgcgtatcattgtaatttgtgtcggtaaaaatcgaataaaatcagtgatgcgtttatttctttctccgtgcttcgctttatacgcatgttttatgtatcagttgacagttgttactaaaaccaataacttgctaaacaagtaactttaatacctcagattcctctagttcaacaacattacaatttaaaactccaaaccatcaccccaaaactaggcaaagtttctgattttttaattaaaacatcttcaaaccaattcactttttttttgcgggaaatagattgataaagatccaaattcactcgattaaatgggtctaagtgtcaaatcaaagtatattagcccaccttttcgaccacacaaaacaactgaagtccccagagagtgacacgtcacgaagcaaaaatccatgaatcaaaacctaaagtcaccgtcgcgcacagaagggtctccttttccgatcctcttcagaagcaccagacacaagaaaccaaaaaaggcttgtttcacaagaaaccaataaaagtcttgtgacacaagaaaccaataaaagtcttgtgacacaagaaaccaatcacgtgggttctcaaagccctaatgcagctggaaaaagatagataaaccgttacaaacatcgattaacttaatataaatgattctccacggaagagtttaatacgtaagacctgtctttgcgtagtttgattgatcaaagcgacgtctttgaattcttagtatatatatgtgtatgacaaagcttcaataactcgaacaaattaacattaaagcaaagccaaattaagcattagcaaggacaagaatgttgtctcttctctctactctagtagccctcccctttctgtttctcatcccttgtctctttatcacaagctatatatgtttccctgtgttcttgacaaaactccttggactcatcaaattcaaagccgctcgagacgatgatgacaacgagaaacggtagtttacggttttttaatcatacttttagtttttagtaagttatgtttgtggaatgttttgtaaatctataatttgtaaaatgttttgtacaagagtgacatcatataaatggtatttttgaaagtctcccgagaagagaatcataatttaatttcaattttataatcactagttaatatctagttatcaacagaaattatactacacaagtacacatagagagagccttttgttagaattatcccacatcggaagaatttttggacaatatatatgtgttttagcaataattttttggttgtatagtgatgaggcaacttgtgttgtccgagaggaggagctacaaagagagctgatgccgagacacgtgtcattcatactagatgggaaccggagatgggccaaacgagacggattgacgacggcacaaggccacgaggctggaactaaacgaattatagagatagccgaggtctgcttcgagttgggtattcatacagtctcagcttttgctttctccacagagaattggggaagagacaaggtgtgacattttacattgtagatctcacaagtagattatattctcatacaattatagacactaacaaattttgttgttattatataagtttgaggttaagtgcttaatgtctttgttcaaccactacctcaagtccaacattcaatactttcaaaggtatatatacaaattcgattgtgattcttttgttttgacatattctctctggttattcattaccaagaattatcttgttgttacagaaaggaagttcgcgtttctgttatcgggaataaaacgaagatccctgaatctctcctcaaagaaatccatgagatagaggaagctaccaaggctacaagaataagcatctcatcatggcagtagattacagcgggaaatttgatatcatgcatgcttgcaagagtcttgtgaagaaatcagaaaaagggttgatccgagaggaagatgtagacgaggcattgatcgagagagagcttctaacgaattgtagtgacttcccaagtcctgatttaatgattaggacaagtggagaacaaaggattagtaacttcttcttgtggcaacttgcttataccgagcttttctactcgccggtattgtggcctgatttcgataaggataagcttctagaggccctcgcttcgtatcagggcagggaaagacgatttggttgtcgcgtgtgatccacctttcatcctctttattcatctataatttctatcaaactacttgctctttgtttcacgtttcattgtaatatatgtctttaaatcggataaaatcagtgatgtctttgcttctccttctacgcatgtatcagtttgttactaaaaatcaatatcttgctatacaagaaaatatctcagaaacctagttctacagcactaaaattgaaaatcagtctttgcgggaaatagtttgggctttaaaggtccatgtccactcgatttaatgggcctagctgtcaaatcaatagcccaccttatcgacaacgcaaaaaaataactgaagaccccaaaattgacacgtcacgaagcaaataaaccaaattcccatgaatcaaaaaaatcatcagcgaccactgtgactccacttgagcgccggagccgccgccgtcgccgtcgcgtcggaactccattttcacgttcctcttcaaacacaccgacgcgtaaccagtttcgtccatg

SEQ ID NO: 11555 - DNA, 3000 bp, Unknown
  misc_feature (1)..( 3000): cDNA_ID_1957064_gDNA_ID_2214502_Annot_ID_133682 3000 nt of promoter + ATG
attaaacttgatcctaaaaaaaaatcttaattatttttcttttcatcttaaatactaattttgtaactcaatcttaaatgtgcatatgcttttatcaagtgtttttgatagctatattattttaattctatttatatgaaaaaaacatatacaggtggaagatttctttgttgaaatgcaagaaaaaataatttctatttgttgaataaatgtcttaaatggagaaagctccttggatatcattgcatatgttaaaattttctacatttcaacaaagaatatagaaaatttctatgtttttctttgttagtgtgacagaatctactaaaaaatacatatttttatgccaatggttaatatgtttaacgttttgtgttttagtgatatcatacaaaagtttctagctagctagatttttatgccaatggctctctccatttttttatgattaaattttcaaaaaactaacaagagaactttgtgtattatttcttggttttttatactccaatggtaggttctcttaaaggaggtctcttaaaaaaaaaatattcatataaattattttatttcatacaacttaatattacaaagcataaaatattaaaatacattttttggaaatattataaaatagatgtgaaataaatattataatgtttagttaaatatataattttgtcataaattatgagctaattaaaacaaaattagtaaaccaaaacatttagggggatgtattggattagggattttagaagatttttgtttttcttaaaaaccatatcaaatctagtgttattcaaaaattaaaaggtttttgttcctctactcatcaacaaattaaaattcttataatttttttttttttgtttggcttgaatctgcatgactcactcaaattagaagccaattactatcatcaaattagagatacatttaactatgaagcgaattactatcaccaaatcatgagctatatgtgttccatagttacagagtctatcaccaaaatacataacgccaacaaaacaaactcctagtcttgtacatctatgaagccaatgactcaaaacatacaacataaccatcatgaagccaattactaagaaaaagcaacaaaagaaagagatagatacagagaaaagagaaaatacttgagcaagttgggactgagtcagcttcttgtcttctcgggcttgcatgatggctttcttcaacttagtgggcacacgatcacctgattttaaaaccatataaaggtgttaacgataaccagcattacgaatcaatcaaacacatatgtagacttcctctcgctaataatgcaaactgaagaaaatattaataacccaagagaacagactagattactagaatgactgtacccaagcaaaagctggttcttatgggatccaaatcaacaacactgatccccatgcaacaaacaataaaacgaaacagatcaatcagataacttcttcgttttctaaagaaccaaatcatctacacaactaaatcaatcaaagcttagtcatcttcctatctgacaatgctctgattcgagggaacgaagcaagggtttggtgggagattggatttgggacaaacacatatagaattgggtcatcgatttggtgaaacgaactcggaatggtgagcagcgtcgagagagacgaccaatagagagagtgagaaaatttcccgacggaatgaaaaataaagacacaaggattttttgttggttaaatatatcaaccaaccactgactgccacgtaggaggctctctccagaattatttgttttgattatttttaatcaacaacttcaagagaaccctatcaaattgtgatactcatatcatgacactgacaaataaaagagaccatgaatatggttaggccatatgcgatatggcttcaaaaaccaagttgggacaatcttatgtttagtcttaagtttgagttcattttaattcattttagatactattgtttgatgtaaaattaaactttgataaataaatgtacctaaatttggattgattttttcataatcatgtttaaaatttttggtgttatgcaattctgttttgttttgtttttccataataagcatctgaacatttttacaatatttatatattttaagaaactgaagttttaagatgtattaatctacattaaccttttctattttaatgttaacaaatattatatattataagtacaatattcatcaaatactataacatatatgtgaaatgtaaatatttactactaatcaaatatcatactgcatatttgattgcaaaagagctaaaaatcattaatattgcacattaaaaatagtcaataaactaaaatcattaaatacacaaatatatcataacacagcaagtgtgtaccattattaatcaatagatttacgctatacaagttttccgaattatgtatgtgaaataaatcacaccaaaaaaatgtatttgaaatgaaaaaattccccgcctctgtaatttaagttttttagattaaaacagctaaactcttttcattaatttattagagatacaagatattgttatttgttaccaataccaatatgtaaatttttctgagtaattattataattagttgaatttggctaccatatgccaattttcaacacataaaattcttttaaacgtgaaaattccaataatctaagagccaacaaccacgaaaattaaacctcgttttagtctaaactctaaaatgagaaataattagaaaccaataaaggctcttaaagaaagactaggtcaagttcaaagcaagttttgctttgtgtggtggtcgtcgtctctttctttaaacacacttgtttttttctttttcctttgaccactccaatataaacaaccaagaaccagtgttcctcgtccattcactctctcgtaatcacacacacactcactcatacgaagccaattgttccacacaaattggaagcgacgaca

SEQ ID NO: 11556 - DNA, 3000 bp, Unknown
  misc_feature (1)..( 3000): cDNA_ID_3040359_gDNA_ID_2214502_Annot_ID_184026 3000 nt of promoter + ATG
tcctaattctatcgtaaattattatcaacccaaaccagtcaattctaaaatatcatccgtagtacaccatcccatattaatatcgattcaaactcgtcaattctaggatttcactcgcggtagtatttaattgtacaattatattttgattgtcattctaggatttaactcctacttctatcgcaaattcttatcaacccaaacagtcaattctaaaatttcacccgtagtataaatttaaatatatttataatgtttaaatttcttataaagaatcaaaatgtgttttaaaaaaattaaagttttaagtgttttttttaatattgttaattttgtttagtgtttaagattatataattatattatgattgttattatatgtttttttccatagcatactatcccatgttattatccactcaaactcgtcacaccatataaccccgtcccgtgaaattaaacacaaatttgtcattttattataaatttcaaatatttataaaattagaaacttcaaaaaagattaatattgactcaaatttcatcattgaattttgagtgttatatctaagatttctctcgcagtatatcgtcccgtattaatatcttttatattgtttaaatttcttgtaaaatttaatttataattttttatactttttaaagtttcaattttttaacataaataaccctagtaaacaaaccattttaattttggacacctcataaatcaagtttcatgctcattcgtaatcgaaatcattttggtcctttttatagtatggctcttgaccattgtccaatttttttaagcgatgtggaacattttaaaatcgtaattattatccacccaaacccgtcctaccatataacccagtcccgtgaaattaaacataattttgtcattttcttataaatttcaatattataaaatttgaaacttaaaaaaatacaatatcgacccaaaattcatcattgaattttgattgttatatttaagatttttcctgtaatatatcgtctcgtattaatatattttttatatatttataatgtttaaatttcttgtaaaattcaatttataatttttaaaactttataagttttaaaaatataaatatttaaagtattttttaaagataaactttatacaaagtttttaaaattataatatttaacttttgataaagttataatatttataatttcttgaaacattttaaagtttcaattctttaaaataaaaaatccgagtaaaatcggataactattttaattttggacgcctgataaatcaagcttcctgctcattcgtaatcagaatcattttggtccttttataatatgggtctgaaccattgtccaatttttctaagcgatgtgggatattgtacacatattatttcttcatacgttgaataatatatgtccgttttaaaaaatttgaattacatcatattcagaaaaaaatataatattttattaactataaatattttatataaattcaaaataaataaagtataagatcaaataaaaatgaaagaagaattatatatttatgtttaaattagatagaaatattttaggaaattagttaaggtaaataagaaatatggttagtttagaaatattgtttatattaaatttggtaattaaatcaataattttcgtttttaattattagtttttaggtaacttttccaaaaattaatgttatccaagatcagaacagaattaaacatgttatccaggatccgaacagagttaaaccgggtaaaaaccacccatttaaattaattgttgaattatggctcaaatcttcaatattatcttcaaaaatcgcctccaaaaatgtatatatagatcataatagagtcatttgtaatttgccaatttgttctgaattaaaagctacttggaaggattgttttccttgccaacttatgtaattcaagtcttgtcaggttctaatccatcaatgaaattttaattttctgtgaaaaaaaaaaaaaaaagctactaataattacacatcatagaattctataagctatgtttgaataaaaaatattctgatatatttttttcttacataaatgtggagtctaaaaaagagcaagaatcttcccactgttctcaacctaacatatttaatacatttggtctccttacccaacactcccaacatatatctaaattaaaagcttttcactttcttaaattgactttaaaaaatgtattttcagttattcacactctctaaatataatccttaagaatcctaaaggttgacagtaaaattttcccccaaattaattaccttctttacttgccgagttgactaattcttacatttttttcagggcaaaaataagacaaaattctgttttattaagtaaaaaatatcgtttctgttttgtttctctctgcttaaaataaacacaaattaattataaaatgaggttactaatcatctttcatttgaataatacaaaatcaaatgattatagaaagtgattaattaagcttctcaaaaaccctaacgccaccactactctgcttctaatggaaaaaaaagtcaatgccttttttgacccgaggattagagagagaaaccgcactgagtagagagagagtgttgtagttgtagtaaatgaaacgagagattggtggtgaaaggagtcagctttgcatttattatatcatcttctctaaaaaagcttcaatacagagcaaaaccaaaagcttaaagcttcacaaaattcatcttcttcctttcacaattttgggatctgtttgttgaaaattctgctacttcttctcttccgtgaaagtcgtttactttttttgtgggttttgtgaaagtttccgcttttagaggcttctctttgatctgctttaagatcttcactttttagggttttagttctcttatgggctagagaaacccttcttctgattaatctcttaggaaagtttcgaaatttgagattaatg

SEQ ID NO: 11557 - DNA, 3000 bp, Unknown
  misc_feature (1)..( 3000): cDNA_ID_1807662_gDNA_ID_2214502_Annot_ID_184025 3000 nt of promoter + ATG
tgatgagtatggtcacttgttggattcaaaggtatgtcttgattactgtggatttgggttgttttcttatgttcagactttgcattattgggattcttgtacgtttagtttatctgagattactgctaatttgagtaaccatgcgctttatggtggagctgagattggaactgtggaacatgatctcaagactaggataatggattatctgaatatacctgagagtgagtatggtcttgtttttactggaagtagaggctctgcgtttaggttgcttgcggaatcttatccttttcatacgaataagcggcttttgacaatgtttgatcatgagagtcagtctgtgaattggatggctcagactgcaagagagaaaggtgctaaagcttataacgcttggtttaaatggccaactttgaagctgtgttcgacggatttgaagaagcgtttgtctcataagaagaggaagaagaaggattctgcggttgggttgtttgtgtttcctgctcagtctagagttacaggttctaagtactcttaccagtggatggctcttgctcagcagaacaactggcatgtgttgcttgatgctggttctttaggtcccaaagatatggattcgctcgggttatcattgtttcgaccagagtttatcatcacctcgttctacaaggtctttgggcatgatcctacaggttttggttgcctgttgattaagaagtcggtgatgggtaatcttcagagtcagtccgggaaaacaggatcaggaattgtgaagatcacacctcagtatccgttatatctcagtgattcgatagatggtcttgacggattggttggtcttgaagatcatgacattggtacaaatggtgataaaccggctacgacagatgctgctcgtagaggcgctcagatgccggtattctctggtgcatacacttcagctcaagtgagggatgtgtttgagacagatctcttagaagataatgcctctgatagagatgggactagtagtaccatatttgaagaaaatgaaagtgtttcggttggagaattgatgaaaagtccagctttcagtgaagatgagtcatccgataattcgttttggatcgatttgggtcaaagtccgctcgggtctgacagtgcgggtcacttgaaccaccataaaatcgcctctccattgccaccgttttggtttaccagcaaaaggcaatcaccaaaaccggtggcaaagagttacagcagtcctatgtatgatggtaaagatgtcctctcgtttgatgctgcagtaatgtcagttactcaggagataaactctacgccatcacggaatctgaggaactctaataatctccaaattcaagagatacaggaagaaaactgcggtaatattgtgtatcgtgcaggatctggttttggatcaaatggctcaagctccaagatttcttcagatatgaaagataacgcaattagacgagaaacagaaggtgagtttaggttattgggaagaaggggtactggtgggaggcttttgggtttggaagatgaacaaccaagcagaggaacaagggtttcatttaacatggaccgtgtcagtcatagtctggaccaaggtgaagcttctctggccagtgtatatgacgaaagtgatggtgaaaacccgaatgaggatgattgggacagaagggagcccgagattgtttgcagccatatcgatcatgtgaatatgttaggtcttaataaaaccacaagtaggctcagatttctgattaactggctagtgatctctttgctacagcttaaagtgcctgaaccaggcagtgacggtagtagcagatacatgaatcttgtgcagatttatggcccaaagataaagtacgaaagaggagcggcagttgctttcaacgtgaaagacaaaagcaaaggatttgtaagtccagaaattgttctgaaactggctgagagagaaggtgtatctcttggtattggaatattgagtcacatacgcataatggatcttccgagaaaccaccgtggaggcgctaggatcaaggaagatagttctttgcatctgcagagagaagctggtaaacgtggtggtaaaaatgggttcgtgcgatttgaggttgtcacagcttctctaagctttttgtcgaactttgaggatgtttataagctatgggcttttgtagccaagttcctaaaccccggtttcagcagagaaggatcactaccgactgtaatagaagaagaagcagaagattcagagacgtgattgattctttgaaaactttttgaaacaggactcaaaaggcttgagccactaacatcctagaggcttctggaaatggaaggagggtaaaaagtaaaactgtgaattaagatttgctatatatagttttttcgttttggctctgtttcagtttttaggaatatgagataggaggagaattcttgtaaactggaaaacagaacatgttttggccaaagattccactttcggacaagggaacatagtttagcatttgctcttacactaaaccctcctgaaatcatacatattcgtaaaaattgaatttgtttaagactttcctttaatttcctttcactctctccctccgtggctaccacatagtatcacttgttgtaaaaccaaatgttttaacatgagaaaagttacgtacgtttgcttttaccttttcaaataatgatgaaaattcattggccgtgcggacaacaaggataacttagctttgtttggtttcaaaatgacatttaatgaaactacaatgtcaaaccgtttccattttcttaatttattggcagtgcggacaataaaggcttacttagaatataaataagagtgccatttgttacttcttacaatgtttaaggttaaacgtggccaacatgaagccaaaactttatctataaaagacaagagtgttcttagagtacttatacacttatatttgtcaaacacataaaaattaaaacatg

SEQ ID NO: 11558 - DNA, 3000 bp, Unknown; identical to SEQ ID NO: 11555
  misc_feature (1)..( 3000): cDNA_ID_3040383_gDNA_ID_2214502_Annot_ID_184013 3000 nt of promoter + ATG

SEQ ID NO: 11559 - DNA, 3000 bp, Unknown; identical to SEQ ID NO: 11554
  misc_feature (1)..( 3000): cDNA_ID_3040395_gDNA_ID_2214502_Annot_ID_184010 3000 nt of promoter + ATG

SEQ ID NO: 11560 - DNA, 3000 bp, Unknown; identical to SEQ ID NO: 11553
  misc_feature (1)..( 3000): cDNA_ID_2717509_gDNA_ID_2214502_Annot_ID_184009 3000 nt of promoter + ATG

SEQ ID NO: 11561 - DNA, 3000 bp, Unknown
  misc_feature (1)..( 3000): cDNA_ID_2706807_gDNA_ID_2214502_Annot_ID_133686 3000 nt of promoter + ATG
gttttcaactgcacacacattcaattactgaaaagattctaatttcacaattactgacaagattctaatttgaaacgaagaacaaaagacggtaaaaatactctaaaaactcaatgtaaatgcataaaaacaaaactatgaaagcgaattttaaataagctaaaaagtgaaaaccatatacatcaattaaaaataaaatataagtttagtgtgaacgtgttattcgttgtttcacgcaaaacccgtttatatgtcagttcgttggatttggatatcgactctagtcatggtccggtcacgagccttgttcgttatcgacttacttgccgtgtgagctggggtaatccatttcctaaatgacataaataccctcattacttgcacccattgacttctattcttttccttttcgagaatgataaatacgtgccttactatacacgtaaatgtttatatacggtaaacatttaatttcgctttacaatttatttttcttccatttatctataggattcgattcacatagtattacacatgtttcattttgaaactggcaatactcaattagaaggaatcactatggaatgtgactttgagtttgatgttgaccatgactttgaaagtgtatgtacgtgactcaaaattacatttagcatggaatttaaactcgtatctctttatttaatagcttaatatctctaacgaaacaactaaacgtttgatctgttattaaagattatttgtcgaccaattcattgggatctagtggtcgatcgaatgactatatttgaatcattctggtacatttttaatcatggttactgtggaatctttaaacgataaataagaatacaaaactttgatatttccgttataagacatataattaatttgttgtcatatatagttttgtcttcagcaatcacaacattattaaattatcatattgatcagtatgaaaaaggtcagataattattatcaattaatcagttttgtagacccaagctcaatgatttatcttctttcctctactttataagaaatttgtggaatgattagaataattggcaggaattccgctgatgagaggaaagacccaaactcaatgattaagactggagattttgtttttgtcccgaatgtacttttcaacacttgatttcttctcaatgttctcatgcggaaatttgggggaaattgtcaatgtatcattttttcggttgtcatctctagttatagtgttagatctcgtttttaatatgtctccgactaatgtttttgttatcatttctaaagcaatgatatttatgctcaaatgagcttattaagagaaatataaaactgaaattagatagctcattaagagctttattactcaaagaaactaaaagaggaaagattactttgttatcacaaagaacacgatgattcaattactactttcataaagatgagaaagggagttgttttgagacaactcttaaagttatcatcaaagttctcatcacataactatatatatgagtgatgagtcactatcttgttaatcctatttatatggaccactacatgagcttttaagttactcatgagacattatattgggctttatatggatcctctaatagttttgctagattaatgtgaatacgtctttaggaatgactagatcatgagcacgagataatcgtcaccgcttgcactaatatagtataagagggcaatggtgactaattttcaaaaatttagctccaaggtgattttggagttttacgctcatttacatttcagaaaaaaatcaaacaatcatgattgggtcgtgtctaaacaattttgcatacacatcaaaacaaacatttgcaaaagtttgaagaatgatactaagctaaaaagtgaaaatttccaaaacaaaaattagggactaagaaatgcgagattttaagctcacaaagagtacttaattgattgtgtttctttttttgtttatcttcccgtagatttcatgtcaatttccgaatgaacctagaaaatcaccaccatatttcctcttatcaaacaaattttccatccaatcatattgtctcattctaacttgagcgtaaaaaggtatttgaaaacaatttattttagttttctcggacactttcatgagttgaagacaaaatcagagaagtctccgaaaagacaaaaatggatcgtcagtttgtcaccaaacacctacatgaaccttacttgattcgctccaagtgttcaatcacttatcatatgatcaccaacaatccaaaaataatcgaagtttccataccataaacaaattccataatccaaaaattcgaccccttgacacacactgacacacactgacacacacacacagaaaatattcccgtagctatgcctatatgggcaacttcctgggctaatggtcccatgaaaaactgatgagctcatagtcaaatattatgcacaaatgggcttatataaatgtcaacttcaaagcttaccagaaacccaacaaatacacaagccctgaagtaaaaaacaaaaacaatatttatatcaccgtaaatttcggaccaaatcagagaattcagagtgtttttactgttcatggatcccacgtgatcagacagctcaaattccgatctcgtaacgacgtcgaataagacaatttcggttttgtccctaatcccatcttaaactgggtcccacgtttttctcttcctcccaaaaagcaaacttaaaaccaaaaaaatattatcggacaagattccagctactagtggttctttctttcttcttcatctttttctcaatcactttcttcttctccattctccttttcttttggttctctctcccacttgtgaagaagctcctcaagaagaaccctaaaaaaatgattcttctttgattttgtgtatttttacctgttcttgttggtgtttgtttgcttagttctgaagcaaaagctagggtttttcttcttcttcttgaaa

SEQ ID NO: 11562 - DNA, 3000 bp, Unknown
  misc_feature (1)..( 3000): cDNA_ID_2706842_gDNA_ID_2214502_Annot_ID_133687 3000 nt of promoter + ATG
tatcaactacaacatcgtgcttatcaacatcatcctctactcccgtgatttcagccaaaaggggtacttcttcagccttctctctaattatactctcaatgacctatggaaataataaacaatgaaatattagaaagaaataaattcatatttgctcatatttgctcaaggaattataggaaatactaacctcagttgttccgagtacatggttgatttgctcaagggtaaaccctttcatctcggttctcttgaaactcaccttgcacatccttggacaaccggcatgtgaaccctctttttcttctatgaatctttccctaagtgatggaatggcctcaaatgctaaaaactacacaaaacacatgaaatttaattgttagcttcaattacgaaaatgtaacaaggataaaacaaaagacttacctcaagcggcacacagaatccgggaacaggccatggtgactgagtgttcgggacgacaccgttaaaatgatccaatgtgtgtgagatcgattttaacatgtactcaaatgaatatctcccccatggaaatgtcttacaaaacgtaagatcacttgcagccctaacacagaaatcatcaattggactagccctttctccagtcttagtaggcacggcaatgatgcttgttagaaaatagaggaccgccatccgcaacctatcctttgatctagccggttccatctccattagcttggttttcacgtcttcacgtctaattaccccggttttgaagtacctgttggcgaagttcatattaccagcactctgataattagctggataagccttgcagttgaaaccagagatcaaagcatgctccctaataccatagcggatgggaactccattaacaacgaaccaaacctccttcttcttctcaatagatgccgttcgaagaaaaagcatccacatccccattaacttgtgggtatatccggaaggcaggtggtagatgtgcttgaaactcggatgctccataaaataattcttttcaacattcgttagaggatgttccaagtcagcgaaggtcttcaacacctccgagatataacacctcgttgctaacttcatcttcttggtatactccgacgccgggaagtacataccaagtggctgcattgccatcgcttcctccatatcctgaaagaaacaaacattcatttatatatcactcaattgtaaatagtactgccacattattactctgtatttccaaaaagtattccccgtaattaccagtattacacagatactcctattcatatatcactcaattgtaaatagtactgccacattattactttgtatttcctaaaagtattccccgtaattaccagtattacacagatactcctattttactatatagtattgctcaaagttactagtactaactactgataaatcacaattgtagtattactataaggtattacccacatccgccaatattacctaaatatcaacatagcatttcccaatgttactagtactgtccacatttcacaattgcattattacccaattagatcggtattacgaaatggaatacttaccacatttgcgatgtcctcggctatggtcctctcctccacgggtttttccacttggactatcacgtcctcgtttctctcgtcctaaatatcaacatagcatttcccaatgttactagtactgtccacatttcacaattgcattattacccaattagatcggtattacgaaatggaatacttaccacatttgcgatgtcctcgtctatggtcctctcctccacgggtttttccacttggactatcacgtcctcgtctctctcgtcctcgtctccctcatcctccacagacttttccacattgacgtcctcgtcgctcgcggagctcctctcctcctcctcctcgataacggctaggccgtcatcttgtctctccgcctcttccacgggattagcacacgcgacttctttgtttgtctccgtctcctctgaatcggaatcggagcccaaggtttggctactactccctgattcttctttttcacttccttcttctttttcattttcatcttccacctcatcagtttgcatattctcttgagtttcttcagccggaatatgcttcagagcatcataaaacgtagaatcatcaagcatcgggctctccgtcgttggagccgtcgttggagccgttgtcgttggagccgctgtcgttgccatcgccgtcgcagtcgtttgtgccgtcgcagtcgtcttcgccgtcgcctgaaccttcgctttcttcgccggcgcctgaaccttctctttcttcgccggcgcctgaaccttctctttcttcgccggcgcctgaaccttcgctttcttcgccggcaccttctccttcactttctcagccggcgccttaactttctctgtcttcgctggcgccggcgcttctatctcctttcttttcccttgacctcctccacgcgtcttaggcggcatgactgatttcgaatcggaaatagaacggaaatactggtgaaagcaagaagaacgatcgattaaatttaaagaaatagggaatgttgcagttgaaacggttactaaggagaagaagtcaaaaaatcgaaaacggttactaaggagaagaagtcaaaaaatctctcttcgaattgggaaatccctggaaatattagggtttttttatttgattttcaaataaagagtaaaggtggttcggatggtttggttcggaaacgaaccatggtttttctggtaattaataggttcggatggagatatactagtaatatccatatatttcgaattaaaaaaaaaacaaaaattatttcagttttttacaaggattttttggctttctctttacaaaaaagggactggccagacgattattctcacagaaccgagttagtagttacagagaaggaagaagaagtagaaaacgcaaaaccttccctaaaaccctaagaactctgatg

SEQ ID NO: 11563 - DNA, 3000 bp, Unknown
  misc_feature (1)..( 3000): cDNA_ID_2706838_gDNA_ID_2214502_Annot_ID_133688 3000 nt of promoter + ATG
gcatgagtgaatactctatgtatagcactgagccaagttccttctcaaattgatgtttttcacagtcaacaaaagagtctaatgtatatggtaacaactttcttgtgtatagattgccacgtagattgtattaacagagtactcaagcatcagtttacaaaccaatctcggtgtactaaaactgttacaatttaaccgattcttcttttatgttacaattggtttttgtcaaaaatgtatctaatctgctcttctgcactcaacaagacattctttacgatccaaccttgttcttgcatttgtttgttcagtgcgatattatcatctcgagcagctcgcttactctctctagtgagcaaggtccaatcttgtagcgtcaagtctgaaaacgataaatagcttctcttggttctattggctccaagggatttacgtatgtaacatgtctgaacatatcaccaaaatgtgttatcagttaactactatgaacttactaaattgatgatattcagttgagtcccttacctgtaacaaactcgtgataacgtctacactgttggctccttcgcgcagacaaataacgatgcccgactaaatattttacaagtgttgaggatcaaaccacagaatcatgaggacatattagtagcaaacatgaaactcacttttggtattcttctgaaaccttgggaggaaagttccatggttatgaagtaaccatcatcactgcagagtgattgcatggccatcatcgatagtgtaggaatctgggccttaggatctaagcatccgattctgatgggccaaacccgtttgctacctacaaagaacatatgaaggattcagcttatcaacaatgtctggaaagtgaatagcctgaagacgttttcttgtttttcacctctactccctaaaaggccaattccttcctcttcactcacttcggcaggggaaggtacttgcctaaattcaatccatctttccagaataatttcaagcctatcctgataaggaaaagaaaaacttataacaacataaagtagtctccattgttcgagtctagttaccgagataacaaaaaactaccttggtcaaagtttgcagattgatatgcttgagcccttgataaatgccaaggagatcaaacgtggagaaaatcggatatagaacaaaaggtagacatgcctgcagtctagtacataaagcaagtcagaggattcagagacaaatctcacagataaagtaactctcaacggtactagattgagctaacctttggttgtgttggaatagcatatttagaagaaccgccagtaggagaccaaggttatcaaaacaaacagtttgaatctgaaaagtcacaaataaaatcaagccatgtgtgtgatacaaatgatagaaaagctcgagtaggttcgttaatgaaacctgtgcctttgcagagacttcaccaaggttatccgctacagcaaagcttcgatgtacagctgactatacaatgtcaaaacattggctatcaaaccaaaacaccaagcataaaacaaaacacttaagtcataaggaaaaataacaaataggaaaccttacaccggttgctaagtagcacgacaggctaatctgtttagcgatgttagcgatggaagctagcaaaaggaagtactgagggaatactggagtcattaactcaactccaatgcttagactgaagagtacagacgtcgagaacctaactctcttgatttagcaaaatcctaagagtatatgagtaacaaaaaatctccaaagtttcaagaactataatttagtgaagtaaaataccttcaaattagtgtcaaaagcagaagcaagactagcagtgtatatacatctacttaaccttccaagtccatctttcaaaatccagttaaaagcagcagatgaagctagtgaccgagattgtccaattcctattgctctaaacattgcctgaagcaacaaaaacaactcaaaatttgtaacaaacaaaagtccaagttcaagtctagaactgtgtcaatgttacctgagtggcaagaacttgtaaagcagagctgaaaactctgtgcaaaaacttccatttgacataacttatataattgtcactgacttgtttcggtaaaaagaagtcttttgcagctgaagaagtaagtcttatcaatttccagaaaccatcatcgaggccaaggcaaaacgacgtcgaatcatcttcttcttcatcaacacatagcagctccaaggaatctcctttgatgaagtacctagaaactttgccagactttttgattataattggaagacgacgagctacgttactgggtactacgaggtcttcttttgaagctccttcttgcttgtaatcaatggaagttctcagagacttgacgaattttcttgacgaaaatttggggaaaatgaagattggatattgggttgatgttgatttacatgggtattgaaaaagtcgagagctttgattcgttgaatgcatcagagttcttagggttttagggaaggttttgcgttttctacttcttcttccttctctgtaactactaactcggttctgtgagaataatcgtctggccagtcccttttttgtaaagagaaagccaaaaaatccttgtaaaaaactgaaataatttttgttttttttttaattcgaaatatatggatattactagtatatctccatccgaacctattaattaccagaaaaaccatggttcgtttccgaaccaaaccatccgaaccacctttactctttatttgaaaatcaaataaaaaaaccctaatatttccagggatttcccaattcgaagagagattttttgacttcttctccttagtaaccgttttcgattttttgacttcttctccttagtaaccgtttcaactgcaacattccctatttctttaaatttaatcgatcgttcttcttgctttcaccagtatttccgttctatttccgattcgaaatcagtc

SEQ ID NO: 11564 - DNA, 3000 bp, Unknown; identical to SEQ ID NO: 11557
  misc_feature (1)..( 3000): cDNA_ID_1807662_gDNA_ID_2214502_Annot_ID_133691 3000 nt of promoter + ATG

SEQ ID NO: 11565 - DNA, 3000 bp, Unknown; identical to SEQ ID NO: 11556
  misc_feature (1)..( 3000): cDNA_ID_2706834_gDNA_ID_2214502_Annot_ID_133692 3000 nt of promoter + ATG

SEQ ID NO: 11566 - DNA, 3000 bp, Unknown
  misc_feature (1)..( 3000): cDNA_ID_2706826_gDNA_ID_2214502_Annot_ID_133694 3000 nt of promoter + ATG
ttcttcagggagatcaccattctgatcttcgttcgtgttttcaccttcttctttctgtaaggaatcatcattctcaagcattggtacgtcttcatcaccagcaatcttttcttgaaaggaaagtgatctctttgcagacgcttgacttggtgttgtgtcatcagttggcgcccgtttggtttgaatcagataatgtgccacagacttatacccaagtgcagctatctggaaacaatccaaagaaagaaagaaatcttcagctctagattctattcaagaatcaaaaacaccacaagataatacaaaagaacaactgaaaaaaacgcacccttctgtaaatcgggccagttggaacccatcctttattattccggcacaaactgcaattgcagatcccgcgacaagcgggacaaatccagtctggattctcaagagcttcaagcacatgttcaccatatctgttcatcaaaaatattaatatacattcatcatcaataacagaaaaactaatagcaaccaacctcatgaacaaacaatcaccacagaactgtccttgaaccaaattgcattcactgcactgtgtacgatgccccatcgtcttctgcctgtaagaaacacacaaacacacactaaagcattacagaaaaatcatttcagagagttgcaatatcaagttctcaacacatatgagtttggttattacctgcattggtgacaagtcttaccgttaaacggatcataaatccgtttcccattcttatcatagccatcaacaaaacaagtccagcttctttctgtattcccaagaagcttctcatgttcctctgtgtaaatctcagctcttatcccttcaccaatcacaacactctctcgtttagatgctttcttgcccttctcattgatcccatcagtgtagataactggagttgtgttctccaatctaacaatcacagaagaaaagaatcaataataaacccaaattcttactttaaaatccaaattcttaaaccctagttttgcctcaaaaacccaattcctccagaaaaatctctcctttaaactgatacaaatcgaatcataatccctaattccacaaactcatctttcaaatccaaaaccccaaaatatgatggaatgagagaaacggagacagagaaaggaagagattaccgagaagatcggcgagaaggctgaagaggaggagtcggattctgaacagaattacggttaccgtaagatcttttaacgggtcgggtcttgggtttgagtttgcgagagagatttaagagacccagattgttcatcctctgaagattctctttgatcctctcttccctgcattgttcgtaaagagagacctttggggtttctttgattagttccggattagggtttgatttaggtactgaatcttgtgcttcagttctcatggtgagcatgatgatgatgaagatgatactgggtttcagatttcagaactctctgtcactctctttatggctgctctctggagaaatgatagtaaaagtttaggtttttatattgttttgagttgatgtcctgatgttacagcaacggtcggatttattatttgaaaagtgtgcttatggaaatggggaatagtgtttggaaatgtttactagcttctgtatcataaatccctaatgatgggacttaatctttttaaatatttttgtttccttctaattgcaatacagctaagtagagatagtgggaatatggaaagttgtaatcttttaagagaaaattaataaaccattctacaaaaattgttcttggtgcactttattaagattacgaatattaacatttaaacaaatttccaatagaaatataaagtttgacttttgagtaaagtttagggactgtccataagattgagagtctcaccttgtcaaccaaattaacaccaaatcccttcacatttaggaggatgtattcaatatagcatttggaatgatttgtattaagatgaaaaatatattttattcaaacatgaattctaaaaagctttctaaaatcaagtgttattggattaataattttaaaatctagaatcaaatctgctgttattagaaatattttaaatagtggatttgaattgacttgagagattttgggtgaaatttcaatgaatttttaaaaattcaaacattccctgtctcatagtttgaggtagattttaaacagttttaataacaaattttcgaattcactaaaataatttcaaaactcaataaaactcaaatcactccaaattctttctacaatacactcccttaatttttatttttttttcttttttcctatttttttacacccctttattaattactgtgctttactaaacttaccacacatacaaaaatatgaaatttaagttactaatatagaagaatactgttggggactagaatcacatgatcgttgttgtcataaaatctatcgctagttaaagtattaaaagatcgagaaaaaaaattattagttccccaaactcataattgtatgttaacattttctacccattttcttagatttgaataaggaaaaataatattttggttgtaaattgtaataactaaattttttccggatttgattatttgttttattttcttgacagtggtaactctgctcaagtgcttgccttcatctataaaattggagagacttttcattaattactgttccaacaaatttgaactacttttaattatgagtctaattaatacagagagagttcaagcgtccaacgaattaaaggtctcgttgttattttctcactagctaaaggaaaaacttggccacgttgatgaaccaccacttgaaaaatcttgaagcctccatttacatcaaaacagtcaaaccaaattcgcaatctcacaagtttcccttccatcccaaacaacactttattatctcttgttatatataaatctcaaacaataacactaacatttctcaaaatcaagaaat

SEQ ID NO: 11567 - DNA, 606 bp, Unknown
  misc_feature (1)..( 606): cDNA_ID_2706818_gDNA_ID_2214502_Annot_ID_133701 3000 nt of promoter + ATG
ttaattgttggcatcaaatatatacttcatcaaaaatgaaattctacttctttatatgagataagacttctattatgttgtgtcattgtgaacatggcttcaactcgtgagccatgagtaaattaataaatcttaatattataacttaagaaagattccctacatttatggcgtcgtcctctttcaatcttggtttgaattttctgatgtttaaagttttcttttaacagggctttcaattcttcagttggtgtctgggatttttcttttgtttgccagcttttacttcattttcgtggacatttgtatttatctttggttccacaaccagtttaattaataaatttcaaatgacacaaccaaaaaaattcctacatttctattacagattaacaggtgtcctataacctttttattttccttttcatgtgttgtttctagaaaacaaaatccagattattataattcttgatatcacaaaaatgtagaggaaagggaccatttctaaggaaaagtaattttaaaatccctttatctatgtgttgtgtcgtgtgtcggtgaagagtaagaagtcgagagacaaagttaaaagtagagaagaaaatg

SEQ ID NO: 11568 - DNA, 3000 bp, Unknown
  misc_feature (1)..( 3000): cDNA_ID_2706873_gDNA_ID_2214503_Annot_ID_133702 3000 nt of promoter + ATG
tcatgatttgctttattttgttttgtatatttcccacaattttaacggaattaccggtcaaagcctttaataatgatattgttaatttactttttttgttgttgttgtctttatttatctaactatgcatatagtaaagaattatgacgtccaaagccgcatgggaacctgaacacgacgaagtatttgtggacttatgcgtcgagcaaaagatgttggggaatcaacctgaaatgcaacatatattggaagcttttcaagaaatgggtgtgcggttcaccatagaccagcttataaatcattgggatacaatgatcaagcagtggaagatttggtgtagacttgttcaatgcaaagatatcaaatgggattccttgacaaacacgtttggtgccactgatcaagaatgggccaactatttagaggtacaaattaacaacgttttttgtgtgttgattttgattgtttatgaaggctaatatgtaataaaaagagcttgattggaattgtcataggtgaatcctgaggctgggcagtatcggtgtaatccccccttgttcctcgagaaactagagattatctttgcaggtatgaacttagatggtgaaggtacttcttcaggtagcaaaatgaagcaaatatgtgagcatcgtgatgaagaaaatgttactggatatgtacctaggctaagcgcgtctgatatcgcgactcgtcgtcattataagtggtcaccatcctcacatgcgattgttgtggacacgtgtttccaagagtctttaaaaggaatcagaccaatcaaacgtaaccatctttttacaaaggaaagttggaaaatgattcttgagaaaatcaatcggatcacaggactaggatacacacataagcagctcgaaaaccacttcacacgtaccaggacatcttggaagcactggtgtgaaactattgcctctcccatcatgaagtgggatgccaatactcgcaagtttggtgcaaccgaagaggactgggataaatacttgatggtaaagaaaaactttatttagatttcttagatatcaatttgtaattatattattatttttttgtcgatttatagataaataaaagagctcgagtcttcaaaaggagacatattcctcatgctgataaactggcaaccatcttcaaaggacgtatcgaacctggaaaaaccaaaacccgccgttatcgcaagagagtgatcgatcatcattcagaatcaccacagctacatgatcatcaaccaactccatcatcagtagtagtcaacacaaacgagccagtcaaaggaagtgacgatagagcggaggatggcaatgtggagcctacttcactgattaggtcagactcagaggatgttgctgaaactgtaactcccgagatgatggagaagattccagtgaatgcatcggtcaagaagaaggagaagtttacctttgaggaatgcgtggagtgtttggatgccatagaagaggttgagaaaggcggtgatctatacatgtttgccttggatttgtttaagaccaaagactacagatatctcttcttgatgttgcagaaatcaagtttgaggatggcttggctgctaaagcttctatcaaacccttaaattcatcttttcaaaaaaaaaaaaagtttatttttattttatgttttgttatttttcgttcatgtttatgagtattgtgcaaaactcttttctttctttcttgatcttaactattatgccaaactctctattatgtgtatgtgtaatacttaatatactggagagtaacctagaactcaacaatgtgagatattaggttattatgatttgagagagaatgtctagttcttgttataaaattattcgttttgtgcatctatatctctctgctatatctgactgaggcgaacatttctcgcttcaagttcaatgtaagtattacagattctgagttttcttgagcaacaagtaaccttcaacttctaaatgaattatgatttaggtagtgatgaaatacaacaaccttcattttatcttctttttgaactttttttgcctaaaaaagtaacgccacgtcaccatgcttgtgccgcattactgctttagtaattttgggttatttctcaatatacccttcatctttttaaacgtcttattcatggacctaaatttattaatgtagacttttatccaatccctttagctggtcgtccgtgccgtgtaaatcactttgcaacatcgaattccgttgattataaaatttctgattagattattgtttcgaatttggtctcagttcctttgacttgctatttcgataaatgggtttgtacgaaaatgttgattctatgatgttgtatcagcagctccatcaaatgctggactaaaagtctaaattttcaaaaagatccaactttttaaggtaaatgatccttgtccattttgatgcttgtcttgcaagtctttatgtgatgtttgaattccaattcatgtgtctctttgtttattagagtgctacaatttcaaatagtctcaagaatttttcagctactgctattgttccacctgattcatgttgccatgtttgggagattgatttttgtactttgtttattgtcacttgaagtttctttatgttatccacaaactcaagtttgaaactttcattgtcagctaatcatgagaactagttctttggctttaaacaattagcccacttgaagatttgtcaactaacaaaagaccacccgaagtcgtccttgtgtacgaacacaaggacactcttagcatatatcaacttgcccttttgacttgagatttgttttttaagtatttgattacaagagatagtgcttcaccatcagccaacatggctatattatataatctttagagtcaaaagtattggagaaagaaataagttttgcttaaacattgtagaagaggctggtattgaaatttttatgagatcaagagcttttttttcagtaatg

SEQ ID NO: 11569 - DNA, 3000 bp, Unknown
  misc_feature (1)..( 3000): cDNA_ID_3040417_gDNA_ID_2214503_Annot_ID_184060 3000 nt of promoter + ATG
gacatcgctttattctacaaagaaaatcctctgtaactatttttttttgatccatgaaacttttttgtttgtttgtcaatgtacagtcataattgcagttgcagagagaagagaagacgttgagaaatctctctgtctcctttttctgcagctgtgttttttgttttgtacgtttttgttgcatctgcccagaattggcgttcatgtatttttctacggcctttttcctagtggcagtttccaaccgtttgttcccgccattggtggttacttagttattgttattagcaacatctaaataaacctatttttatattcgcatttgatcttcttcttcttcttttctgcttttgtttatacatcttgttgtggctcttattagcaaacatcaattcgattataatctcattaggaaaaaatagttcaaacaaaaacttctttgaagtttgtttgtttgaatactgtagttatttttttttatatactttagttaacttcactttgacaatgttgtcttccaatacttttcgacttaccaaattaggaaatagtaaaaagagaaaaataaaaaaacagagaaatctgaacaaaaacatagtagctaaacaaaaaaaatgcattttactgtaatagcatgtaaatagtaatatactcaaaattatgtaataacagagtcaatataacaaaaatatccaagttcaataaatttaaaaatgaaattgtgaaataactaaaaacagtgtatgatagtttttttgtttctaagtactaaaatatacattgacatttcaaaactctagaacccaatcatctaaatatttagataaccctatgagtatttgcactaaatgagctaacatctcccggtgtaaaatctttatactaacccattttatcttggtttttttttataacaactaatatcaaattctacgaggaaagtctatatatggagccaaatttataattgttaaagtatatatatggtgtcaaatttatcgatgataggaaattgaaaagagaaaaacttattttcaaagctccacaagactattctttaattttaatagatgcttaaagttttttttccctatatataaatatatatattaaatggaaataaaaccactttcttattttcaaattttatcattaattataatatcacaaaagtactatgtaagggatgaatcacatttcaaatatgtgaactatatacaactatcacctattcattatacaattattaaatttaataatggtatatttgtcccattaatagaatcgtaaaaacttccaaatcctctttatatatgaataatgtattgaataaaatactctatgaattacttggttttttttttttttaaacagaattgtaagtaacctgcttcttatgttaataatgattttagcaagtcatcaagatttagtgagatacaaaacattatttcaatttagataaattgtaaacagtataatcgccattagccagagaggcccatagcttttttctccgagccgggtcggcttgtattttactaaattacccctaatttctctgggtatgtatttctctgggattaaacatgggcaataccgtagtttcaacagtactagtttcatcgccgatcaaaaactagcaacgaaccaatgcaccttcgatcccgtcctctcatggccacgttgcttgatttcgatttcgagcttcttattttttattttcttcacgaaactcgttgaaacgatctaatcttcaacatctttgatttttggtgttggggtttgttgttatctgcggaatttttgtttcctttgccgcggtttttgattcagaggtacgaattgtttcgtttttcctttgtttcaatctttgaactttgatctggattattagggttttatttatagttacttaattgttgattaggctgcttatttgaagagtttttagttcgtttatgtttgattcagttctctcctagggtttcgtgtttaaaagtatccatggattaagaattcttgcttcaatgttgatttagtggtaatgaagttagattatggtgaaagtatcagtcttttggattggatcagttcaaattttgtagttaagcttggaagataacttgttctaagttggggaatatgttttagtgagtaatagacaatgtagattatttgtgatgaaggcaactaaggaatgatctttttcaaactttctcagggtttaattatagctgtctaattgtgtccggtgttcaacaaactaagtggaagtgaattttggaggactttcttaacacatatcacttggattctctgtaagtgaaagcatagtttctggaaggaagttttgagtaatttgaataatatctctgttcttgcttagttcattttcgaattttactatagtttttttttatctattgtacatttagctactgtgagttcttaatgcatttctttattggggttagttcttaatttgggatagattagtggaagtatttagaataagattttgctattatggaattgagcattgttctggcagtttctgtttaaagaccataatgaatatttgctttggaagccgaatatatgcaatgactgcgtgaagtaaccaaattaatctgaagctacataaagggattcctttgtttgtgtatagtctagatgttggagtttgttctttggccttttcaagtgttgggcagtgtaaatcaaatatttcacttaacgttctcgcctattttcatgtttacgttctacataaaatatctctggattttttttgttttcaagtaattttcaaatgccgttctggaaaactcttttggtgtttactaatgtattaattcccgttgttacatggcaggtgcattttaaatcaattatttgagtctgagaaatcagcatttatgtgctacagcttgtcatgctccagtgtgtattcagtgtttattataaaatataagactttcgagagctgagggaatg

SEQ ID NO: 11570 - DNA, 3000 bp, Unknown
  misc_feature (1)..( 3000): cDNA_ID_1015231_gDNA_ID_2214503_Annot_ID_184056 3000 nt of promoter + ATG
atttgtcgttttggataatactattaattgggaacatattgactaattaattttgataggatattctgtttacttttggttcagtctcaatctttgtcgtccgatccaaatgtcaatccctagtcaaatttgttataatttttccaacaaattttgatgctattttggatgtgacacagaccataccagaatcactaacagcgagactactcaacttgatagcattagatgttcactcaaatcagatcaaagctcttccaaactccattggttgtctctctaagctcaagactctcaatgtctccggcaactttcttgtatcctttcccaaatctatccaacattgcaggtttcaccccataacttccacaaagctctcacaagacaacactcccaacaaagcataattcccatttttgttctctttttttttttttcaggtcattggaagaactaaatgcaaacttcaacaaactaatcagattaccagactccattggttttgaactcaccaatctaaggaagctctctatcaactccaacaagctaattagtcttccaatctccattactcacctcacatctctccgtgtccttgacgcccgtctcaactgcctcatgattctaccggatgatctcgagaatctcatcaacctcgagatcctcaatgtcagccagaatttccagtatctttccgctcttccatcttccattggccttttaatgaacctcattgagctcgatgttagctacaacaagatcactgtcttgccagagtccattggctgcatgagacggttaaggaagctgagtgttgaaggaaacccgcttgtgtcgccacccatagaggtgatggagcagaatttgcaggtggtgagagagtatctgacacagaagatgaatggtggctcaccaaggagtcccagcaaaaagaagtcatggggattcggtaaattggtgaagtatgggacgttcaatggcggatcaagaagctggaatagagaggagagagaagggttcatcatgcctgagtaccgctccatcgacagtcttgcttcgcctaggtattctggaatgttctctccacgtcgtctcttttctccaagaacctatttcagcagataaaacagacaacagccaagagttttcacattcctataagccatgtacacctctgtagcatcaaggccaaaacaatccaattttgtctatcattttaatagtagcatcaaaaaatgtgtaaagagtatttcaatatgttcatcagattctagaattcttgtttttttcatatctatgcttgcaccaggtccctatttgactatttctatacacaccaaattttgttcacgaataaagtttgttctttcagaaaacctacccccttctctgcctgatcctttagctataagcaaaagacttaagatttatacagacaaagaaagcaatacttaaaacctaacatacaaggcctcacattctttaaccgtctagaactcactcagttacatactctgacaattgctgagaggaatcaacaatctttattcctctcttcaatttcacatatagtttgatgatcaaaattcaaaacaatgtacgtcatataactaagtatcaaaactcaattcatagccaaaggagaatattttcactttacaaactcctagttcctctactacaagttaagtctgtctgaagattgaagtccggcacacgaatccacttaaagatctcaacttttcttgacttctgactatagaatttgcacaatgaggcaaagagaactcaattgaacaataattactaggactttaattcaaatccaaagagacatgcttcaaattggtgactacggaactgagttcgaacactaaaaaagacacaacttttcaagtgatcactactcttataagtcaagttcccattacacataatctaaaagctaataaagataaccaggaatcttaatacggataaagagcatactcatgacataagcgatcacaatggaggagacaccagcaacagcataagaagctttaacactcttggctttgttcttatcaagcgctaaatcaagcataacaatcccaattccaccgagaacgaacatgaatccagaagagagaccttcaatgatatattgcccgttaacccgacccgacataaacacaacgggtcgaatagttccagtagtcggatcctgagttgatccgatacccggaggctcgacaattacgtcgtagacgaaaccggagactactaaaaagtaggtaaggagaattagagcgtatacagtcatcggagaaggaagcgtgaacgatggaatcttcagacggaggcgcggtggtcggagaaatgagaatgggacgattcggagaaggtggaatattggatccattgaggattgatctgaaccgtctgatacactggagccggtttgcgaatcggatcttggagccattttatcgaatcctccttggatctcttcctctctcaccctatcgacggaatcaggaagagtttcagaattggctttgtttggaaactaggataaagctatccattacacgaataaacaaacgtctatcaatttccttctttcgattttatccccagaagttatcaaagatgcaaaagagaccactttagttctaacttgtattaaattagaaaattcagactattttcgtaattttgttagaaatttgagactatcttcgtaattttctcacaaaatttcttagtttggacgttctgccgttttaatgtataacaaacgacacgtagttctatcttagattgaaaatccggcaagatttggttgctttaacgaaagtatctatctcccgtcatcttgcttcctcgttaaaggaagcaaaagagtttgatcccgtcgtcgagctttcgaactttcgatcttcagcttttctcaggtgacagacgtcgttgtgattcaaatctttttccggtgaacttaatttcggaggctattcg

SEQ ID NO: 11571 - DNA, 3000 bp, Unknown
  misc_feature (1)..( 3000): cDNA_ID_2706901_gDNA_ID_2214503_Annot_ID_184054 3000 nt of promoter + ATG
tcctccatccacgccgtgacctgatccgtcaaggcgttgttaggaagcttaaatctgctcatgaacttgttgtcgccagtacagatctgaagatatccttcttcatctacgaacgcaatcacttcgtcttgatccactcccggaagatacgctttgaaaacgtgagccgtcggagtctcggtccaattgagctgcgtattgacggtggatgatgaagtttgtgggaatatttctcgagaaagtgagggaaagtggtgagaaagaaagagagctggtgatgggaaatcaagaaaggtgttcatgagttcaaatggttcccagattctatcgccgggagatagtctccggcgattgctgatcggaatcatcgacatcttcttcttctctattcttagaaagtaacagaagctgagttataaatcttgatcttcttactcaagagaattctagagttttcttgagagtgacgtttgtgatgattatgaagcacagtaactgggcctagcgtggaagcataaagcccaatagaaaaggcctttttcttttttttcttcttattcccggaatccgacaatgttcaaagtgtgtagtagattgatgaagaaaaccagtgtcattttggtagataatcgtatggaggaattttttcttgcaaaagtgatatatatggtggaaaaatatatatgtaaacatagatgtttattgctcttccgcatttgtgttaaacaaatagtgtaacaatatcaaacagtttttttgtttcgtccattcgattgataaagacaaagatcattacgcattgcgaaaatcgaacattttgattaaagactacaaaacagaacacctgacattaactactactcgagggacgaatcgatctttcgtacggttcttgagaaagcaagaatgtcctctggcttgctagcgccatggtcgttgtctttgttgccatcatcgtcgttggaacctctgtcttccactatagattcacgaatgatggttcttatcgtgttgtcttcggcttttcccgcctcgttggtgacgactctctttttctggtctttctccattctctctttcgttgcctccatatctctctcgttctcttttctctagctggtgcaatattttcttgaaagacttctcgacacgagatttgagaacacgtggcacgttagagatgataacgtggtcgtgttcgatgtgaaggtgttttcttcgactgatacgtggagggatgagtcaaacgaagagaaaatgttacaagaaagcccctcagaccatccttatcaatggactcttacatacaattctaaacaattttgatatacaaaataatgtttaaatattaaaaagattcttacaaaagtaaaaaataaagaagaaaactcttaactaagagccattttccatctcttaagcacactttttaattttttaattcttattttgtttaatataatattttgatattgttaacaatctattgataaggatgctctcaaacgagtgatgtatttcgaaaatgaccttttgaacgatcgttaaaatgagtttcattcaactttcatctaaacaaatcgttttgaatctacgtgtgaaagttggtatccgtttagaaaacaaccggactgctaacgtttaactcaaaccggttttaatattttccaccaaaagaatttgttttagcttctttgtagtatttataatggagtaactcaaatgaatttgacgtttattaagcttaattagggttaatcatttagggaagcaattttgatactattttgccaatggggtggtacttaaaatggagcttgtgaaatttttggccatgaatggatgttcttttccagttcagtttttggatttggtttttattttttttaattattttaaacaaaatttagattttagttttagattttgttattagatatttgtttttttttaaaaaaaaattggttttgaagaaaataatgtagttaaagtaaaaaatagattccttaaattatagaagaactaaaaatctaaaatcttttaacgggagattatatcaaaactctttcttaaactccaaggaaacaaattttacaaacttgattggtatgacaattattttttgaagaatgaaaaccaataactctgtcaaaaattgcaaaacattcaattcgtgtattcacacttatgaaaaactccacgaacaaagctaacaaagttgctttactttttagttacgtcaatttaagttgatactatatatttttaaaaatatatattcgtatagttagttgatatattcgtatactaacttgatctcactcacctcgaacattatcggttttggtgggatttgaaagtgaatagagatgaatgagatcatgaactttattttacaaaaatcagagtaagaataacaaaatttggtaacgggtacatatgattagttaccgattaaagagattgacgtgtcaactatattatcaataggaatattcgtaatttttttactcaagttccagttcaatgctttttgatagttcttttttaataactagtgagaacaatccttttgatttggtcaaaagatgccaataaaacattaaacactgatagaaagaaaagagtaatttgcgttagtatttgactttttttataatcaggtggttaagaaactttgaccactaataaaatgccatacttctttaattacctaattttattaatggcttggatatttggattaatttaaattgattacttccttttaaaactctccaccgtacatgcatctcctatttccgtacacacacatttgttataccatattaagcttttaaactctctttcttctctgatcattctcttcttcttcaaacaacatatacataaaatcatacacacacgtatatatatatatatatatagatagtgtgaaagatgatatgcgaggaggcatatcatcagcaaccgcaaatacaaaaggaacaaatgatgacg

SEQ ID NO: 11572 - DNA, 3000 bp, Unknown
  misc_feature (1)..( 3000): cDNA_ID_3040436_gDNA_ID_2214503_Annot_ID_184049 3000 nt of promoter + ATG
agtggataagcataagtttatgttgccatagaattagctggatttcagatagctgccatccttctctctttgcaggatctcaagaaggccaagaatagtaagaaacaatgttctgcagtgaattggcttcaatgcagagaagaagatactaatggagttatctgcggaaagtggcgtaggtaagttaaacaattttgcaagttccattatttggttcatgctctcgtcttgaatgtaacttactttctatcgccttttcatcagacttcttaccaattaccaataccttcttccttgtctaaatatgcttaatttgactggatatacacagggcccctcgttcagaggtacaaaccaaagactgggaatgcttctgctgcttctcttgggatccatcacgtgctgactgtgccgtccctcaggtcagaaactctctttacaactatcttatttcccccaaagaaaaatccttccgaggatgaaaagttagcagccgtgagaggatgaaaagcattgaaaattattgaaccgtcttgcttcatctttctccatgaacatgtcatctgtattcttgaacagatatcttaatactcctaaaagagccatcgaagtttatacaatgcatcttgtgttcatttctgcaggaactggagacaagtgagatccttaaacaactcaagtacatcaagatggttcgttatttttctcattacttgtttgatctttcccgaccatattcctttctgatcaaggatctaaaactgaaacggtcggtttcctctgcagcttagacctcgatcagacgccaaaaagcgaaaactaggaccaaagggtcgaagcagatcacatatcaaaggaaaatcttgatggacacaatcaaaatgcatatgcttttggattagagagaccttagaaactagaaaggtaacatcagaaattttttgtgaagcgccaatgctttttgtactacttgaggatatcaagttgctttctaagtgactaattaggttcagatcttttgttagctcccaaaacaggagtagtgaatagaacgtttgtgttaagggacaggttctgggttaaatgtgagattcatcttgaatgcaacaaaatctataatcagcttccgggtcaaagcattctgctgagattagattcattcacggaaatgagtattacattcaaagcttggatcttggaaaatagtaaaagaaaaaaattacactctgagttacagaaaatctgttgcaaatttcacaaattgagaaaaacaatagcggcaaatcaccatccgtatttagcttgtgtctcggctttcgtgagcaatcctctagaacgtctctctgtcaactccgactccttgtgcttcatgtccatgaacaacgcagtgatttgatgcttcctcttgtgaagctttgacactttccctttagatgaagatgttaccggctgcaagacaaatttgaacaaagacatcatttaaaaagcaatacaaagcagtcaagtatattttcagtgaagaacacataataaaattggtatgataatcaaagtatctcttttcctataaatccacaaagaagtttatcagcaaaacagaaagaacttgacaacagaagccccaaacaagagataatcttcaactcatattcaactcatatgctctctaatgaaaatctcctaccagcaaagggtttagatatacagaaccagagaatgagaataataagagacattagagacaagacaacacccaagttattgcaaataaatttcgcaagaaaaaacttgacaatggcagccacaaacaggagacaaattcacaacgctctatactctatagtgttaccagttcaggcttttctaaagacaattcctaagttcttgcagccaaaaacgagtaagaagagtttagagagtaaacaaacctgatacgcaggtccaaaggcgattccagtagatttaacctgatcaactcgtggcctattcttcataagctcatcttgcttaacctcaacaatctctggcatctgattcctccctctccttcctctcctcgcaccactatccatagctacaaccgcttcaggcaatcccgtcattgcctcaaacccaccaccattccaagtattacctccatagctactaccatcatatcccacactactaccactaggaattgtttcgtatccaccatcataaccagtagcataatagttatctactccaacgatttgttccgtttcgctattactatgactaaacgattcatagctctggttttgttgatcactaatacctgaatccgtttgaggaaatgcaattgaaggtgtttctgtttcgagattcgatcttcgacctgatcctgatcccaatgaaggaagagcacctagtgtttgtgagcttttaggtgcaggcatggcggataagaacgatcttactgatgaatcgtgagatgcggaagcagattccatctgtttacgcttcttcctagctttctcttcttcttcgtcgtcttcgtcgtcaagattgctcggtctagggtttactggaagcctgatctggacgacacgtttcggaattgacgacggattgggattttttttccgtgaaattgaggatttgggaggagggagagatgagaggaaagaagaagattttcctcgagaggaagatgagcctaaatcaccatcttcggaggatttgagttctttaggttgaggaatagctgagaatagagacgaagcggaaggttctgaggattttacagtgaaagcttctcgacgtggttgaagatcttcttcttcgtccgacgaagcgtagctcgctaccagagagtccattgcagagagagagagagagagagagagagagaggaagacttagccgtcgccgagatatgtcggagtatttgtcttatttatatgggctttttcaggagagatttaagacccatttaaaagcccatttggaagtgatgtgaaaaaaaggttttgccaa

SEQ ID NO: 11573 - DNA, 3000 bp, Unknown
  misc_feature (1)..( 3000): cDNA_ID_2706348_gDNA_ID_2214503_Annot_ID_184043 3000 nt of promoter + ATG
attcagcgagaagagtgatgtttatagctttggggtggtactcctggaggtaatcacgggccaaccggtaatttcacgttcaaggactgaagagaacagacatataagcgaccgagttagcttgatgctgtctaaaggagatatcaaaagcattgtggatccgaagctaggagagaggttcaacgctggcttggcctggaagatcactgaagtagcattggcttgtgcgtctgaaagtactaagacaagactcacgatgagtcaggttgtggctgagctaaaagagagtctatgcagagcaagaaccagtggtgattctggagatatttcttttagcgagccgacggagatgaacgtgtccatgactgttgacccgggggtgcttcctcaaccgaggtaatgcatctcagtttaaaagcatttggaaaattatgtgagctatgaaataaaaatgatttgtgattaagaagagaagaaaggttgggtataattgaattgtttttttttttgccttaaatcttagtaacggtaagttcttttatacattgtttactttctgatcgacactttaattcttgagctacatatatacaaacattctttaatggacaagaagaaaaaatattgttctgatacccttcaattgagctctattgttctgataaaaacattaatacataacctgtgagtatgggactggcttagtaaggtagatataaggaagaagatggtcacaaagagagtacatatggtaaagtaaagcatggttatactgtaaagtaaagctagtttatatagaaaactaactttgatatagctttcatataagaagcaaggacaagcctgagatcataaagcttccatgcaaaaacctttagagaaaacgtacaaaattaaaatctggcgggttcagtatgttacataggtcaaattacagtggaaatgatttagattgatgtaccggttcagaaaacgataaaggtcaacaaacaagtgtaaattcacctctttctgtatctccccatacgagaaatgagtatccagtaactcagcctgatgcagtcaactctacagataaatctgtgggcattactaaggagcacaaccttttacatggaatagtccagtggttccggaagcttaaacacactttgtcaagtgaggagacttcagatagaaaagcttctgatgccacaaagaccagtgatgttgaaattaaaaagaaccaaatcggttgccattctgagtcccacccccaagctttatcttcttgcagcaatggagactcaaatcagaatctgatgaggactctgaagaaccttggccagtccatgctctaacacattcaggtaacttctcagttctcatattcatcaaactggtagaagtatttttcgtatggttctgaaggtaacaagtatgagtatgttagtttcttgcctctagtggtataggattattgtaacaaagatatttagccatttccatgacaattcttctccgccttacaagctcaaatgttctgatgattttagtctattttatattcaggcagttgagttggttttccaacaagaacctagtctggttcaggcaggattgatagggaactttgctaaaaccaatttgatcgaaaagggacaagtcactgctacaacagcacttaaggagcttcggaaactcagtaatctgttgtcagagatgtgaggttgtgttctctcatttgtttgagtcagctctgtaaatacatttgaaatgtatattgttttagagtaaaaggataaagaataaaactttctgttttcaatcgaggtgtggttaggtctaaatgtgtagaggaaaactcatgaaagaaattgacctcaatttcttaaatatttttgtacattgatttattgagatgaagccaaatacttgttttagttcttgtgttaaaagggaataatgatgactcgtttaatatatgttgtggaagccaggaaatagtggaagttatgaatccaaaaacaataatctgaatctccttcactattccccaccactgcttcaggaccaactatgttctcattctcgtttgcataagatcggttctctgcatctttacttccctaccttgtctttctacacatcatataaggaagattctgttatgttatagcaatagcttctgaataaaatataggaacatgcaatatctacataacaaatttaaaaactcataataactaatctaattaaacaacataacatataaacaaataacatgtatttttcaaatttcgtgtaataaaaaatggcagttaaattaattaaataatgtgtattataaacaaacaatgtgttgttatttttttttcaaatttcgcacgcaaacttattatcttattaaaaccaaaaaaaaaatagtaatctcgggggtaattttatggtaattaacttaattgaactctataatttgactatcttttcaattaacccttcaatcacaatatcatttagtataaatgaagattagtcaatttttattttgcaacaaattaaaatcagtcaatgccaattaaaaagtttcctaaaagagaatccactcataccggtataaatagggcccttagacacctataatctcagaaaaaaacacaagaattctccatctcaagcagtgcaaatgccaaaaaatttagccatgatgtaaaattttggaattgataagtcttaaggttagttctagattcagccatgatgtaaaaaattcccatacatatttgaatgtatattgtatatagacttggtttctgtataaaactatttggaatgacaaaatctttcgctatcttccgggttctaaccaattatatcatgatttgctttattttgttttgtatatttcccacaattttaacggaattaccggtcaaagcctttaataatgatattgttaatttactttttttgttgttgttgtctttatttatctaactatgcatatagtaaagaattatg

SEQ ID NO: 11574 - DNA, 3000 bp, Unknown; identical to SEQ ID NO: 11568
  misc_feature (1)..( 3000): cDNA_ID_2706873_gDNA_ID_2214503_Annot_ID_184042 3000 nt of promoter + ATG

SEQ ID NO: 11575 - DNA, 3000 bp, Unknown; identical to SEQ ID NO: 11573
  misc_feature (1)..( 3000): cDNA_ID_2706348_gDNA_ID_2214503_Annot_ID_133703 3000 nt of promoter + ATG

SEQ ID NO: 11576 - DNA, 3000 bp, Unknown
  misc_feature (1)..( 3000): cDNA_ID_2706344_gDNA_ID_2214503_Annot_ID_133704 3000 nt of promoter + ATG
agagttcaattgcttttgtatcatgtgctttttctcatctttttgcaggaatgcacgagcttttggcacccctcctttatgtacttcatgttgatatcatgcgtctttctgaagtgcgtaaaagctatgaagattactttaccgatagatttgatagtttatctttcatggaaagagatatcacttatacctttgatttcaataagtttatggactcagtggacaatgggattggttcccaaggacattcaaagaattttaatagtctagatgagcttgatcctgaagtccagtccctagtgatgttgactgattcttatgggacagaaagtgaacttggtattgtcttgtctgaaaaattcatggaacatgatgcttactgtatgtttgatgctttaatgagtgggattcatggttgcttcgccatggcgagcttctttagttactctccagccagcggttcccacaccgggttaactccagttcttgaagcatgtagtgcattttatcgtattttggctgttgtggattcatctctgcacagtcatctagttgaacttggagttgaaccccagtactttggtcttcgttggttgagagttttgtttggaagagaatttttgcttcaggatctcttgttagtgtgggatgagataattttggcagataatagtgcaagaacggatgaggatagtagaaatcagaacttcaggatctttgattgtcctcggggaaccttagtcttgggaatgactgtttcaatgatattatatttaagatcttccttgctttctactgaaaatgcaacatgctgtctacaaagactattaaattttccagagaacattgacctgaataagataatacagaaggccaagttgttacaagctttggttttggatactgatatgttatcagctctgtcaattaatggtgttttcgaccagagcaattttgtacctgcaagaactaaaagttgctccacttcacctagatctcctttgattatcgctcctgaaagctattgggagaagaaatggagagttctacacaaagccgaggaagaagaaaataaaatttgtttggagaaacagactcctcctacacagaagaaaaagaggtggttgaatgtgacaaaacttttccgagcagtgattgatctatcacatcataagttaggaattggggaacggaaagcaaactcatctccagtgacacaaagtttgcttgaagattcgtctgagcagctcaatgttgattgtcatgtgactgtgaacaaggagaacattcatcctcaagaaactgaggaaaacattatggaattccattctgcagatgaagagagtatagtaagtggaagttcaccaagtgaggagagttcattcgtctccttagacccaaccagtcctgtcagatgttcaaccaaaattgaaaacgattcagttagcagtgctggctcaaatttgcttcccgatgaagacgacaaaagcatagtttcaattagtgaagagaattcatctgtctcctctgatccaatcagtcctgccatagattcaaattacagtggaaaatatttagattgctgtaccggttcggaaaacgataaagatcaacaaacaagtgtaaattcacctctttctgtatctccccataggagaaatgagtatccagtaactcagtctgatgaagacgtctccaccgataaatctgtgggcataactaaagagtacaagcttttacatggaatagttcagtggtttcggaagcttaaacgcactttgtcaagtgaggagacttctcatagaaaagcttctgatgccacaaagaccaatgatgttaaaattaaaaagaaccaaataggttgctattctgaatcccacccccaagctttgtcttctggagactcaagtcagaatctgaggaagactctgaagaaccttggccagtccatgctcaaacacattgaggtaacttctcagttctcatattcatcgtgtttcagcggttaccagcatttataaaaagataagtacaaagacagtaaaatgggttatcgaactggtaaatgtatctttcgtatggtcctgaaggtaactagtaagttagtttcttgcctccagtggtaaaggattattgtaacaaagatattttgccatttccatgacaattctttaccgccttacaagctcaaatgttctgatgattttagtctattttattttcaggcaattgagttggttttccaacaagaaccttgtctggttccggcaggattgatagggaacttagctaaaaccaatttgatcgaaaagggacaagtcactgctacaacagcacttaaggagcttcggaaactcagtaatctgttgtcagagatgtgaggttgtgttctctcatttgtttgagtcagctctgtaaatacattatgaaatgtatattgttttacatttgtttgagtcagctctgtaaatacattatgaaatgtatattgttttagagtaaaaggataaagaataaaactttctgttttcaatcgaggtgtggttaggtctaaatgtgtagaggaaaactcatgaaagaaattgacctcaatttcttaaatatttttgtacattgatttattgagatgaagccaaatacttgttttagttcttgtgttaaaagggaataatgatgactcgtttaatatatgttgtggaagccaggaaatagtggaagttatgaatccaaaaacaataatctgaatctccttcactattccccaccacttttccggtttggaaattgttgtgaatacactttcgtaagtcgttgacattatattgaagaaactcttataaaatcacaaaatacccttttggcttatagtatatatatgctttcagggaaggtggttcacatgttggcaacatgcctattgaatgactgaaaataacaagcttttcatatataaggtttagtttgaatctatgagaaattgattgagaattgtgactgatg

SEQ ID NO: 11577 - DNA, 3000 bp, Unknown
  misc_feature (1)..( 3000): cDNA_ID_2706911_gDNA_ID_2214503_Annot_ID_133705 3000 nt of promoter + ATG
tgcgagactaatggcaatggtcaggaaaaatatgagagcagcgctatcacgaatttcaacttctgtttttcgcttgcatctaagagttaaacaagaaaaatatctgcggttgaaggaagaaaaagagacacttgcctgctgagtgaagcagtctcgtttgcagaatctcgaagttgattaatctcagtcttgtcctcgttgattgctatagccccagaattttcagagtgccttataatagtgaggttgttgagagagaccttatttaaatatcttagagcccaccttcttactcatcaatgtcagatgttgttgcaccatttgctgacctgacaatggaattcaggatatgattaccgacaatagattttatgaagaaccaatactgaaaaaccaatgtttattagcgacatgaatgaggatgttatagcctaacacgttctaactgtggatgctggatacctataacaattggaaacaagtactttttcacggataccttctttagttcaaaatccaaattttatgaaaacaatgccccttatggttttgcaaacatctgatgaacttacagctacataatgccagcagttagaacattttagacgcagcaatcagatatcttatataaactacagaagagattagaaaataggaagcagatgttagaccataataaccccactaggaagtctgaaaaatagaacttataccttcatcttctacggagagtctttcctactctttggttgtttctccttccgggtctctctaataccgttgcacatagttataagtttgtatctgttacttagacctcagtcttcgccttcaaaaatctgctcatctaaaagacagtcgtttctgagtaatgataaacaagaaaatcataagctataacagtttaccaatagtgttgcaaaaaaattaaactggaatcattacataacgagaaggtggttaatattgtgagcatgaaagggtgaaacaacttagcacactgcattatcagtcttgcgaaataattggaggacaaatcatatgaatcttcataccattggatactactaccaacttggttagtcaataaacaacactggcatgcttttttatgcgtaaactactgtcctatggagaatctcaaaaacggagtttcttctactttgcttttttttgagcaaatcactgtatttctcccgtaaacaaataaagggattaaaataaaaagtactcacatagtatagtccactgctctccattgtcttggcatggatacaatttcttcattgttggtttcacctaaggggaccctgtttccaagtgtacgtatgacagttcttctaaaacacggctgccgaatcctatagaagagcagctcaagctagttgaagttatgttgccatcttcatcgctagcatttcccaagccactaatgctatttccgtcttccttcgcttcaggatcataatcaccattctcagagtcatcttaaggctaatccacattgtcattgagtaacatttcagaaccagtatggagactagcttcacctttgaatatatccaagaggagagtacaaagtctcagaagtagaaggaacattacagtgttcattgctgtttgtctcttttaccattctaaaaacctcattacagtgttcttgcaactgtttagcaattccaactgctgctacgggatcttcaaaactcttaaaaagagaaagaacagagaattatcaaaaagagccaggcaatattttttatcatcgattcatacactccagcaataccttaaattaatggcaacacggttactcttggatagcaccttcttcaggttggtagattgcaactaaaagtggcttgcatgggttcctaaagctgattccttctctttcaactatattgagtattaaacatctgtagtagctctatatcagactcatatagagaaacagacacagagacgcacgtcaaattcctctttttaaaagtagtgatacacacgaagtcaagtcaatttagaaaaatataacgaaacacagacattacatatacagagtaatgtaaactgttcaaagatcatattgaaactgttgttgagcagtgtatatgataaagagcaaaaattgatgcaaagccagaagccatcaagtcttttcgcatctgaatcgaaaaattgatacagaactgcgataaattacttaccgatcatgcgtggtcggttgagtcaccggcggcgactgacgaagctgtggggtttgggttcgtcgtcaccttcaactttactttttgttcaactcttaacgtttttacatttgagcccctctatttaacaatctatattcaatttgttttatgttcatgaaatgaaaattacattccattccctatatttttgagacatatttcaaatttgtttgttggttttactttggaaaaaagaaaataactgtttcccaaaaaaataaaaataaaaataaatccataggcaattaacagatggtcaatttaattatgcaaaaagagaaaaagatggtcaattaattaattatcaaagaaaaatctgattatagggtatttcaattaagtgataatttatttttcagtgataatatattactgatatttaataccttttttctcaacattcctggaatgactcttttgtgctctaattaattttggatttttttctcaacattattttaataattaatacccattttttaggttacaattaacaaaaagaacaagacaaaattcaattttaatttaattagcatttagctacttgttcttcttcatcaatcggctcttcgcgcctggaatctctcacgcaacagacaaaattcatattttcatcatcattcatcgtaagtagtttcatgaagaattaacaatgtttatcgtttggttatagttttgcttatttatctcctcggagctgtgtgatttaacttaaaattgatagagaagcaaaagaggattaagctatatg

SEQ ID NO: 11578 - DNA, 3000 bp, Unknown
  misc_feature (1)..( 3000): cDNA_ID_2706866_gDNA_ID_2214503_Annot_ID_133707 3000 nt of promoter + ATG
actttttattttaatccctttatttgtttacgggagaaatacagtgatttgctcaaaaaaaagcaaagtagaagaaactccgtttttgagattctccataggacagtagtttacgcataaaaaagcatgccagtgttgtttattgactaaccaagttggtagtagtatccaatggtatgaagattcatatgatttgtcctccaattatttcgcaagactgataatgcagtgtgctaagttgtttcaccctttcatgctcacaatattaaccaccttctcgttatgtaatgattccagtttaatttttttgcaacactattggtaaactgttatagcttatgattttcttgtttatcattactcagaaacgactgtcttttagatgagcagatttttgaaggcgaagactgaggtctaagtaacagatacaaacttataactatgtgcaacggtattagagagacccggaaggagaaacaaccaaagagtaggaaagactctccgtagaagatgaaggtataagttctatttttcagacttcctagtggggttattatggtctaacatctgcttcctattttctaatctcttctgtagtttatataagatatctgattgctgcgtctaaaatgttctaactgctggcattatgtagctgtaagttcatcagatgtttgcaaaaccataaggggcattgttttcataaaatttggattttgaactaaagaaggtatccgtgaaaaagtacttgtttccaattgttataggtatccagcatccacagttagaacgtgttaggctataacatcctcattcatgtcgctaataaacattggtttttcagtattggttcttcataaaatctattgtcggtaatcatatcctgaattccattgtcaggtcagcaaatggtgcaacaacatctgacattgatgagtaagaaggtgggctctaagatatttaaataaggtctctctcaacaacctcactattataaggcactctgaaaattctggggctatagcaatcaacgaggacaagactgagattaatcaacttcgagattctgcaaacgagactgcttcactcagcaggcaagtgtctctttttcttccttcaaccgcagatatttttcttgtttaactcttagatgcaagcgaaaaacagaagttgaaattcgtgatagcgctgctctcatatttttcctgaccattgccattagtctcgcacatgcttttcgcaacttctaagatgtcacatctttgtcattgtctgagttttgatgagcttaaagcaacttctagaagacaaagagacaagaagaggacgagtttgaagcactaatggagaagctttgtttacacctgaggcactagccattgagttttaggcaagtcttcttgttttactcccaagaggactcaatagcagaggcttttgagcttctaggagaaatgttgttatgttgcagaatcatatgtatagttttgtattgtttgatcctcttggaataaacaagtctaagtcttgacacatgtagctttgaactttctgcaacagtgtaacacctatgtatgtaatatataataaaaatgccaaatattttgtggttcttcattgtgatttggttaacaaatattgaatctgtgaatcttctctactgatacagttcagattcagggatcagaatgcaagaaactaaaaaaagagacccattttacacaagaacaaaaaatctgagcggtttaattataaattagattttgaagttatatatataaatttttccacaggaaaatcaaagaaagttgttttgccagtgagttagagagagagagagcgatagagcgagagagagagagagcttgcgtcagtggaggagtcggaaacttgagaaacttgtttagaagaaacgccataacttggagaagcccaaacgaggattttgctcttgtgtatcttcgtagtccatctggtaaatgcgagattgttcttcttgttacgaaattgtttgtttgtgtatcgctgttcattgtattgtttgttgttttgtactggatttggctgtgctttgtgaggtatatgaaggtttctgcaattactggaattggattttggtgtttagtctccgatggtttgattgtgttctagggttttcataagaacggaagtctgttttgttgtgaatttctcagaaaggtaaaatttgttcagagattgttgagattaagacttgaattttagcataggaagagaaatttatgtctagcttgaatctaggttgaagggtgcatggtgctttaaacgactgaaagattaagatttctcagagattgagacttgaattttagaataggaagagaaatttgcttacttcacaaacgttttgtgcaacctggatttaagatgatatagatatgtagcttgaatctaggttgaagggcgcatgggtttccagattcgagtcactttagatccgaatttttgtagttttctaaacttgggtgctgaatttggatctgaatagcatccaagaacatcctggattactaacttactgaggattaaaggtttttctgaatggaaagtttgcattttatcactagttaggaatccgatttgtttttctcagtgagacttggagatgatgagaacagtatgtgtccgcttaatgcagtaccacaaaattattcaatcacgaatcaggagagcaaccttttgagcgcctgataagttactggagttagtttaaaacaatgggtgaaattgatccaaattagtgatcagaagataacttactgtttcttcgttatggtactcatggacttggttttcttgcattttgactctgttccatgttttgctttcgacatttaggtgatcagaaggatatgagcattaccattccagagggactacatgaagaagtcgaccaacagattcattggtacttagagaagtaatgtgctttcagatacttttttggtttctcaggaaaac

SEQ ID NO: 11579 - DNA, 3000 bp, Unknown
  misc_feature (1)..( 3000): cDNA_ID_2706901_gDNA_ID_2214503_Annot_ID_133714 3000 nt of promoter + ATG
tccggcagctgtggcggcgacgaagaagcatctttctcaacgaacacgacaagaaactcgtcctccatccacgccgtgacctgatccgtcaaggcgttgttaggaagcttaaatctgctcatgaacttgttgtcgccagtacagatctgaagatatccttcttcatctacgaacgcaatcacttcgtcttgatccactcccggaagatacgctttgaaaacgtgagccgtcggagtctcggtccaattgagctgcgtattgacggtggatgatgaagtttgtgggaatatttctcgagaaagtgagggaaagtggtgagaaagaaagagagctggtgatgggaaatcaagaaaggtgttcatgagttcaaatggttcccagattctatcgccgggagatagtctccggcgattgctgatcggaatcatcgacatcttcttcttctctattcttagaaagtaacagaagctgagttataaatcttgatcttcttactcaagagaattctagagttttcttgagagtgacgtttgtgatgattatgaagcacagtaactgggcctagcgtggaagcataaagcccaatagaaaaggcctttttcttttttttcttcttattcccggaatccgacaatgttcaaagtgtgtagtagattgatgaagaaaaccagtgtcattttggtagataatcgtatggaggaattttttcttgcaaaagtgatatatatggtggaaaaatatatatgtaaacatagatgtttattgctcttccgcatttgtgttaaacaaatagtgtaacaatatcaaacagtttttttgtttcgtccattcgattgataaagacaaagatcattacgcattgcgaaaatcgaacattttgattaaagactacaaaacagaacacctgacattaactactactcgagggacgaatcgatctttcgtacggttcttgagaaagcaagaatgtcctctggcttgctagcgccatggtcgttgtctttgttgccatcatcgtcgttggaacctctgtcttccactatagattcacgaatgatggttcttatcgtgttgtcttcggcttttcccgcctcgttggtgacgactctctttttctggtctttctccattctctctttcgttgcctccatatctctctcgttctcttttctctagctggtgcaatattttcttgaaagacttctcgacacgagatttgagaacacgtggcacgttagagatgataacgtggtcgtgttcgatgtgaaggtgttttcttcgactgatacgtggagggatgagtcaaacgaagagaaaatgttacaagaaagcccctcagaccatccttatcaatggactcttacatacaattctaaacaattttgatatacaaaataatgtttaaatattaaaaagattcttacaaaagtaaaaaataaagaagaaaactcttaactaagagccattttccatctcttaagcacactttttaattttttaattcttattttgtttaatataatattttgatattgttaacaatctattgataaggatgctctcaaacgagtgatgtatttcgaaaatgaccttttgaacgatcgttaaaatgagtttcattcaactttcatctaaacaaatcgttttgaatctacgtgtgaaagttggtatccgtttagaaaacaaccggactgctaacgtttaactcaaaccggttttaatattttccaccaaaagaatttgttttagcttctttgtagtatttataatggagtaactcaaatgaatttgacgtttattaagcttaattagggttaatcatttagggaagcaattttgatactattttgccaatggggtggtacttaaaatggagcttgtgaaatttttggccatgaatggatgttcttttccagttcagtttttggatttggtttttattttttttaattattttaaacaaaatttagattttagttttagattttgttattagatatttgtttttttttaaaaaaaaattggttttgaagaaaataatgtagttaaagtaaaaaatagattccttaaattatagaagaactaaaaatctaaaatcttttaacgggagattatatcaaaactctttcttaaactccaaggaaacaaattttacaaacttgattggtatgacaattattttttgaagaatgaaaaccaataactctgtcaaaaattgcaaaacattcaattcgtgtattcacacttatgaaaaactccacgaacaaagctaacaaagttgctttactttttagttacgtcaatttaagttgatactatatatttttaaaaatatatattcgtatagttagttgatatattcgtatactaacttgatctcactcacctcgaacattatcggttttggtgggatttgaaagtgaatagagatgaatgagatcatgaactttattttacaaaaatcagagtaagaataacaaaatttggtaacgggtacatatgattagttaccgattaaagagattgacgtgtcaactatattatcaataggaatattcgtaatttttttactcaagttccagttcaatgctttttgatagttcttttttaataactagtgagaacaatccttttgatttggtcaaaagatgccaataaaacattaaacactgatagaaagaaaagagtaatttgcgttagtatttgactttttttataatcaggtggttaagaaactttgaccactaataaaatgccatacttctttaattacctaattttattaatggcttggatatttggattaatttaaattgattacttccttttaaaactctccaccgtacatgcatctcctatttccgtacacacacatttgttataccatattaagcttttaaactctctttcttctctgatcattctcttcttcttcaaacaacatatacataaaatcatacacacacgtatatatatatatatatatagatagtgtgaaag

SEQ ID NO: 11580 - DNA, 3000 bp, Unknown; identical to SEQ ID NO: 11570
  misc_feature (1)..( 3000): cDNA_ID_1015231_gDNA_ID_2214503_Annot_ID_133716 3000 nt of promoter + ATG

SEQ ID NO: 11581 - DNA, 3000 bp, Unknown
  misc_feature (1)..( 3000): cDNA_ID_2706889_gDNA_ID_2214503_Annot_ID_133719 3000 nt of promoter + ATG
cattgacattctgattcctaatatttcctttaagcttctcctcaattcttagttcaaggtagaaacgagtttgctcatcattccacgcaagattcttagttgatcatgtgtttttgtacaaaatcagtctaaattacagaaaatattacagtaaatctaagtttagaggagaatatactcacatcggtaccattgatagttgtcatctgtagcacacaatgaaaacaaacgttttgtagttgtgtttgaacaagatcaaagataccaaacaaataaaacaaagatcagagataacaaagcaaacaatacacaacttatgataacaaagcaaagcaaataaaacgtgtacaaagatcagagataacaaagcaaagcaaagaaaaactatttgatattgaacaatcatgagatattattcttgactatttctacagtatttgaactcaaaccttagacgaactcatgctactactacagaaagccaaatgcaaccactaattaatactatttaatatcgaaagcaatatatttacagaggacgtactcgagaaaccaaagctttcttacttggagacaaaacttgctgaaacaaggactgaagagaaaaaatcttttataagatgaaattctcccttataaataagcagttataagctataaacacaaaaacaattccactttggatgcaattgaacacgtcaaggaggcagctgaggtttgtaactatggatggtcaatctaaagagggctaaagtgcagatgctaaagtggcagcaccaaatggttatgttgctcctaatgtagagacaacaaagcctcttaagagcaaatcgaagactcaaaagcaacacaaagcaagcaaagcaacacaaagcaatataaggaacacaagccgtaaactaaagctaatcgaagaatcaaaagcaacacaaagcaaagtaaagcaaacccacaattaaacaatgtaaccatggtggatcaaacccaagaacaagtgattgcaacaaggatacaaagagaaacaacgtgagagacatggagcgagagagaggaagcgagagagagagagagagagagagagagagagagagagagagagagagagagagagagagagagagagagagagagagagagagagagagagagagagagagagagagagagagagagagagagagagagagagagagagagagagagagagagagagagagagagagagagaaacacaaacctgctacactggcgaagaatcggcgacggcgatttgtgaagaatcggcgacggcgagatcaccggcgaagaatcagcatcattgacggctatgaatctcaattttgagtgttttgtgtcgaggagagggtgaagaagagatgtgattttgggtgtaattccatatattagattagggtattatttttgttataattttggctgaatcagcttcagcagaatgaacaaatcaaactcagtcagattttttttattttttggatgaatttagaaaaaagcattcaactgaatcattcgaatgatctattaaaacatgaaaaacaaacaacaattttcatcttcattgagatggttcatccaaatggacaaacaaacaggaccatagtactcaacttgaaaccattgaagctggttggcaggttttagtctttcttgcaatatttgcatgtttatatataaatatattctaattttcttatattttattcattgttttgttattgattaggtgtgcactgtactttataatgatactaaccctcgatactttgtctactggactgtgagttaacttccaaagtattgttaaattttctttgttttttttgttgacaaaaaatctcctaactattttttgttatgtgtgttgtttgattacgtgaaaacagaatgattcatatacacaacatggttgctataacaatctttgctccggctttgttgttgtcaaccaagcatttgctctaggcgcggccgttcctgaagtttctatccgtgatggtctacaatacgaaattttcacaagtatatggaaggtaaaaataagggctctttttcatcatataatttcaagaaatactcttttatatatagaaactgaaactaaatatgttctattgttataggatcgtagttcaggaaattggtggttgaaatttggtactcatttaattgttggatattggccttcttcattgttcaatcgcttaggagatgctgcgagccaagttcattggggaggcgaaatagtaaacgtaaaggagaacaaccaacacacgtcaacacaaatgggaagtgggtcgtttgcaataaatggatttagaaaggctagttattttaggaatattttagtacttgatgaaaacaatactacgaagcaacctgtaggtgcttctacatctgagacggaaggaagttgttatgacatcaggtatcgcactgatcaagcatggggaagtttcttttactatggtggtcctggtcgaagtcctttttgtgcttgattagatatgcatcttatatatgtaaaatattgtgtatcaatctatctatgtcagttatcaccagcatatagtattatatgtggtggtgaaaataaagtttaagatatcattatagttttgagactataactagtgtaagctagtgtaaaaaaaaaaaaaaaaaaagaaaaaaaaaaaaaaaaaaaaaaaactagtgtaagccaaattcatcaatagggttaaaaagatagtttaatggattgagtattgagttctcgaggaagttatattcttgtctaaagtgttatcacatttaacaaagtgaaacggcaacgttttggttgccacaagataaacaaaccatgtcgttttcgaattgtgaaaacagcacgtagttagaaaattcatcaatctgaaaaggaaaagggtttcaaactctctctaggcggtctccgaattagcaaattgaaattggcaaattgcaagagttttcgattcaaca

SEQ ID NO: 11582 - DNA, 3000 bp, Unknown; identical to SEQ ID NO: 11569
  misc_feature (1)..( 3000): cDNA_ID_2706885_gDNA_ID_2214503_Annot_ID_133720 3000 nt of promoter + ATG

SEQ ID NO: 11583 - DNA, 3000 bp, Unknown
  misc_feature (1)..( 3000): cDNA_ID_2706915_gDNA_ID_2214504_Annot_ID_133722 3000 nt of promoter + ATG
agcgctatcagccaataaaagacgacagctgtaataagactcgagacgagggaatcgggacttcaatatccgtaacggccgtacgggttcactctcgcagacaccttagcatgtggcaccgtcggaggtcgggcacatcatcgaccgatcgaccgacgtcggagttgtgctcggtctaaacaacattggtgctatgtaatctctctatgttgtgcatttgtgctcggccttaaatgtctacaaaatgattcaaatcatgacatgattaccatggttaatggtttatacggtgaattaaatcttgacttggtttaactgttgttataccatttttcagtttaaaatgttctattatatgttgactactacgttagggccggccaaacagtcaagaatgcagtcagatgaagccaccgtttgtgactctttaagtttaacaatcaaatgcatttgaatagagaaaaatataaaacaagaccaattagctcgtagttttaaaattaaccgctggattatttttaccagctctgagatggtcaaaacaagggtagacagtgtcaatggaaacaaagaatgaaataataaacaaaaatataaagcatttgatattaaaatgtatctatcaagaaaaagtactagttagacatgaatatgtcaatagtttgtcaacttttcgcatagataaatctcattttctttttgttgtggagaagttcacaatgatgtggttggttccgaacccaagatatcttcacatctgtatgtggatggaaaagcatatagaggaacggtggctgtatgtgaaaagggcactctagttactttattcttctgatggtcaatatgtcccctaccgtgccatagaatataaattgaaattgagttgcaactagcaatgaggcactatatattatcctggattcaaaaatccgattggatttgtttttaaagtttaatgtttgaaatgttcagatccaatttaattaaaaagacaatgacattggtgtggagatggtgaaggcaaacaacaaacaaaaattggaaatagaactaaaagactagaggtgagctaaactaaaggttttcgtggtaaatttgggatggagttaatctaatttgtgatatgttttttttagcatgttaccatgcattatgtacattcttttagttaaaaaatgttgagttgaagttaattatttttttatagcttaatatttttttttggtttaacaattagcttaattttgttatttgataaagactaaaacacccctggatgctcacccaccacatgcccacaaacggagattgccaacccccgggggagatgacgacagacgagaggagagaacagatttggagcttttatagcttttatagctatattgttaaaaaaaaatcaataatataaattaaactgcatgcaaaatcaaactcttgtacatctagagtcttactagattaacgtgtaagaacttagaacttggaaaaatctatatggacaaaatagatcagtcttttttcgaacatcatcaaccacacgaaatacgctagctaacttttaaacctcttctgtatcaactatcaagagacaaacgatataaaaaaaaaacaattggtgtatttttgaattttcattgcacgcacgtgaacagcataattgcttgattggaaacaaacctttttagaattcattaatcagttttaggtgttttggaaaattaacgaactatagtggagattaattaattttatattagtcttttttagtacacaaatcgaagtttcctagattttttcaaagttgaaaataatattgataatatttatcaacaatgaatctacaaaaacataatttttttgccaaacaaataacaccgaaacaagattcattcactatttttggtttaaaaaaaaaaatcaaaattacactattatgaagccaatttttgtatgcaaaaaacctgtatgtatcaatttgtttgtattaaaaagtaagcatttatgtcttttttttataaataatagaaacacttactagatgaatagattttttggttttagaacagaatactataattgtatttatatagcttttttatattattcgatatagaaaagtgttataataggaaaaatgtaccatatactgtcaataacatatttgattctaaatataaatagaattgttttaaagaaatatgatcgtttataattaaatggtttttaatgtcttttcttggggcaaaaaacaaagcttctctttcgtccatatatttgcatcgtaaggggtgacgtatcactctctctttctctcaaatattattcttcaatctctttttggggaatcttcgagcaaattagtgagagaacccacccactttctttctcatatgagtacataagatcccttttgagttttcgtgttttgccaaaatctccaggtaaagcttctccctttttctctgttttctctgttttgttattctcccttttctccattgtagctttttcctgtaaagtgggattgatagttttgtttcatggatttcaaatttgtgttatttgactcgataccatcttaaatgcagagtcttttcgtgataataaaattatggattcgtttcaaagttttttttttttcgtatggaaaacacttgagctctctcaatcttgtagtcttgactcttgatgattcttctatgttctcgttgtgattgcttgtcactgttctatcttttatatatgattaaatgcaattttgcccctttttacgcgcgaatgtatttattatctttcgcactctgggtccatttcttgtcacttgagcacataatgattgatttatgactttttaaagttatgaaaatttattatttttgttgctatggttttttggaattagaagctcatttcaaagttgttgattttctttgcagggtagggaattggtgtggtagcttgtgatgcactgtgtttgagggaaaggaaaggataacg

SEQ ID NO: 11584 - DNA, 3000 bp, Unknown
  misc_feature (1)..( 3000): cDNA_ID_2706923_gDNA_ID_2214504_Annot_ID_133724 3000 nt of promoter + ATG
gaaacagctttccgtatagcccatccatggtggggagcaaacacttgagcataagacttagttgctggatccttcaaggagttatctcctctgcaaaagatatcaaactacatttcaatcttctaatcttgaccaaaaataaaagaaaactacaacaggactccattttttcatttacttcagtgtccatatttaaatcacacatcctacaaactggcacggctaatgcatttgatcaaaattttcacaagaactcaaataagagagagttcagaagaatcacttactcggaagctatgatctgttcaaagagaactttgaccatgtcaagaccacgcttaaccctcaaaaggtttctcgtatgactaccagctttccttacacaatctgcctcaatatctttgtccatcattaccactaatgtcgatatcgaactcgacgccctcacaagatcatcaacctatagtcacattcacaagttttaacatttcattttccaaaacattcatcctccagataaacaaacacaacatccatttccatcaaattagcaaaattcagtctgagtactacagaaactaaatcaattccaacatctcacaatatactcaatagtacatgaaagtgaacacaactagaaaaagattcggactttgattcaaatctactacataaacaaaccttggcaacatagtccatttccgcaaacttaaaagctattccaaggcaaccaaagagaggcgagaccagagagcaagcgtgagagaattgcgttacaggaacttccggattcggtgaattcacgatgattgctagttttttgaaagcggctgagatttttctcagtggcttatctgcttccgaatccgccatggaagatctctctccttctctctctctgtcgtcttctcctgattaacaagttttgttcttgtgtgattattccgattggtgttctgtgatttgccgcggaatctactttgctgcaagacgactcaaaaaggcggcgattcgctgatcactaattgtctttgtttggcgttcagatcattcctatccttcatctggatagtattatcctcaccgtgtgaatgaataaccgaatccaaccgaaataacctgtaggaataccgaaataatagaattgaatccgaaccaaattcggttttgtgcaattgaaccgaagaaacataaatacgtatgcttaaactatagatagtagttgggcaatagacttgtgttgaagctacttgaagaaaagatgatgatgatgatgaattatgaataatgttcaagaattaagatatgaagctttcattgggatactttagttaaaaagattatcatcatcaacaaatgtgatttttttcaaactttcatttatgttccactctggctatacatatttttgtttttcgattcttttcattgattaaaacaaggtaccaaaattataggtaggggataataatatttagtgggttatactaataattattgggtagaaggaatggcggatgcaattattttgattacttataaaagatagtgacattaattgattcttaggtggagcttattttaaaattaattgaagatttttatgagtaataatttaggataagtagaacacaaaaaatttaaatttttttaaaaaggaatctgttttcttgactttttgagcacatcattttatcgttggttaaataaataaaaacaatttcatcagttttcgaaaaacgtccacttgccatttaactctgcctttacggtttccgccaatttaaaattctctaaattttcaaacttttctctctcaccatcaaattctctaatttattctctttttataatgttcctctcttttcttctggataattacttttcattatagtccctatactactataattatccacaactgtctcatacttttataaccgttttatcattttcaccgggtaaacttagaaacaaaattgagtttccgacatcgcatgataattttaaatgtaaggtacttgcatggaactttaaaaaataagagggtgaaaaacataaattaaagtataatataggggtgtatattttgggttaaacatattacacaacacactcttccgctacacactgtttacactgttccttacttttttttctttttctttcgccaacatctctctctccagctattttccctcaatttttaatcgtcgttttcacttttgttcgattccattcaaaaaagcttcaatcagtgagctgcgttttttattctctgcttcatccagatctacatttctctgtttcagcctctattgctctgtttaacaagttctcaacggccggaatcgtcgccgggattctcgccaccggagttattgtgaaacggtgaaaatgggtttttgattttactggttacttcattgttcagtgcagtaagtatttattttccttgtcctgtcttactattggtttatttccttaaatgaagaaactttattttccccgaatttcttcattgctaaaaactctcactttctgcaatttcgtctgcttgtttcactcacaagaatttcacatttttttcaaaaataaacactgcttaatgcggattggttgttcacaaaaggaccaaaaaatcgtagaaggtaaccgacagtgttagctgaaagaagccagaaactctgtttgtctgtgttcttgaatttagacaatctactaaagtccgtactttttttattagtaaatcctgttatgaccggacccaataaagtagagtaattgttacatgcgcgttccattccaaacaatgtgcgtgggccacttggtcatttgattctgtatttttacttcggagaaatttggatacaacaaataaagtagagagattgtgtataatgaataaagtttccttttttttgttaatgatttgatcatgcgtctcttctgatttgagtttcttttgtatctgcataagtttggattgatttcactatg

SEQ ID NO: 11585 - DNA, 3000 bp, Unknown
  misc_feature (1)..( 3000): cDNA_ID_1807078_gDNA_ID_2214504_Annot_ID_133726 3000 nt of promoter + ATG
tgtctattttaatgaaaattttaaatgttatcgtattctactgagaaagccaccattttggtaaaagactgtagcagaaaaaaatggttaaaaaaagtttttagaaaaacggtggaagtgaccattttggtaaaacggtcgcaataacatttccataattgtaggaaataagtttatcaagttgctgcgcgcctctcctttagctttagtaaagatgaataaataattcataggatatcgaaaaaacgatactgctttaataattaatattattgtactaaacatttaatcataattttgtttcttctcataattttgtttcttcccgtgtatatgcatcgggaacaatacatttccttcccatttcactagaacttttgaaggcaccaccaagtttctggattttggaaaaaccactgatgatggtatattacataaggcaacatcaactttgtagcctcttccctccatggctctatcaccataagaaaactttaaggtcatgtctttggcttgcacaatccattgacaatagattactatatatgaaggagcattattaagcaatagtatgttattgacttgaatagtttgtttatctataaaatatataataacaaaaatcagaagtgaaaactataatatctaaactactcttccgttccattttaaatgatattttaatagtattatgatatatcatatattaatggtattaaataaaaataataattatgatatatcatatattaatggtattcttccgttgagggaacataagttatgataaaaaaaaattagttatcgtgtaatctcctagatccataacatcataatttaccgtaatttttatttattaattccatgaaatttagtcttgatatcaactcatgtagcaagttacattttgattcttgaattaatttcggtgtttaaagcatgtatgcatgcattatacggtctcgcagaagatattagatgtgttctatctgctatgcctttaggttactaatctaaaccaaaaataccaaataagcaaataaaccacaaagcagaatacaagcaaccaattgtataactaaattgaacacatcttttgacgacattccctctccgccacaacatttgacatgtcgtttggcccataagaaactcgccactagagccaagatgaggaggacaccaacaaccacggtggctataataaagtaaccaatattcttcatattgctcttcgaattcactgcaccaaaaatttcttctttttaactttgttttgtgtcttcttcttctccggtataggtgatgtttatatacacgtcttgtcaacagaaaagtttaacatttttggaaaatatatatttacattttttcactaaggaacattggaagttttacattttacggcactttcttgatcctcataccatcatatatgtacacatgtatttagtgaatcaaaactattaaactattttaacatttttcttctaaaattaataattaatttctaaatttccttaattattgtacaaaaaattaaaagcaataattttttaaaaattttaaatttcattaattatatgatgaagtttataatttgttttatttttttttttaattacaagatatatatagtttctttatgtttaactttttttatatttaatattttcttaattcaaaacaaaaaaaaatatattttaatttttagtttatttatttatttataagatactaatagtttctttatatttatcgtctttacttttcaatcctttttaatttttatttttcaaattataagagacataactttttaatatttatcttctttactttttaatcataaatattttatgataaattaattaaattatgtattggttgttttatgaagtctaggtggcaagctattagatgctaacgtatcaagctgtgagaaagagttaagctcctttcatatatataatacaactaaaaatttgaatcgtcaaagaaaaatacctttaaaacagaaattttctgattttaaaagtgcaaaaaggttagtaatgccgaattttaacggaggctattttgtccaaaaaagattgttaactagcgatgactatgaggcttgagattcttcaccaataaatgccgactcgcttggattagggatatatttcatcaagatacgtgattactggtgcccatgcatttacatagtaactttacattgttaaatttaacattttgtcactaggtaatcttacctaagaaaattaaaaattaaaaatattatatttttttgttgaataagtaacacaacttgtcatgatgggactatatcattaacacaacttgaagcaccaactactttaattaatttatagcctcttccctccatggctctatcaccataagaaaactttaaggtcatgtctttggcttgcacaatccattgacaatagtattactatatatgaaggagcattattaagcaatagtatgttattgagttgttttttttttattttaatgaatgacttgaatagtttgtttatctgtacaaaatatcataacaaaaatcagaagtcgaaactataatatctaaactactcttccgttccattttaaatgatgttttaagaaaataataattatgatatatcatatattaatggtattctttcgttaagagggaacataagttataatacatatatcatgtgatattgatgccttgatggtattgtagagttagatatatatatatatatatataatatttccacagaataatacacaaacaaaacaaactaattaaactcttttaaaaactaaaaaggagcataaatctattttcttataattatgtgagaaacggatattattatttatcacttatttttttttggtgagaactatgccttggctttggctagtgctttaaatatggcctttaatgagacaatctcatttgtctatctttttcactaacaaagaacaaaaatg

SEQ ID NO: 11586 - DNA, 3000 bp, Unknown
  misc_feature (1)..( 3000): cDNA_ID_2706931_gDNA_ID_2214504_Annot_ID_133727 3000 nt of promoter + ATG
atggcggaaaatgacaccaacaagaagaaagaaaaagaaaaaagcattgtaaattttgggaaatcaagcaatgtacaatgtagtgtgtgacatgggaacaagagtaagtggacttggcccagtggggtactctcttgctccatgcctcttgctaaaataaaaagttggcacacaaataaaaatggaatatataattgataaagccaattattattttgtaaagattgatattgtcaaatttaaaggtttgacattcttttttctccagcaaccaaactattcactctatttgtagtttttttttccttatcataaaagcatccaaagcgttttaaaaaaatcattgcataatgtataatgtgttatgggtgaacagtcaaaatgcaaattgctaaacaatttagtacctaggctttatatttgaatgagtaaatgctgtgtgtttaatgtttatcaatgcattagtggtagattaaacatgggttgagacttgagagcatatatctccaccataaatattcagtcgtaagtccaaatattttcttgaaaacaacatttgaaatgtcataataacaagtaccatttggaattctattacaaaagagttaatccatataagtcatatagattttgattggtaaattggtaacacgataaaaaaaatgaatgaaaacctactttcacaatcttttacttgtcagataattttgaaaacttttttctacaacttcttttttcatttgctttgattatgcgatgatattaacaaatgaaggatgcgactaaaccttcacaacaatgaaaaccaaaaaaaaatccatttaccatagttcaaacttcaaacacggtatataaatggtgaacatgcaggagttaataatccctcgtgatgaggaaaacaaaactcaaaactcaaaagaaaaatgttttgagtggcgcgagaagaaacctcgtaatattgtgtagttaaataatgttaagtggtgttttatgaaaagaatacaacttgaaaagcatttattttgcgtgtattcgatggagaaaagtatttagtagttgtagccttttattgaaataaaaatggttaattgggtgtcgaagaaaaggatatagggagctacgtgtggtggtatctgccatgtagaaaatcgaagcgcatgcacaaagttggactcatgatgagacttcacatgaccaccttcatttattcctcctactcctctctctctctatgtacagtattagtattaaattacgtatataaaaaaaaaaaaaaaatattacgtatatataaaaaaaaaaaaatattacgtatttattttttgtcctagcgtatagacacgtagaccgtagttataagaagttagtcgtttgtccgagcattgattttgtacaactcttacagaacctaaaacagactgtacttaccaatgccaaacttgtctgtcttctctttctatttatttcttgactcaaatttgaatcgaatatattcataatctgaccagaaaaaaccaaaactctaataaacaaaaaagctttgaaactaacaaagcgaagccaaatttcataaaagaaagtttaaacacacaaaaagtcctaatttgaggcattttttgacaggactaataactttatatttcaaaaaaataaagtccctttcacgcttctcacgcgctcggtgagtgacattcccacaccattttcctcatgcatgcaacatttatcatcatcattatcataaacctaatgcatacaaagatgtacgtagatatacacatgatgatatattgtacatgcaacatacatcagcatcagcatatgatgaacatcagaaagaaggaaagagaaagaaacttatgtgatgtccttctcacagagctaaagacaacagcatttttttttccctaagttagcaaaatacccatttcgtcaaatatccgtttcttctgacaacaatttcttcgaataaaacataacaatattaaaaagaaaaggtaaagaaaaaaacaaagattggcctgtcttctctgcctccatattaagttagttattttatatgtatttttatcattactgttgtgggtagagtaaaaaaaacagatgggttttgcagagactgttttgcgtgtgttggcttttctcctttattgtctttccccttttttatcctgcaccttattttaattatttcttagctaattttttattgctacaaatactagaataattttattttatttttgcatcacaagttataaccagaagaaacttatgtagtaattagtacacataaaactcaattgcattttctttttacatttttttttttttttttttggacaaatcattttctttttactaaagtaaatgtttttagtgaacacattgagtacaaatatggacacaaagtataaattattatgagattttgcagtagatattaatttattttagctatgtaaataaaaccgtaaaagtaaaaagcttttatcaaattcaacccacctggcgtttcagttttcattttttttttacctttatgctgtttttatgttcttgcaagtctttctcgcgccacacaaaagaaaagtaatttcttttagagttatgttttattttttttggaccatgtcttaaaaggatctcgagattggcgtctgagataaagacctctactttgcttcctttatcttgctcctcttatctcttcgcttctccttcctctcctctctcgccattgccctctggcgttttctgtcttgagctaaagaaataacaaataaaccgaaaaaaataaaaatagaaacttttttttttgtttatttgttctttctccaaaactccttttttttctcaccattatctcatgaacgtgagtggaggctctctgagtagagagagcctacccttgaaaataacctagggatttctccaattttcaagctttacccattcaaaagaatcgtccttttttcctatttctgactttgagctatg

SEQ ID NO: 11587 - DNA, 3000 bp, Unknown
  misc_feature (1)..( 3000): cDNA_ID_2706935_gDNA_ID_2214504_Annot_ID_133728 3000 nt of promoter + ATG
caatgtacatgtgtatgtatattatgtgtttggctctatcttaaactatatcattatttcggctaacatttgttgacgagacttattttttcatgcaaagatgttcacatttatatataatataagtagcctgttcaaatgggtcaagctcaatccaacaaattcagtttttcatggatttatttattgttttctgggttggaaagagcttattcattcgttaattttagttcaatacttcaattcattagggttattcatacttatatgactaaaataagggaattataatatttcttttatggatatactagaatgtgttgctaagacaataataattggaaagaattcattgagttgatctcataatcattaaggtttctacctaattcaaaatcattgtttagtccaatccaactaatccgatgattaaattaatccggattctttttaaagaactaataaaagatcggagcctctgttttagaagtcttaactttttggtctattacttttcatagctttattcttcggtcaagatgtcattcttggaacaagaaaaatgtttatatgactaatatggttgtgacattcgattaattaattatagatttcggatgacattttaattttttagtatttctattctagatatatttttggtaataaagctagatttgacaatatgattgatgttaaatttaagatttatatgacaactataacaagaggtatttctaaatctaagttttacttaatttttctctataatctatttgaatcaatatacttttgaacaccccttcgataaaaattagtatatttatcttcacaattataaaagaatctcatccttatctttctatcaaatttatgaatttggtctcatctctatctttttcttttgcttttactttgtgtaagtggtattttttttttttttttgtatcatggattaaactagattatgacggtttgatcttgatggttggggtttaagtcttattaactaaaatcgttcttttgaggcgatctttgtaggaaaaaccaaactaggatagatttgtgctcaaatgaactaacatagaaatctaaaactgaaaataagagacctcattaagcttattgcacaaaacaaaagtatgaggggaaaagatttagattgtccccaagaatagaatgactttagttttgatttcaaagaaggggatagactatggagttaagtgacaactctctacgttagtctcactgttctcactacatgattatatataagagactacttgctcatctacttaacctaattacatgaacttgtgttgggtttttccaatatcatgaacttataatctttggttttgttaggaatgctcttttaatctcagtgctaaattatgcttgatatttataactttttttttttttttttatatttataactttatacgtgctgacatgcacttgaggactttgaggtgtcgaatcaagaatcatgatgataaggagtttagggatgaaagcagactatataatcgtataggtgattaagtaagcatggttatttaatgactgctcagtcacttcatttacttgtgtattaatcatgtttactagttagttttcgtccatttccaaacgctaatttgttgttcaatgactgctcactcacttcatttacgttaaacgtttcttacttgtcgaatgcatacttacttgattttgacctatagttacttgtcgaatactgtgacctcgtataagtgatcaaaggcgttacaacttttggtggtcttttacacataagtgatagttttcaattatttttcgagtcaaagcaattagcaaatacttttttaggaaagttttttttttctttttttttttttgggcaaaatttttaggaaacttataaataataagttacttattatggaatcatgtactgtttttttctgaagtcactcatcactcgttcgtttaagtaggttttgttttgtcactgaaccgaagtcaaaccaatctaaataccaaagctggtttaatgtctctgaaattcgaacaaaaccaaaagcgaacggaatcttcggtttcgataccgacgcttctttgatgactcacaacgaaagatatatttgagggcaacgggcacaagtagggtcaggcaaaactagtggagttgaacaatcgataacatattcgggcagcttttcagatctgcccgtcttttcctacaatctcgatcgttgtttcgacacttgtcctcattgtattagcctccttttcactgttgcacatcgtgtcgtttaccactcctacacattttcgtggttctgagttgacctatcactacagtgtgagtggaaaacatgaaaacggcacgatgttaatgaatattagagaaggacggaggctatgaactgaaaaaacgacatggtgtgtccctcttgggtctagccgtttaggcctctgttagtcatttcgtctcttccttagttagaacaaaaaaggagagacctttaacaattttctgagggtaagatccagagattgattgaatcagcttactattttatataattcaggtaaattcttatgtttctttccctccagattttgaaagtttctagcttttgttgttctgtatctactcgtttccgggaaaatgcttttgctatgtatgttgagatgtgatagtagaggttaagattggtttttctctgttctgggtttgctttagattctagggttgtgattgaattctgattttggggttttggtttagtgaattccgattctcaaactcttggctttggtactgacttttgtgctttgttgttgtttcagtttgttgttcctcagacttgtaactaggacagtcttctcatgaatcatgacttcttcagtacatgagctctctggttttgtctctctttctgaccattttcattatgctctcgttttattgttgtatcttcctaactgattcttggtggtatg

SEQ ID NO: 11588 - DNA, 3000 bp, Unknown
  misc_feature (1)..( 3000): cDNA_ID_2706939_gDNA_ID_2214504_Annot_ID_133729 3000 nt of promoter + ATG
accctcagaaaattgttaaaggtctctccttttttgttctaactaaggaagagacgaaatgactaacagaggcctaaacggctagacccaagagggacacaccatgtcgttttttcagttcatagcctccgtccttctctaatattcattaacatcgtgccgttttcatgttttccactcacactgtagtgataggtcaactcagaaccacgaaaatgtgtaggagtggtaaacgacacgatgtgcaacagtgaaaaggaggctaatacaatgaggacaagtgtcgaaacaacgatcgagattgtaggaaaagacgggcagatctgaaaagctgcccgaatatgttatcgattgttcaactccactagttttgcctgaccctacttgtgcccgttgccctcaaatatatctttcgttgtgagtcatcaaagaagcgtcggtatcgaaaccgaagattccgttcgcttttggttttgttcgaatttcagagacattaaaccagctttggtatttagattggtttgacttcggttcagtgacaaaacaaaacctacttaaacgaacgagtgatgagtgacttcagaaaaaaacagtacatgattccataataagtaacttattatttataagtttcctaaaaattttgcccaaaaaaaaaaaaagaaaaaaaaaactttcctaaaaaagtatttgctaattgctttgactcgaaaaataattgaaaactatcacttatgtgtaaaagaccaccaaaagttgtaacgcctttgatcacttatacgaggtcacagtattcgacaagtaactataggtcaaaatcaagtaagtatgcattcgacaagtaagaaacgtttaacgtaaatgaagtgagtgagcagtcattgaacaacaaattagcgtttggaaatggacgaaaactaactagtaaacatgattaatacacaagtaaatgaagtgactgagcagtcattaaataaccatgcttacttaatcacctatacgattatatagtctgctttcatccctaaactccttatcatcatgattcttgattcgacacctcaaagtcctcaagtgcatgtcagcacgtataaagttataaatataaaaaaaaaaaaaaaaagttataaatatcaagcataatttagcactgagattaaaagagcattcctaacaaaaccaaagattataagttcatgatattggaaaaacccaacacaagttcatgtaattaggttaagtagatgagcaagtagtctcttatatataatcatgtagtgagaacagtgagactaacgtagagagttgtcacttaactccatagtctatccccttctttgaaatcaaaactaaagtcattctattcttggggacaatctaaatcttttcccctcatacttttgttttgtgcaataagcttaatgaggtctcttattttcagttttagatttctatgttagttcatttgagcacaaatctatcctagtttggtttttcctacaaagatcgcctcaaaagaacgattttagttaataagacttaaaccccaaccatcaagatcaaaccgtcataatctagtttaatccatgatacaaaaaaaaaaaaaaaataccacttacacaaagtaaaagcaaaagaaaaagatagagatgagaccaaattcataaatttgatagaaagataaggatgagattcttttataattgtgaagataaatatactaatttttatcgaaggggtgttcaaaagtatattgattcaaatagattatagagaaaaattaagtaaaacttagatttagaaatacctcttgttatagttgtcatataaatcttaaatttaacatcaatcatattgtcaaatctagctttattaccaaaaatatatctagaatagaaatactaaaaaattaaaatgtcatccgaaatctataattaattaatcgaatgtcacaaccatattagtcatataaacatttttcttgttccaagaatgacatcttgaccgaagaataaagctatgaaaagtaatagaccaaaaagttaagacttctaaaacagaggctccgatcttttattagttctttaaaaagaatccggattaatttaatcatcggattagttggattggactaaacaatgattttgaattaggtagaaaccttaatgattatgagatcaactcaatgaattctttccaattattattgtcttagcaacacattctagtatatccataaaagaaatattataattcccttattttagtcatataagtatgaataaccctaatgaattgaagtattgaactaaaattaacgaatgaataagctctttccaacccagaaaacaataaataaatccatgaaaaactgaatttgttggattgagcttgacccatttgaacaggctacttatattatatataaatgtgaacatctttgcatgaaaaaataagtctcgtcaacaaatgttagccgaaataatgatatagtttaagatagagccaaacacataatatacatacacatgtacattgtattttctcaaaaaggtataatgacaaaagacaaaattaataggggtaatatcgtaaattcaagggtaaaggagctgggcataagctttgttctcgagtctcccgctccgctcaggtgtagcgtagcgcctcttaaactttctctccctttactatgcgttttctttggaaaccctaaaactctgcaagaacaagaagaaagtctcatccttgaaatcgacgctgtgattagctcttcttaaggtcaattcgtcactttacctcgacttgtaagtttgcttctccttttatttggtcatggtcgttagagttttcttataggatttgtaatctcaattcattagctgggatagcttaattaaggagtaaattttgttgtaaagttttgatttttattgaacactgttgtttctctcacagggttattgtgagaaaagagtggtggaattagttaataacctt

SEQ ID NO: 11589 - DNA, 3000 bp, Unknown
  misc_feature (1)..( 3000): cDNA_ID_2706945_gDNA_ID_2214504_Annot_ID_133731 3000 nt of promoter + ATG
ccctgagcaaccattttgcagaccttttactgattttgaaaaaaaatgaaacagacgatcaagagaagaatatgatccaactatgtctatattgatcagaaacgcatagtaacaaacaccagaggtccttttcaacaggtcgtataggtaaatttacagatcctcttcactatcataaccagattagaggcctgaatcttaagcattacttcttaaatgactaagaaaacgacaggggtctactgtttggcaagataaccaacctaattgctcttaatattaataccaaactcacttatccaattatatatactcgataaattagtcccaaaaatcgaaattcctagcacaaaaagcaagtattagatgaaagaaaaatactaatcatttaaaaacatagaatgtatgaacagagctccctctcactcatttccctccaggacccaccaccaaatatatatacaagtaaactacccaaataaatcaactcacaagttaacatcaaggaaacaaaaaaacacacagttcctaattgagttgagacacataatctattaaagagaaaaatggcttaaccaaaagttcttttcaattgaatcattcactattgttgcagtgagaaacaatgaggctcaaaaaataaattcacatgttttcgagacaccttcctttctagcaacaattgagcattttttatttagccttcaataacaatgcgtaaacaaagttttaagatagttatgattcgttttttgagagtcaataacaaaaattatccgatctaaaccactaaacatcaaatcaatggaaatctcaatgtttccagaaaaatgaaatctatctagagaggaaaggaaacaaatacggattcaagagaatagattcgaatagaaacgaacctgatggatctcagcgactcgagacggaagagagaatcgccgagattgtgaatgaatcgccccggccctgttttggaggtttgcgttggtgtgtgtgtgagaattagatagagaaaacaaggtcggtgtaatatatcttctagatggaatctggaccgttgattgtgagagatgccttagatctcggaggccaacgaatcgtcaatatattcaaaaaaaacaacggctgtgccaggttgttgctcttttggctctcttcatacattagctgttcatagcctcgtcttgtcacttgtcgtcgcacttataggattcccaattttgtacgttgccacaaataaacaacattacactatatatattacaaattcaacttatatggaaaagaaaaaaaatactaggatactcatacactgtgtggacgattacattttagacttcgaattattggtcttctgccaacaatgtcaaaagattttattgactgctttaatcattttccatagagcaatgagaaagtcaaggattaaagtcggtctcttcttgagtaaatattaaattcgaagattgtggcagctagataataatcatactttcgattttcttattgagtaaaataaaatttgtaaatgattaattcattatgcttatttttaggattttgatgcggcctcttatgatgtagaatcattcactaccagtacacgtgaccagtgtcaagcatagtgtttgattataattattttatttgctttagtactatagaatgtttctttaatgcttaaaatccacgattaatatagctcactcgacgacgctggtgtgatgacaattgattagtctttgtcttttatgtctaacttagagatttgacaacggagcttaaatagtcagcataatgaaacagaagatagaaatgaaagtagtagtgatacggttaatcaaatgtttggttagcactttttccagaaaaatgggttggttccatttcacaaatgtaaaagaagtaagatattggttatatcagcctgatgttgagataagctttcttgcattggtacacagaagaaggaatggacgagatggagtttaatgaagcagagagtaacatgaacgatcttgtggctgagtatcagcaatatcaagatgctacagctgatgaagaggagtataaagaggagatggatgaagatgctgacctcgatgcttgagatttttagatctttaaatggagttgttttcttttcgtatccgctggctttgattgctcttttgtctgttgttttgggtgtaaaaattgtaatgagaaactaatttgtatgtgtgttggccctaatcttttctcgttttggtttatatatatctggtttggtcttatttagttatggttatgtgagcaatcaaagtagaccaattaaccaaaaataatgtctatagttcacttacttaaattaagtaaaaatttgtgtttgtcacacgacagaaacatagaaaacaaaatttgatgtaatgacgacaatagtgaagaaaaaaaaagatggaattaaagaaataggaaaaagtaagtgtgaaccctaaacgtctcctattatttatcgattatcgccgtctttcatcagaatctgctccttctctatttttcttctccaagaaaaaaccatagcgaaggagtaaaaaacgaaggccggaattatcagaacgggacagtgacaagggtttccctgagctgacggaccctttcaattattcatcctcgtgagttctctcaccgtcgtattttgtgtctttatactagttttctcttgtaaaatctgtaatcaatggagattttacttggttacatcgattcttatagctctcctttccctattttcgcagctgatagtctatatagcttcaatacttaacatttagtctaaattcagagacttttccagatattgtttctagtgagtttaaattgagtgtttatggtgtcttgagtataagttaatgttgaaagttttgagatttcttaatacttctcttgtccatcaggaaagttccacactttcggcaacttgaagtagcagcacgatttacattaagtccagagaggatg

SEQ ID NO: 11590 - DNA, 3000 bp, Unknown
  misc_feature (1)..( 3000): cDNA_ID_3023131_gDNA_ID_2214504_Annot_ID_184080 3000 nt of promoter + ATG
aacctggcacagccgttgttttttttgaatatattgacgattcgttggcctccgagatctaaggcatctctcacaatcaacggtccagattccatctagaagatatattacaccgaccttgttttctctatctaattctcacacacacaccaacgcaaacctccaaaacagggccggggcgattcattcacaatctcggcgattctctcttccgtctcgagtcgctgagatccatcaggttcgtttctattcgaatctattctcttgaatccgtatttgtttcctttcctctctagatagatttcatttttctggaaacattgagatttccattgatttgatgtttagtggtttagatcggataatttttgttattgactctcaaaaaacgaatcataactatcttaaaactttgtttacgcattgttattgaaggctaaataaaaaatgctcaattgttgctagaaaggaaggtgtctcgaaaacatgtgaatttattttttgagcctcattgtttctcactgcaacaatagtgaatgattcaattgaaaagaacttttggttaagccatttttctctttaatagattatgtgtctcaactcaattaggaactgtgtgtttttttgtttccttgatgttaacttgtgagttgatttatttgggtagtttacttgtatatatatttggtggtgggtcctggagggaaatgagtgagagggagctctgttcatacattctatgtttttaaatgattagtatttttctttcatctaatacttgctttttgtgctaggaatttcgatttttgggactaatttatcgagtatatataattggataagtgagtttggtattaatattaagagcaattaggttggttatcttgccaaacagtagacccctgtcgttttcttagtcatttaagaagtaatgcttaagattcaggcctctaatctggttatgatagtgaagaggatctgtaaatttacctatacgacctgttgaaaaggacctctggtgtttgttactatgcgtttctgatcaatatagacatagttggatcatattcttctcttgatcgtctgtttcattttttttcaaaatcagtaaaaggtctgcaaaatggttgctcagggattcactgtggatcttaaaaagccccttgtatttcaggtaattactgtttcccagggttttaaatagtttatgtcaacattttccttgagaccatagtcacccaagattgtcttcgtttctttcttagagctaatcaaagtaacgctctctctttaacccctcctgccattgctttggatgttttacaggttggtcatcttggagaagattatgaggaatgggttcaccaacctatcgcgaccaaggaaggccctcggttttttcagagtgacttttgggaggtatatattttattttcatcttttctcattctcaatttccaatatcaataataagcaatgtcaatgagactctgatctccattctctgacgtatttgcaatgaaacagttcttgacacttacagtttggtgggcagttcctgtcatttggttgccagttgtagtctggtgcatatcaaggtcagtaagtatgggatgttcacttccagaaatcgtcccaattgttgtcatgggaatattcatctggacattttttgaatacgttcttcaccggttcgttttccacataaaaacgaagagttactggttagtcactttctccctctctctgtgttacatttcatagagacagtactctcctatgaatcctcctcaaacagacaaattcctggaaacatgacttcggtcagatgctaatgattttgtgaaaccactccaggggaaacactgcacactatcttattcacggatgccatcataagcacccgatggaccaccttcggctcgtctttcctcctactgcaacagcgattttatgctttccggtatttatctacattaacccaccattctacatgttttcagcgccaaccctaaaccgttttcttttcttgtgtcctagttctggaacattgcgaaggctatctcaactccttcaaccgcacctgcattgtttggtggaggcatgctcggatatgtgatgtacgatgtcactcattattaccttcaccatgcccaacctactagaccagtgaccaaaaatctcaaggtaaaacaatgtcaagtctcaaaacctgggactttcttttcttttgtatccggattgcataaagagagcttatttgttatgttttttcttatgattctgcagaagtaccatttgaatcatcacttcaggattcaggacaaaggatttggtataacttcgtcgttatgggacatagtctttgggacacttcccaccacaaaagcccccagaaaagagcaatagtagtaaaaggcaaaaactaaaaagatgtttgtaatacatttaatttaatcttaagttattaatcatccttctgaattttgagatgtttaatctgaggtttcatttggatcactgtcttttgtagtttgtaaatcaatacttcacaatcctaatataatatttttctgcgaaagcaataaaaaatctactaacatgaacatctgtgtcttgactttggccatatatatatttcttgaattgacagacattttgcaataaatatccgaagtttaaaaaagacaaccaaatatgggaagagaaactaaaaattaaaaaaaatcgttattgggctgggcctgggtaaagaaataaaatcaacactcactcaccgacccgcccggaaatccaaatcgctcgaggtctaatctgactcctcctcgattccttcttctcaaactgactgcactcttccttctttcttctgctcactgaaaattagggtttagggtttttgattttcgttctctattagtttctccccctcactctcatggcgatgaattttcaatttatgtgagattttattccacaatcggaataattttcctggca

SEQ ID NO: 11591 - DNA, 3000 bp, Unknown
  misc_feature (1)..( 3000): cDNA_ID_3040459_gDNA_ID_2214504_Annot_ID_184078 3000 nt of promoter + ATG
aaataagctctctttatgcaatccggatacaaaagaaaagaaagtcccaggttttgagacttgacattgttttaccttgagatttttggtcactggtctagtaggttgggcatggtgaaggtaataatgagtgacatcgtacatcacatatccgagcatgcctccaccaaacaatgcaggtgcggttgaaggagttgagatagccttcgcaatgttccagaactaggacacaagaaaagaaaacggtttagggttggcgctgaaaacatgtagaatggtgggttaatgtagataaataccggaaagcataaaatcgctgttgcagtaggaggaaagacgagccgaaggtggtccatcgggtgcttatgatggcatccgtgaataagatagtgtgcagtgtttcccctggagtggtttcacaaaatcattagcatctgaccgaagtcatgtttccaggaatttgtctgtttgaggaggattcataggagagtactgtctctatgaaatgtaacacagagagagggagaaagtgactaaccagtaactcttcgtttttatgtggaaaacgaaccggtgaagaacgtattcaaaaaatgtccagatgaatattcccatgacaacaattgggacgatttctggaagtgaacatcccatacttactgaccttgatatgcaccagactacaactggcaaccaaatgacaggaactgcccaccaaactgtaagtgtcaagaactgtttcattgcaaatacgtcagagaatggagatcagagtctcattgacattgcttattattgatattggaaattgagaatgagaaaagatgaaaataaaatatatacctcccaaaagtcactctgaaaaaaccgagggccttccttggtcgcgataggttggtgaacccattcctcataatcttctccaagatgaccaacctgtaaaacatccaaagcaatggcaggaggggttaaagagagagcgttactttgattagctctaagaaagaaacgaagacaatcttgggtgactatggtctcaaggaaaatgttgacataaactatttaaaaccctgggaaacagtaattacctgaaatacaaggggctttttaagatccacagtgaatccctgagcaaccattttgcagaccttttactgattttgaaaaaaaatgaaacagacgatcaagagaagaatatgatccaactatgtctatattgatcagaaacgcatagtaacaaacaccagaggtccttttcaacaggtcgtataggtaaatttacagatcctcttcactatcataaccagattagaggcctgaatcttaagcattacttcttaaatgactaagaaaacgacaggggtctactgtttggcaagataaccaacctaattgctcttaatattaataccaaactcacttatccaattatatatactcgataaattagtcccaaaaatcgaaattcctagcacaaaaagcaagtattagatgaaagaaaaatactaatcatttaaaaacatagaatgtatgaacagagctccctctcactcatttccctccaggacccaccaccaaatatatatacaagtaaactacccaaataaatcaactcacaagttaacatcaaggaaacaaaaaaacacacagttcctaattgagttgagacacataatctattaaagagaaaaatggcttaaccaaaagttcttttcaattgaatcattcactattgttgcagtgagaaacaatgaggctcaaaaaataaattcacatgttttcgagacaccttcctttctagcaacaattgagcattttttatttagccttcaataacaatgcgtaaacaaagttttaagatagttatgattcgttttttgagagtcaataacaaaaattatccgatctaaaccactaaacatcaaatcaatggaaatctcaatgtttccagaaaaatgaaatctatctagagaggaaaggaaacaaatacggattcaagagaatagattcgaatagaaacgaacctgatggatctcagcgactcgagacggaagagagaatcgccgagattgtgaatgaatcgccccggccctgttttggaggtttgcgttggtgtgtgtgtgagaattagatagagaaaacaaggtcggtgtaatatatcttctagatggaatctggaccgttgattgtgagagatgccttagatctcggaggccaacgaatcgtcaatatattcaaaaaaaacaacggctgtgccaggttgttgctcttttggctctcttcatacattagctgttcatagcctcgtcttgtcacttgtcgtcgcacttataggattcccaattttgtacgttgccacaaataaacaacattacactatatatattacaaattcaacttatatggaaaagaaaaaaaatactaggatactcatacactgtgtggacgattacattttagacttcgaattattggtcttctgccaacaatgtcaaaagattttattgactgctttaatcattttccatagagcaatgagaaagtcaaggattaaagtcggtctcttcttgagtaaatattaaattcgaagattgtggcagctagataataatcatactttcgattttcttattgagtaaaataaaatttgtaaatgattaattcattatgcttatttttaggattttgatgcggcctcttatgatgtagaatcattcactaccagtacacgtgaccagtgtcaagcatagtgtttgattataattattttatttgctttagtactatagaatgtttctttaatgcttaaaatccacgattaatatagctcactcgacgacgctggtgtgatgacaattgattagtctttgtcttttatgtctaacttagagatttgacaacggagcttaaatagtcagcataatgaaacagaagatagaaatgaaagtagtagtgatacggttaatcaaatgtttggttagcactttttccagaaaaatg

SEQ ID NO: 11592 - DNA, 3000 bp, Unknown
  misc_feature (1)..( 3000): cDNA_ID_3040475_gDNA_ID_2214504_Annot_ID_184074 3000 nt of promoter + ATG
gggagactcgagaacaaagcttatgcccagctcctttacccttgaatttacgatattacccctattaattttgtcttttgtcattatacctttttgagaaaatacaatgtacatgtgtatgtatattatgtgtttggctctatcttaaactatatcattatttcggctaacatttgttgacgagacttattttttcatgcaaagatgttcacatttatatataatataagtagcctgttcaaatgggtcaagctcaatccaacaaattcagtttttcatggatttatttattgttttctgggttggaaagagcttattcattcgttaattttagttcaatacttcaattcattagggttattcatacttatatgactaaaataagggaattataatatttcttttatggatatactagaatgtgttgctaagacaataataattggaaagaattcattgagttgatctcataatcattaaggtttctacctaattcaaaatcattgtttagtccaatccaactaatccgatgattaaattaatccggattctttttaaagaactaataaaagatcggagcctctgttttagaagtcttaactttttggtctattacttttcatagctttattcttcggtcaagatgtcattcttggaacaagaaaaatgtttatatgactaatatggttgtgacattcgattaattaattatagatttcggatgacattttaattttttagtatttctattctagatatatttttggtaataaagctagatttgacaatatgattgatgttaaatttaagatttatatgacaactataacaagaggtatttctaaatctaagttttacttaatttttctctataatctatttgaatcaatatacttttgaacaccccttcgataaaaattagtatatttatcttcacaattataaaagaatctcatccttatctttctatcaaatttatgaatttggtctcatctctatctttttcttttgcttttactttgtgtaagtggtattttttttttttttttgtatcatggattaaactagattatgacggtttgatcttgatggttggggtttaagtcttattaactaaaatcgttcttttgaggcgatctttgtaggaaaaaccaaactaggatagatttgtgctcaaatgaactaacatagaaatctaaaactgaaaataagagacctcattaagcttattgcacaaaacaaaagtatgaggggaaaagatttagattgtccccaagaatagaatgactttagttttgatttcaaagaaggggatagactatggagttaagtgacaactctctacgttagtctcactgttctcactacatgattatatataagagactacttgctcatctacttaacctaattacatgaacttgtgttgggtttttccaatatcatgaacttataatctttggttttgttaggaatgctcttttaatctcagtgctaaattatgcttgatatttataactttttttttttttttttatatttataactttatacgtgctgacatgcacttgaggactttgaggtgtcgaatcaagaatcatgatgataaggagtttagggatgaaagcagactatataatcgtataggtgattaagtaagcatggttatttaatgactgctcagtcacttcatttacttgtgtattaatcatgtttactagttagttttcgtccatttccaaacgctaatttgttgttcaatgactgctcactcacttcatttacgttaaacgtttcttacttgtcgaatgcatacttacttgattttgacctatagttacttgtcgaatactgtgacctcgtataagtgatcaaaggcgttacaacttttggtggtcttttacacataagtgatagttttcaattatttttcgagtcaaagcaattagcaaatacttttttaggaaagttttttttttctttttttttttttgggcaaaatttttaggaaacttataaataataagttacttattatggaatcatgtactgtttttttctgaagtcactcatcactcgttcgtttaagtaggttttgttttgtcactgaaccgaagtcaaaccaatctaaataccaaagctggtttaatgtctctgaaattcgaacaaaaccaaaagcgaacggaatcttcggtttcgataccgacgcttctttgatgactcacaacgaaagatatatttgagggcaacgggcacaagtagggtcaggcaaaactagtggagttgaacaatcgataacatattcgggcagcttttcagatctgcccgtcttttcctacaatctcgatcgttgtttcgacacttgtcctcattgtattagcctccttttcactgttgcacatcgtgtcgtttaccactcctacacattttcgtggttctgagttgacctatcactacagtgtgagtggaaaacatgaaaacggcacgatgttaatgaatattagagaaggacggaggctatgaactgaaaaaacgacatggtgtgtccctcttgggtctagccgtttaggcctctgttagtcatttcgtctcttccttagttagaacaaaaaaggagagacctttaacaattttctgagggtaagatccagagattgattgaatcagcttactattttatataattcaggtaaattcttatgtttctttccctccagattttgaaagtttctagcttttgttgttctgtatctactcgtttccgggaaaatgcttttgctatgtatgttgagatgtgatagtagaggttaagattggtttttctctgttctgggtttgctttagattctagggttgtgattgaattctgattttggggttttggtttagtgaattccgattctcaaactcttggctttggtactgacttttgtgctttgttgttgtttcagtttgttgttcctcagacttgtaactaggacagtcttctcatgaatcatg

SEQ ID NO: 11593 - DNA, 3000 bp, Unknown; identical to SEQ ID NO: 11586
  misc_feature (1)..( 3000): cDNA_ID_2706931_gDNA_ID_2214504_Annot_ID_184072 3000 nt of promoter + ATG

SEQ ID NO: 11594 - DNA, 3000 bp, Unknown; identical to SEQ ID NO: 11585
  misc_feature (1)..( 3000): cDNA_ID_1807078_gDNA_ID_2214504_Annot_ID_184070 3000 nt of promoter + ATG

SEQ ID NO: 11595 - DNA, 3000 bp, Unknown; identical to SEQ ID NO: 11584
  misc_feature (1)..( 3000): cDNA_ID_3040483_gDNA_ID_2214504_Annot_ID_184068 3000 nt of promoter + ATG

SEQ ID NO: 11596 - DNA, 3000 bp, Unknown
  misc_feature (1)..( 3000): cDNA_ID_2717553_gDNA_ID_2214505_Annot_ID_133734 3000 nt of promoter + ATG
ccggtgacggacttcaccggaaatttggccggagtcattcgtcataatagtaattccaacaacatctacttatgaaaaatcttagaatcctatgaattggaatcaacaatcagtaaatgcaatcaaaactaacaaattgatcccaaatcatcaaacctaacaattctacatcaaaacctaagtttttgcatcgttccacataaatttttgaggatttaccttcaatctaatgatatactcttcctcttgctcaacgaagaaggaattgaatttctcaagctcatcttcaagaagactaatgaaatcaagctcttccttggtcataccaaccgttggatctgtgtcgacagaattggaatcggatctcgaacgtttatttggacgattctcgacgcttcgtggctccataagcttgagcttcttcttgagttctttgtatgagaggaatttgtcgcgccattcaggtaaagtttcttcgatctggttgcttaggctcttgccgaacttcatggttagctgagaataaggaagaacaatcaaaagtgaaaattggttacaggattgatggtggtttgataatattaatattagtgttttattttattaaatgaagaatattcgtggttttgtttttggaatatccaattttaaattttttttgttgaagcatatcttttttagaaataatatttattctttgtttattttacgtattggataatttacaaaggcacgagttttgggatacgaaggaattggagttaattgatcataactgtttgatcaccggtcaaaagagttgggcttagtacatgatgatagcccgattggatgaatgtatatgggccagtgtggcccatgtagttacaattgtgagtggaaacaaaggaggtaaagtggagacgctaatggtcgacgaaaaaggacccaaaaaagagtcaaagacccatacaatgatacaaaaggaaaaaaggaatgaagttttatatgcaacacacttgtaaattagagaaataccagctcataaaaaaaaagagagaaatactctaaaatactattaaactaaatttgtgtttcatatatatttggtccaactggtcagagcgcgagtcatgtaattaataattatcttaatttaatgttttctataaaaaaaggtcttagaacctgttacaataaaataaaatataaactcttgctctataattaacatgttttcaatttatctagcataaatattttccaaacaagaaaaaatgataaagtgtgttatatagtgaaaagttaaaacttgaaaaaacaaagaaacataatccattttagaacaactaaacataaattaaatcaattaagtttttagaatattatatatatatatatatatatatatatatatatactagttgtatttgtcacaatcaggacttagggaacccctccagtttctatttggaaataccaacttgtcccatattgagaatacattcctatataagataggaatttggaaacacccgaacagttatgggatggaacaagaagtgtgctaacctctaactgaaatattagtaaataaagaaaattctaaaagtaaaagaaaattggttgttacgcatctaacattctctataggaaatagccatctctatgatgatttcatacttttgccagttccttggcttatctaggattagctccatcatttggcaatccgatttacgaattcttcctatcaaactcacaacactcttttcactagagcaatattgaagtagatcaaatatatttaaaaggtcatcttcctcccctagcgacatagcaatcaaacctttatgatttatctatagcagtagacatcttgtaaattaaaactttaactatatgaaatttgagaaatccagaacttgaaggaaaaaatagcaacaaatatttgtagtaataagaccactttaatgaggtaactgttataaatgtgatgattatccatcacattacttctctttcaagaaaatggatagttatccaaagttcattattatccctcatcattttacattatctacttaaatcctaagtagcttcctccccaaacaatggtagttatcatatcctaaaggctaaatgtctagcttatcttaaattccctatatatacgatgatggacaagaagtgagtaagatagacgaggaaaaggtgaacaaaagggcttacgatctagggatgatgaaccaaaatatttttcttttatgcccaaacaaagaaaaactatttttttacgatttgcttttcctttactcgttaaaataaaagtatgacagtttaacatttattgctctttatgcaagtatgcaaccaatcataccataagttgcaatcaatatctcacttcaaatctccataccacaaatgagcccaagaatgttatatgatcgatcacctaaaatattttaaaacaagttttaagtcgtgtcctacatctatatgtgttttttttttcctttagttagaagtcaaacaaacaataaaatagtaagtataatgattgaaaaacttgagatcatgctctgatgtataaatttttggtcaactcttcctcttcggtctaatttttcttcttctgttaatacaattatttatgagcaagaatgatattttattttatcttgaaatggagaagccaccattaatgctacagtaagggttaagacgtgaaagtggggccaaccactgtgttgccgagagaaaacttaattccttgaaagtgaagggatccaaagtcagaaatgacacacacacccgtaataaagccaactagccaagagtttttttttgttataaagaaaaaaaaaaggtctcactcatcaacaacgagtgaaaaaaaaatgtgaaaccaataaagccaagagttaagctgcttattttgcctcttttgccgaaaccaaaagaacaaaaaaaaggaaccatcaaagaggaagccaagaaaaaaaaacgtcggtgatg

SEQ ID NO: 11597 - DNA, 3000 bp, Unknown
  misc_feature (1)..( 3000): cDNA_ID_2717549_gDNA_ID_2214505_Annot_ID_133735 3000 nt of promoter + ATG
aacttgtaacctaaccaaatagttattcacctaactcatagaaaataaggttagttaatctagtgcatatacttaatagtatttacccacaataaattacaaaagttgatcaccaaccattaaaaagaatacaatttttttttatattcagtattcatttaataaaatacaaatttgttaactatgatcctaaagtaaagttaatttcttgtttccgatcctcataaatgaaagaatcagaagttatatagttgaaatatatatcaagttaaaatggtaatcgtcttcttagcttgacatggaagagaaacaagaaaaacaaaaaacaaaagagtgaaacctgtatttgtgatcataaggagatacaacgaatctcctaagcttaactcgtcgattacttcttgcaccaagtgaaggtaaaattccagtagaaagactaaaatgactactctctctcgaaagctgttcaatctcatcttggacttgtccgcataacaaagcccctcctctcatcaccgacgtttttttttcttggcttcctctttgatggttccttttttttgttcttttggtttcggcaaaagaggcaaaataagcagcttaactcttggctttattggtttcacatttttttttcactcgttgttgatgagtgagaccttttttttttctttataacaaaaaaaaactcttggctagttggctttattacgggtgtgtgtgtcatttctgactttggatcccttcactttcaaggaattaagttttctctcggcaacacagtggttggccccactttcacgtcttaacccttactgtagcattaatggtggcttctccatttcaagataaaataaaatatcattcttgctcataaataattgtattaacagaagaagaaaaattagaccgaagaggaagagttgaccaaaaatttatacatcagagcatgatctcaagtttttcaatcattatacttactattttattgtttgtttgacttctaactaaaggaaaaaaaaaacacatatagatgtaggacacgacttaaaacttgttttaaaatattttaggtgatcgatcatataacattcttgggctcatttgtggtatggagatttgaagtgagatattgattgcaacttatggtatgattggttgcatacttgcataaagagcaataaatgttaaactgtcatacttttattttaacgagtaaaggaaaagcaaatcgtaaaaaaatagtttttctttgtttgggcataaaagaaaaatattttggttcatcatccctagatcgtaagcccttttgttcaccttttcctcgtctatcttactcacttcttgtccatcatcgtatatatagggaatttaagataagctagacatttagcctttaggatatgataactaccattgtttggggaggaagctacttaggatttaagtagataatgtaaaatgatgagggataataatgaactttggataactatccattttcttgaaagagaagtaatgtgatggataatcatcacatttataacagttacctcattaaagtggtcttattactacaaatatttgttgctattttttccttcaagttctggatttctcaaatttcatatagttaaagttttaatttacaagatgtctactgctatagataaatcataaaggtttgattgctatgtcgctaggggaggaagatgaccttttaaatatatttgatctacttcaatattgctctagtgaaaagagtgttgtgagtttgataggaagaattcgtaaatcggattgccaaatgatggagctaatcctagataagccaaggaactggcaaaagtatgaaatcatcatagagatggctatttcctatagagaatgttagatgcgtaacaaccaattttcttttacttttagaattttctttatttactaatatttcagttagaggttagcacacttcttgttccatcccataactgttcgggtgtttccaaattcctatcttatataggaatgtattctcaatatgggacaagttggtatttccaaatagaaactggaggggttccctaagtcctgattgtgacaaatacaactagtatatatatatatatatatatatatatatatataatattctaaaaacttaattgatttaatttatgtttagttgttctaaaatggattatgtttctttgttttttcaagttttaacttttcactatataacacactttatcattttttcttgtttggaaaatatttatgctagataaattgaaaacatgttaattatagagcaagagtttatattttattttattgtaacaggttctaagacctttttttatagaaaacattaaattaagataattattaattacatgactcgcgctctgaccagttggaccaaatatatatgaaacacaaatttagtttaatagtattttagagtatttctctctttttttttatgagctggtatttctctaatttacaagtgtgttgcatataaaacttcattccttttttccttttgtatcattgtatgggtctttgactcttttttgggtcctttttcgtcgaccattagcgtctccactttacctcctttgtttccactcacaattgtaactacatgggccacactggcccatatacattcatccaatcgggctatcatcatgtactaagcccaactcttttgaccggtgatcaaacagttatgatcaattaactccaattccttcgtatcccaaaactcgtgcctttgtaaattatccaatacgtaaaataaacaaagaataaatattatttctaaaaaagatatgcttcaacaaaaaaaatttaaaattggatattccaaaaacaaaaccacgaatattcttcatttaataaaataaaacactaatattaatattatcaaaccaccatcaatcctgtaaccaattttcacttttgattgttcttccttattctcagctaacc

SEQ ID NO: 11598 - DNA, 3000 bp, Unknown
  misc_feature (1)..( 3000): cDNA_ID_1394502_gDNA_ID_2214505_Annot_ID_133736 3000 nt of promoter + ATG
aaccacgaatattcttcatttaataaaataaaacactaatattaatattatcaaaccaccatcaatcctgtaaccaattttcacttttgattgttcttccttattctcagctaaccatgaagttcggcaagagcctaagcaaccagatcgaagaaactttacctgaatggcgcgacaaattcctctcatacaaagaactcaagaagaagctcaagcttatggagccacgaagcgtcgagaatcgtccaaataaacgttcgagatccgattccaattctgtcgacacagatccaacggttggtatgaccaaggaagagcttgatttcattagtcttcttgaagatgagcttgagaaattcaattccttcttcgttgagcaagaggaagagtatatcattagattgaaggtaaatcctcaaaaatttatgtggaacgatgcaaaaacttaggttttgatgtagaattgttaggtttgatgatttgggatcaatttgttagttttgattgcatttactgattgttgattccaattcataggattctaagatttttcataagtagatgttgttggaattactattatgacgaatgactccggccaaatttccggtgaagtccgtcaccggaatgaccggagcttggattcctcgtaaatcatctgaattagtagtttcgattcgtttggaaacgtagttgaatgagaaatgagcatagttagttaaaaatttaggtccatgttacttattttgtagcctaaggctagaattattgcgtggagcatttttagtttacatagtgtattcaactctatttcttggtgggaattggtatcgtaggaattgaaggaccaagtggcgaaagcgaagaattctaatgaagagatgataaatataaagaaagagattgttgattttcatggagaaatggttttgttgatgaattatagtgctcttaactatacaggtaaacttttctttctcatgtcatctccatggttattgtttttcgttcttttctcatatgttctaatcattcgtagcccgaaagccgacgttgagtaaacagaacaagctcacatgttggacaattgatagtttttagatgttaaaactcgtttacaaggtcaagctctagtttttagcatttcctagtaagtgaaaccgtgtcaatgggcaatatttttagaagttttgtgaaagattgattagtagggaacttgagttagtattaacattacgtctatgttaagagtcatattctccacgatctttgtgttacttgttaaatagaaatgtgcccacatgaaggaatatgctgtaatttgtttaactggccactcatcgcagatgctttctttatacttttttcttataaataacttgaggtttatgcctttattcttattcgctaaatgtgtagaattgtgttctattggtttacaggattggcaaagattctcaaaaagtatgacaaaagaaccggtgctttaatccgtttaccatttatccaaaaggttttgcaagaacctttcttcacaactgacctactcaacacatttgtgaaagagtgcgaggctatgctggaccgcctctttccgtctaacaaaagtcggaatctggatgaagaaggagagccgacaacttctggaatggtcaagacaggaacggacgattctgaacttcttagagtaccaaaagaactgtctgagattgagtacatggagagcttgtatatgaagagcactgtgtcggcattaaaagtattaaaggaaatccgcagtggtagctcaacagttagcgtcttctcgttgccaccgttaccggcaagtggattagaagatgattcatggaagaagaaagttggtgtccttgaacaagtagcgaaatgaattatgagtattattatttttaaatctctctttttttttgtactttctttaaatagtacaagtaattgtatacgcttacagctgtaaaagatgaatcaaataaaacatagaagtgtgatcatctttcaacatttaaacttggttgcgtgtactttttcttttgctgcatatcatgtatgaaaaatcttctgtaagactgtaacaccactttcaagcagagagaacaatgaaatacatacgccatttcgaaatcttatgtattgcattttagcatctgtgggtcaatcggtctctgtactcctaactaggtgatatttggtccaatttaagggcagctcattcaatcacaaagaatcaaatatgttgcagaggaaactgttctgacttctgtgaatgttgcaagattgtatagctgcttcttgttcggcccttttatatgggctttgtaatatatgggccttttttatgtgggcttagataaggcttcgacaaattttagactacgctttgcgtccctaagtgcggccactcagtaaatcatctacgtcacttattgatcaaactatggctgggcagtgggcaaaacaaacgaaccagaaatcctaattttgtgtacttcaaaaatcaccattttttttttttttttttttactattataacaatactttttgagatcaccaattttcttattttataactaattaattctttcaagaaatatttaattcacttttttatatattttaactaaaaaagactagaagttattactttttctttttgacccatactattaaaaatataactgtcactgaatcggctctaaatctcctcgactttcaactcctacagacattcagacatgtgcaacactcaacgcactgtcgatattacatagacccgaaataaaagctccttgtccaaaaacttcattcaccctctcatcgttatcttcatttggaaacaactaaacaatattctgttttattaatattttcgcctatttaaaaattcaattagaatagtgtatccctcttctctattccttcaagccaactaaaactacattgcgtgacttcttctgtaaccatttttctattccgatcaaacc

SEQ ID NO: 11599 - DNA, 3000 bp, Unknown
  misc_feature (1)..( 3000): cDNA_ID_3040525_gDNA_ID_2214505_Annot_ID_133737 3000 nt of promoter + ATG
cggccatagttgcagaaggagattttgaacaaacccttgatggagttgcaatcccaaacccttggaagctaagctcagtgaccaaagttgaggaagtaaaaatgatggttaggcttttgcctatttgggcaacaactataattttttggacaacatatgcccaaatgattacattctctgttgagcaagcttcaactatgagacgtaacattggaagctttaagatcccagctggttccctcaccgtgtttttcgttgcggctattctcataactctagctgtctacgaccgtgccataatgcctttttggaagaaatggaaaggaaaaccaggtgacataagattcatagattcatatatctattcttttttcatatatgtctctcagctatatattcacatgcattaacatttcaggtttctctagcctacaaagaatagctattggattggtcttatcaaccgctggaatggcagctgcagctctagtagagcaaaagcgtttatccgttgcgaaatctagttcacaaaaaacattgcctataagtgtgtttttacttgttccacaattcttcttagtaggagctggggaagcctttatctacactggccaacttgatttcttcataacacaatcgcctaagggaatgaaaactatgagcactggactcttcttgaccactttatcactaggtttctttgtcagcagtttcttggtctcaatcgtcaagagggtcacttcaacttctactgatgtaggatggctggctgataacattaaccacggccgactcgattacttttattggcttttagtcattctcagtggaattaacttcgttgtctatatcatatgtgccttgtggtttaagccaacgaagggtaaagactcagtagagaaggaaaatggcaagggattttcagttgaagactgctgaattttgttttgcaataattgtcttgtgtacaatattatcttgcaacaatgtcgctttccaattatgtttcttgtatattaagcaattggcttgtttttagattcctcccggtctcaaatattgtgtctttaccgtttatgttattcactctttttttttgcatcgtgaaaaataattatttaacgaagtatacttttaattttctggttacgtcctgtcgcgatccgattaatctcctttttttttcgattaatcttttaggttttatgctttagtaggtcgagaagatgagatccacatttaggcctttagctatttcatatctctttacctttgtgatctagtgtccggaacattgtagaactgtggagaacatcttgcaaaattaaagatggtcttaaaagttgtagaaaagtgttgaaagatctagattaattttgaccggaataaatccatctttatcgttgatttggaaggtaaacttgcattttaaagagtaggatctttcattagaagcgagttatgaagacgatgtgtaccaaaattctatttaatagcttaatgaacattatatttgttttagagtttccctgcaagctcactaggtaggatcgtgcatttgattcaccaaaaaactgtaaaactcatgagccggttctttaatatatttatggtcgaaaatcgtttatcgtcaaaaaatgttataagtagcaggcccagcccgtgcataagacagttgaaacagttactttagatcaccgatatacaaataattgaaaagctacaattctaaggttatctgtttggtttgcaactttaccctctatctccaaaaaaatataaatttaaaactaatacgtaatataacttatatatatatattataacgtttttacattcaaattcaatatatttttaaaattctagaagtatagttgaatttctcgtgagggttttaatataacacattattgtcaaaattttacaaatttgacgataacaaaaaatgttttattgcatattattttaaaatttgtataattaatggtaaaaactaattgtagaaattagctagttagaaaattttcttttgtacaaaacctatacagtattttattcttacaaaaatattttagatataaaaaaaaactcaatttacccttaaattttgttaaacggactctagtaagtaaatacttgatttgagttaattctagtaccgtccctttgtagacacagcgtgtgattgtgtctctctattggacttgtgtaaagctcttgtcttcactgaaattgcaaacctctctagtgtgttgagtgttgcacatgtatgaatatatactatactggttgaaagtagaggagatttagagctcatttagtgacaattatacttttaatagtatgagtcaaaaaataataaagtttaatcttttcaagtatatgtgttcaatcaaatatataaaaagtgaattaaatatttcttaaaaaaattaattatttataaaagaagaaaattgacggtctcaaaaaatattgttataatagtaaaaaataaaaaaaaaatcgattcactagatctcaaaaaatattgttataacagtaaaaggaatattataatagttttgatagtcaaattcactagatttttaaaattctcttcggcgaggtttcaatttaacaaaagatttgtcaaaatttataaatctgatgatagcaaaaataaattatattacatgttatttttgaattcgtataattaatttttagttttaaaagtataaataaaattgtagaaatgaattttgtgagaataaatagttttacttaattggtgtcattaattctagtaatgacacacttttgtcagtttgtgtctctctgctcactgaaattgctaacctcggatcttctttctccttgtttttctttaacaagtcggtacgaatccatcttttcccacccaagatctctccttcttgtttccccagatctgaaatttcaaaagctacccaattttaactcaagactctgaacaacacatctagatccatttccatg

SEQ ID NO: 11600 - DNA, 3000 bp, Unknown
  misc_feature (1)..( 3000): cDNA_ID_2717541_gDNA_ID_2214505_Annot_ID_133739 3000 nt of promoter + ATG
tcttccaagaaacatatagaattgttgacacaggaaacatcaaatataaaaaagagcagaacaactgagtgaagaaaacacacacacagcgtcctctcgccgcaacccaatttgctttagttacaaacattccttcctcctaaaagcaacctttcttggttacattacgatctaatactttggttttgaaaaaaagtgatttaaaagaattccttttccaattgatttgactatcgacgacacatagtgtagttatcgagttcttacagccaattataaaaatgaaattagatccaaaatagccatatgaaccatttgaccaaataggaagaggaaaataccgtcattaattttttttttttttcaaccactcgtgtttccgttttctttttcctgttctttttgaacttatacaaagtaaaatttctactcatatgacttagaaaaccaaactaccataaaaatgagaattaggtaagtaaaaattactccatctgttcctttttgtttgatcttttagaaaaaaacacaaatattaagaaaatatattaaatattacttttaaatatattgttttttgtgttttacaattttcaataactataaaccaatgatattcactaatttgtattgaagtttacaatttatcaattataactaataactattgtattgaaaatctaaaaaattaatttttttaaaataatttttttttctaaacaattaaacaaaaaggaacagaggcagtattagaaaccctctaacccaacaaaaaatgtaatgtataatgtgttcataaacagcaccaactacccattataattatttcatgaacacaattgtggcagaataataatgatatgtcaaactgattaatgcttaatctttccgatttcagcctgtaaatattgaagtagccgacaacaagaattgaaaatcgcacaaattaggataacgtagaaaaatcatgttcgaaatggtaaaagttatgtaaacttaatttgaaccgagttatgtagaggaagaagaatgaacgtagacatgcctaagtgaatcttggtatgatggcttttgaattattgaagaaaagaagaataaaagtgttagaaagaataaattggcattataataaggaataaattctaagtgaatttagtattatatagtttttttgtaacactttaatactgtccgcgttatggccgccccatatggcccttaagacattaactagaagagaacatacccgggggagtttcatctattttttttggatactaggctatatgtttttttgttttttttttcctttgcgaaaagcctctttatttttactttggtgttaaccaaattccatttgtatatcatctttggttaacaattgtgttttcttgttgctaaataacttttaacatttctataaaaagaaaagaaaattaaagtgttaaagtattgccttacgccaatgtacaatgccgatgtaattatagaaaaatgacaaactgtgtttatatagaaaaataagagaggaaacttattatttacgatattttcactcatgctattttttttttcaaagaaaccaatttttttcttctcaccagataatagctctcgaaaaagagatagtatttagaacactactaatcttttttctatttgttttcactagaaaaatgattgcttagtaacagtctaaaactgtgtatggtaacttttttaatgtcaaatttgttggtccataagaaaaaaattatttccaaaatttaggagaaatgaaggcgctattatacaaaaaatacaagcaacgcatagtagataaggtggtgaagcttatcaaatttggtttaattttgattcttttcacttaattatgttctcattatatggaaagatggtgatgaaatatatgtgtgaaactctaaaatcggtgaatttttcttgttgctcaatttaatctacaagaggttatatgtagactaaattaaaatttcaaaatatatggtttattactttttagataagaaatgtcttaattttatagtttgagttgtactacattgtttttttaacatctataaaagaatgaacatatgttttaatatgattggtaagttgttttgacattttcccatatccacatataactttattaaaagtgatatagtgtacactttgaattcattataagatataatagaaactaaacggataatatgagagatttcgaaatccaacaaggagctaagtgtgaaggaacacgaatgaaggacagaattggaacaaatggttattggggggcaacagaagagaataatacccttcatcatcctcttctcttttatacctacaataatgcaatcgagaatcactttaagccctcaaggacgctctcgttatttccctcctaatgatccttgacgacttttttctccttcacatgaaacagtttcaactttacgttaatcgatatcgaacgtctatttccccgtaatgtttgaacgttgatattaaaactatttttgtaaaaccgtgcatcttaagacaaaacatggtgtccaaaccaaaaatatgtcttacctgatccaaataaattattttcaccctcagaaaattataatgcacaccatccaaattaatgatcatgtcttgaagtcttctagcaccaaggctatttcgtcggaattcatttctttggttttaatttcttttactatatcctcatgttgcaaagaaagttgatggaatcagaatctatctacatatacattctgatcattaatgcctataaaatgacatgtttctcaaacaaccaagttcaccaattcctttcgcttaccagtctcttgtcttctcaggttcgatcatttttttccttcaattttagctccttcttcatcataaggcttttccacaactaaatcattactagatcttgagtaagttggctgagtgctactagttaacttttcaggttgttagagatacatagatagaaat

SEQ ID NO: 11601 - DNA, 3000 bp, Unknown
  misc_feature (1)..( 3000): cDNA_ID_2717537_gDNA_ID_2214505_Annot_ID_133740 3000 nt of promoter + ATG
tgtatatcatgtatacttatcaacactgtctattttctatataattttcaagggacagattgtccccaacattaattttcttctgtttatattaattctttagtttctaagaaaacattacaacgagggggtatagtgtatgtccccattttcatgacaaaaacgaaagaaaaataacttttagagaaatgtggatttgattgtgaactatacgtggaaaattatttgcatatgactattcgtttttcttacagcatcagtgtttgtttattatctttacattataaatatatagatatacatattacatatcggttgaaaaagaatatatatctgtatacatatatggttacatgcatgtatagaccacattgtgaaagtagtaataaaaatatataattacttcttttgtattggcgggatcagagatctaactaaaataagttagaaacattctattatggagaagccaaaaccccacatgggtagttgaaatttataagtatttaattacgtaatattttatttgtttattttttcaatgtctctttatcctcgactaataaaattaagttttttaatctcatatgtatcctgcaattatgccttaaaatcttggtttacaaaaccgtccatagtagcaaataatatctattctcatctcacttcgtatctctttttatgatcttgatagttttcttactaagtaatttttataacgttacaagacaaagaattatttggtctatacaatcacacttgcatagaagtttcaataagattgcataaagaaatcaaaataattaaaacagaaataaaactttcgtatatatttttacagaaaatatgtttcaataagaatgcataaaaaaattaaaagaagaatagagtttagaaaatatcttccattttatatgattttgaaatctttgatgaaatttagaaaataaagtttcaaaaaatgtataaaagttataaatgttaagtttaaacaatgaccttaaaaatctatatataagttttaaaaaacgtgtattgactaataatgcaatcaaggaaatcttccgtggtaacttctggaaacttcaaaacttcaaactattagacttcttgttgggcagtgaacggtgttgatcgacactaagagagttacggtcgacactcttgccttggttagaatccgaatttgtccttcaaacttgatttcttcgatttagcttcagaatattccataaactttcaatgtatccctaaagtgcaaaaacctgaaaaaaactagaaaaaactctagaaaaaaaaaaaaactctaaaacctatatctaaatcatacctaaaatcgaagaaaatcgaggtatatcagaatagacgaacaactataaattgagagtcggttttaatttcatctactacctcaagtgtggaatatgaaagaggttcctcatttgattttgaagaattaggggcactttagatggtttaaggatgaactattttgttcacctccttttatttcagctaatcataatctaccatctaataaataaataaataacaaaataactcatttaattatcaaatctaagttctaaccactattttatccattcaaaacaatatataatctcgtctaattataaaatctaaattctaattcttttttgtgaatccaaaccgtcatttaatctcgtataattgtaaaatttaaactctaaaatgtattccaaacgaaaatatatttagaagtaaattgatatttggagtgtatatagaagtttcgttttctggtaagaagctggtaattagggaatgaattcgattaaactatttgtgtgatttgttgtattatcatttatcataaatatttgattgtcactattttgtcaaaaatattaaattgtcattattgtgttcaggttcttagtacctcaaatcaaacagatcaagggtttaagtgtttaaccaaaccaatcgaattattcaaaaatctttataattaaatgactgttttaatacgctaaaccacttaattgtttatatcaatacaggatctcattatggcacaattattaaaataacagattttatcatattatttctaaatgagcgttacgttttaaactttcaattttgtatatacactataggttttgtgacaggtcgattattattgataaaagcattgggtttactgtatattttctttttctttttcaatttcttttttgctaaaatgttcattttttcttttcttatttgattctgatatgcatgattatttcagggaaaatatctacatatcatattaacaaaaaaaaatacaaatccattctataccatatacgttacattgtgaaaattataataaactcaagatatatatatacatatacatcatggtagtagtagtagtagtacacatttaatttcagcagttgcaccaacaactgagtaaaggacaaaaaactataaaattttgccatctgctatttaaatcattacgtattactagaaaatgatgtggaattcgacaagaatgaataataaaaattaaactcactagagacaactttcattaaaaaaaaaaaaaaagacttgtatcacaatcatatgaaagatgaaacaaatttgcattattatcatttttataattgaaaaaaaaacctcaattcgttgacccttcactgtcctccaatggcggcccctacgccgttggccttgcctctctctctctctctctatatctctttcttgatctctctctataaaagctcaaatagtccagcaagcaaaataatccaaaaagaaacaagataagaagaaaccaaactcgcaaagaaacaaaaaggaaaaaaaaaaaaaaaacgaattaaaaaaagaagaaataaatcctcctttttaacacctcattccctctttctccggcactcaaaagagaccaaagaagaaaactttagctctcctttttgtgttttctctcttttctttgttggtgttccgaca

SEQ ID NO: 11602 - DNA, 3000 bp, Unknown
  misc_feature (1)..( 3000): cDNA_ID_2717530_gDNA_ID_2214505_Annot_ID_133742 3000 nt of promoter + ATG
tctagcagcaacatagatgaagaaactaaattataaatccttaaattaacataatatttcattcctcattttaaaaacttggtcttgaaccccaaattcaataactactcacacatatcgttagaaagaaagataatgtaacatgtttaaatcaataaatatagagataggggttcatgaaaaaaaacaatgtagagttaaaagattagactcgtcaatttttatatagcaaaaacaaagttttggataggaaaaatatgtgaaagaggtctttaaaattcgagcatattggaaacaatatatatccaaatgggccatgtccggagtcaaatcgaatttgggcctaaaatttatatgtggaagtggtctggcattctggtatatcctttggttcggcattaaagattagactcgtcaatttttatagcaaaaattaaacgaagttttggatacgaaaaaagatgtgaactaggtctttacaaatccaacatatggtcctaaaacaatataaatccaaatgggccatgtatgggccagagtcaaatcaaatttgggtctaaaattaatgtagaagtggtctgacattatggtgtagccattggttcggctagccttggacaaaaaaacaaaactgaaccaaaccgaaccaaaccaaaccaaactaaaaaaagggtccggttgggttatggatacaactaagtatccgaatggatctcagtcacactatcagttaataaccgaactgaaccgatagataattatataattatagattgtttggaagtagaatctaaatacctttgtaaatcttgatgctagcaaatctcgccaaacaaataaccatctcatcactagcttgttcagaggcattgaaaatatgctcggtagtaattgatcccacaaagtaaaaggtaacctttcatcactacagaaaagaagaataatcaaccaaaatgaattgaaaacatcaaacataatttatttatgaatgagaatacaaacatctcatatctgtgttcaaaatcaatctttttgttcgctaattgttgacataaagagtctccatttcacaaacgtttatgatcaacaatttcttgtacaagtaaaagatcataataataagtaacctacgggtaggcaaactgttttttggtttagggttggttcagattttatggttttttggttttacaaaaactgaaaccatatagtaaaaggtatagagactaccacaacacaaagagctgtttaaaagacttattcttattgataataaacttttgttacaagtattatctcagttcttacttgatctaatctacccaaaagatcaaccccgactaagaataactaagctctaattctcttctctgttttttatcactaacccgtgaagacgaagagaactacacactcaccttcaagcttttgcacggctttgaagtttttacttagtatcgaaaaatatcccagagtgctcaaagcggctcaccctctgctctagaatatttatatcaattccccagaaccctaaccttaggatctccgagaatctcttgatatggaatcttccttgtttccaagcctattcctttctttattcttcgatataatatcttctatattttctcgatgaaccttgtctttgacacctctccaagttaacttccatccttggctcttcacatcattcgccttagcttgccacgtttgctctcgcatccatgtctgcacatcaagcgtctgatgaaacctgatgcagcgtcctgaaatccatcaacgatctgatcaccatcagctgattgattcactctgcatcttcatatagaaatcgtatgtaatttagtttggtcaaactttcggtatcatgaatcatatccctagttgtaactaatggcatggttctcaaaaaattcttatacccaacaagaaacatagtgcattatgtcccaattgatgtatttgttcaattggtttcatgaaacaatacaacgattgtctaaaattgggtagggaagagtttaggcctgacctgaatatttgctgaataaggcttgggtcaaaacttttgtaactgggctttgaacaccttattgggcggaagtttgcaaagcccaccagataaatatttgcttgatgagtctctaaaagtcttgtaaagattgatatttaatctatgtttatggttaaggttatttcagaatattgtggagagcaagtaaaaaaaacaaagataggaaattatgatataacaaatgtggatgatttaggtttaggaaatagcattttgttcaaatatgtggagaatacaccataaatgtttattttcttatagttatccaagaggttaaatggtttaggtaatcgtaattaaagatcaatacgctaaacatatgtaattattttttgcgtcagctggattttattatgtcaatttcaattacttaaatcctaatgccataattcagtagcaatttaaataataaaataaattaatttggatatctattcaaatgtactgtctcttcgaagataataatcaaactttaaattcaacaaatatcatcaaagcatgaaaattcaattgtttccagctacgtattaatagctttaatgtggaaaaagaaatattaatagcttttttcatggaaaaaagaaaaaaagaaagaaactttacttttaatagtatatttttgtctgagccaataaaagaaaaataatattttggtttaacatatttgtccctcgtgatagatttgattcgttcgttctccttctccttcattaaagacttcacgatcccacacctccacacacattgactcacacacacacacttctctctccaagttcagaaaaaccaaaaatgggttcttgtcggaaaaccacttctggttttcagcaaacccacttcttgtaataaaacagacaaaactagaaagaagcaaaaaagcttcgttttttttttctctttctccaaaaaaaaaaacccccccaaat

SEQ ID NO: 11603 - DNA, 1291 bp, Unknown
  misc_feature (1)..( 1291): cDNA_ID_2706949_gDNA_ID_2214505_Annot_ID_184100 3000 nt of promoter + ATG
aagaagtggagtttctgctttgttggatctcttatttttttaagattttgtcttgttaatatggatcttagtttgtactatcgtcctttttcgagattggtttgatattttctgcattataatttgagtttacttcatcttctttatttaggatctagattccgaagaattctctttttccgccagcttatgtttttttgggaacttatagtttatccgccaatttacgttttttttgtttgggcattatattttacgtctttcacaacaagattctataatttctttatgacaaaaaaaaaaataaaaagtaaaaaaaaataaatccccatgaccaaaaaaagttttggctttaccaaatttgtgtaagaaaggtctaagtttcacaccaaaccactcttattagtgtcatcattttgattactttcccttttaaaaaacaattaaaaagaatatcgtggcagttaaacacgaaacagaacccgtgaccgctctgtgatttttaagtttcagacaacaacagtccgacagcgacacacatcaaccggagttgaaaattatgcaacaatttattacctaaaccagaaaaacttttaaacaaaactaaattaaaaaaaaaagaaaaaaagaaaaaagacagtgtttccaccaaagccacaattttttcacggtctttgctttttagtaaagctaatgcttacgactctctcaaacttcactttttgccttctcctcagaccaaatcttcttcttcttccttctctgttctcgacgaccttctcaaattcgatctcaactcaaaacatttgtctgatccattaatcggattcaggtgagaagtgtttagctttgttctcttgaaaatctccgacgttgttcgtgattattgcagtattttgtgttctgattttcgatttcaagttcttaaaatttgactttcaatttctatcttctttgaaatttgttactaaattggtatatgggtagttgttgttagctcttttgtttggtaatctagggttttgacatccatcaattctttatctctgtagctataaaatgtttttaaatgtgtgttgaatccattgttatttccaacattggcgtaggtactgaaaaaaacaatgttttgtttttgttgttttagatttttgtgaagattcaacaacagatctgtgagtccattggagtatattactattcatagtggttagacatctactagcattttctgtcttttattttgtttttgtctaagcatttttggttttgtttataaacagatacaatg

SEQ ID NO: 11604 - DNA, 3000 bp, Unknown; identical to SEQ ID NO: 11602
  misc_feature (1)..( 3000): cDNA_ID_2717530_gDNA_ID_2214505_Annot_ID_184096 3000 nt of promoter + ATG

SEQ ID NO: 11605 - DNA, 3000 bp, Unknown; identical to SEQ ID NO: 11601
  misc_feature (1)..( 3000): cDNA_ID_2717537_gDNA_ID_2214505_Annot_ID_184094 3000 nt of promoter + ATG

SEQ ID NO: 11606 - DNA, 3000 bp, Unknown
  misc_feature (1)..( 3000): cDNA_ID_3040509_gDNA_ID_2214505_Annot_ID_184093 3000 nt of promoter + ATG
gggatgtggggttcataactacgcaagcagggcagaatgcttcaaatgcaagacaacaagagattatggtgcgtaaatatatatatcctctctttcttcttttaaaatgttattctattgatttcgaacttttgaattgatatattttcctctttttgatctctaggtggcgtctaaatggacgagaaagagctaatgaagaatctcttgttttaattatacctttcaacaagtgtttctactttctaacatgcatgacgctttcttacgttgacttgaaatcaattgaaagtttagactcgtgcaaattaacgtaagtacaaatagttgcaaacaaaattttgaaacaattaaggcatcaatgagaccttattgcaaaaacaatcgagatacatagattattgacgatattttattttttagtacaaatatacgatctttagaggaagaattcactagaaatttaaagcaaatacaaggtatttgcaaatacgaaagttaaattctactctttcgatataccattttgcagaagcaattttaaagtacgctgtaaaaaataaagtaagttttgtatttgatctaacacttgtagctccagcactaacaactattgtgcttctacagtcacaatattaaaaagtatgggcgtaacttacatccgaaatatagttcgaaaatagaaatttgtcacacatttacaaggagcacattgctcaaatataataaagaggaagggacattctccaaagaatttcatgaaaccattctcagatgttttcaagataacacgtgtcttttttattttattttataacatggcatacctacactagataaaaacgaagttagatggcgtttctagtctcctgaggctggtatacatattcccaactactgcaagatgcactatctattcttctctctctctctccctctttcaaattatgaattaagaaatctaaaagaaataaaaaagagaattgaagatagtgttgtaacctgcttagaccatctccaatagtatttcatttttcactttttccttcattttgaaataaaaaatgaaaaaatcttctccaatagtacttcatttttatcttcaaaatgaagatttgaatagtgtatcttcatatttgaaggtatactattcacaattttgaagatgtgaacttttctatttacaaaataatccttaaaattctaacaaaattttattttgcaccaaacaaattatttatttttattttaatccaatcaaactaaaatgcaaaaataaattatttatttttatcttccttttccttatagattatttgtgggagaattatatgtctacaattgtatcataaatatatattttaattaatgttatgtaatgtgattttctttataataatgtattttacataacattaattaaaaagatatatttatgatacaattgtaaaagaagtgggttaaagttataaaagaaatggattaactaatgtataattgtatttgcttattattataaaagaaattggttaaaattcataagtttacaaagtaaagggtattattcataattaataataaaatagagatagaatatatttaagaatattccttttgaagtagaaaatgaaagaaaccattggaaaagtcttgtttcatttttgtcttcaaatttgaagaaattctaattttgaagaaaaatttgaagctaaccattgaagatgcccttaaagagagacgatcgcctttaaccaccactacctggcccaaaccaaggtcactgtaggttcatcgaatcaagctatttttacaaaacttttaagtttcagtctatactatgttcaagaattattattcttacatttttttgttaccatatatagctacgtacatatcaaaaattgtactgtacatagagcatcagcaacatatgaaatatttcacttattgacggatcaatccacgaatgacatcggtcatataaatatcaaacctaatatatatgatccattatatgatttacatgttctgttgattagaatttagaacctatggacttttgagtttttttttctctcttcgacttcattaaagaaaagaaattcatatgtacagatagatttaatataataatagtgtgtgtaatcctataaaatgtaatttaagtaaaaaccaacaaaattgaatatatcaaaattaaaaaaatattgaaaattgagggctattacgtaccatcagactaacataattgacatgtatcagaaactagttttcaattagaagattatttttgtataatcgaattacaaaaatttcagttttcttaaaatgcatgcgagatttgaatttttttatatataaataataagttgatagcccttaattttaaataagttttagaatactataggacaagttttagaactttgtactttttgcaaaaaaaaatccaattcaataaggagatttctccaaaagaaacaaatctaactaatttactaaatccaagatgcttctaaaatgttttttatatagtcatgcaattacatttcattattttctatttagcttttctttgtcatctcgtattataggggactttcttgagttattcattgtaatttctcataaataaatactaaatagggatttgaccatctttgggtcatcggattattctgatactaaggtaaagctggcataggattttattgttcaaacatttataacttttgagtaaacaaaggatagtggtggtgtcagcttggcggagcatgcctgacatgtgcatctcatcaattctcctttatgtttatatccacacttggatctatattgtttatcttcacgcatggttttaactttactacaataatttttaaaaaaatatgtacaaaaataaataaataaaaagacaaaagtgaaaaagagatgtatgtgaagaatatggataaatagtgaagacaagacagttattgtcttgcccttgagacgtatcta

SEQ ID NO: 11607 - DNA, 3000 bp, Unknown
  misc_feature (1)..( 3000): cDNA_ID_3040525_gDNA_ID_2214505_Annot_ID_184088 3000 nt of promoter + ATG
ctacaaagaatagctattggattggtcttatcaaccgctggaatggcagctgcagctctagtagagcaaaagcgtttatccgttgcgaaatctagttcacaaaaaacattgcctataagtgtgtttttacttgttccacaattcttcttagtaggagctggggaagcctttatctacactggccaacttgatttcttcataacacaatcgcctaagggaatgaaaactatgagcactggactcttcttgaccactttatcactaggtttctttgtcagcagtttcttggtctcaatcgtcaagagggtcacttcaacttctactgatgtaggatggctggctgataacattaaccacggccgactcgattacttttattggcttttagtcattctcagtggaattaacttcgttgtctatatcatatgtgccttgtggtttaagccaacgaagggtaaagactcagtagagaaggaaaatggcaagggattttcagttgaagactgctgaattttgttttgcaataattgtcttgtgtacaatattatcttgcaacaatgtcgctttccaattatgtttcttgtatattaagcaattggcttgtttttagattcctcccggtctcaaatattgtgtctttaccgtttatgttattcactctttttttttgcatcgtgaaaaataattatttaacgaagtatacttttaattttctggttacgtcctgtcgcgatccgattaatctcctttttttttcgattaatcttttaggttttatgctttagtaggtcgagaagatgagatccacatttaggcctttagctatttcatatctctttacctttgtgatctagtgtccggaacattgtagaactgtggagaacatcttgcaaaattaaagatggtcttaaaagttgtagaaaagtgttgaaagatctagattaattttgaccggaataaatccatctttatcgttgatttggaaggtaaacttgcattttaaagagtaggatctttcattagaagcgagttatgaagacgatgtgtaccaaaattctatttaatagcttaatgaacattatatttgttttagagtttccctgcaagctcactaggtaggatcgtgcatttgattcaccaaaaaactgtaaaactcatgagccggttctttaatatatttatggtcgaaaatcgtttatcgtcaaaaaatgttataagtagcaggcccagcccgtgcataagacagttgaaacagttactttagatcaccgatatacaaataattgaaaagctacaattctaaggttatctgtttggtttgcaactttaccctctatctccaaaaaaatataaatttaaaactaatacgtaatataacttatatatatatattataacgtttttacattcaaattcaatatatttttaaaattctagaagtatagttgaatttctcgtgagggttttaatataacacattattgtcaaaattttacaaatttgacgataacaaaaaatgttttattgcatattattttaaaatttgtataattaatggtaaaaactaattgtagaaattagctagttagaaaattttcttttgtacaaaacctatacagtattttattcttacaaaaatattttagatataaaaaaaaactcaatttacccttaaattttgttaaacggactctagtaagtaaatacttgatttgagttaattctagtaccgtccctttgtagacacagcgtgtgattgtgtctctctattggacttgtgtaaagctcttgtcttcactgaaattgcaaacctctctagtgtgttgagtgttgcacatgtatgaatatatactatactggttgaaagtagaggagatttagagctcatttagtgacaattatacttttaatagtatgagtcaaaaaataataaagtttaatcttttcaagtatatgtgttcaatcaaatatataaaaagtgaattaaatatttcttaaaaaaattaattatttataaaagaagaaaattgacggtctcaaaaaatattgttataatagtaaaaaataaaaaaaaaatcgattcactagatctcaaaaaatattgttataacagtaaaaggaatattataatagttttgatagtcaaattcactagatttttaaaattctcttcggcgaggtttcaatttaacaaaagatttgtcaaaatttataaatctgatgatagcaaaaataaattatattacatgttatttttgaattcgtataattaatttttagttttaaaagtataaataaaattgtagaaatgaattttgtgagaataaatagttttacttaattggtgtcattaattctagtaatgacacacttttgtcagtttgtgtctctctgctcactgaaattgctaacctcggatcttctttctccttgtttttctttaacaagtcggtacgaatccatcttttcccacccaagatctctccttcttgtttccccagatctgaaatttcaaaagctacccaattttaactcaagactctgaacaacacatctagatccatttccatggcgagcgcctggaaaaaagacaagaaccaaaaacttttatcaccaaagacactaatctcacttcttgtcctttccattatcttcctctcttctctcttcttcttcttctctaactcctctctccaatactccaatccaaatctctccatcaattccccataccctatccctccttttgattgcttcaaatgtccacaatcaaaacccataatcgcaaacgtcgtcgaaaatctcaagtacccttttgtttactctctcgctgatctcggtaatctcccggagaaaccacataagaacattgttaggctacttaaaggtaagccctttaggaaaccagatatctccgcaacgattcaggaggtattggatagtatgagagctagtggtaaaaatgggattgttgttgatgttggagctaatgttggtatg

SEQ ID NO: 11608 - DNA, 3000 bp, Unknown; identical to SEQ ID NO: 11598
  misc_feature (1)..( 3000): cDNA_ID_1394502_gDNA_ID_2214505_Annot_ID_184087 3000 nt of promoter + ATG

SEQ ID NO: 11609 - DNA, 3000 bp, Unknown; identical to SEQ ID NO: 11597
  misc_feature (1)..( 3000): cDNA_ID_2717549_gDNA_ID_2214505_Annot_ID_184086 3000 nt of promoter + ATG

SEQ ID NO: 11610 - DNA, 3000 bp, Unknown; identical to SEQ ID NO: 11596
  misc_feature (1)..( 3000): cDNA_ID_2717553_gDNA_ID_2214505_Annot_ID_184084 3000 nt of promoter + ATG

SEQ ID NO: 11611 - DNA, 3000 bp, Unknown
  misc_feature (1)..( 3000): cDNA_ID_1807304_gDNA_ID_2214505_Annot_ID_133745 3000 nt of promoter + ATG
caagaaattttgaaaggttttaagtttttgataggtatgtatgtgagaaggtatatgatattattttatttgattttaaatgtatgatattattttatttgattttaaatgtatagtcaactgcgatttgtatatgttttgttgatattatttatgttgttaagtgtttaaaattatacacttgtattttgattgttaattttagagtttcacctgtagtataccatcttgtattattatcgatctaaacccgtcaattctacgattttcaagcttgtattaaaaattgaatcacatcatacacattaaaaaatctaatatgttattaattattatagtatataagattataaattttcaaaacaatatgtatgactcagtactcagtagaaagttttcttaaatctatttttgacccattataatatttttcatgtattgaacagtttatattcgtttttaaaaattcaaattagggcatatgcgaaaaaactctaattattttttataacgatgatattattttttcgcaaaaatagaatcatataaagatgagaagtgaactataataattaataaaaattaatatgataatttagatatcaaatctaatttgttgattttaattggttacttttttggaaattaataatgcatttcgttttttaattaaatttaattaattaaatttgtatttgactttttaattcttaaagagatgaattaatttactttttaaaattttatttctaatgacatacctatgtaattacttacaaaaaataaggttacatttaaaatgtacttcccaaataatatagtaggatctaatattgtggtttagactacgtacagttataaattaaaactaatttaaaataataagtcaataatttgtttaaataagttttgttttctttctcattttatatcgtactctcatttttttttatcttgcaagtattaaagacgagaaatatagatctagatcgttactacaaaaacgaaaataacaccttaaacttaaaacacaatacaattctcataataataagtacacgacactactaataaaacacataactttgttaaatagactcaactccaaaacaataaaaatcttaaaattaaacatagaaatttagaaatttatttaatcagggaaacatttcgaaatgtgcaaatatctgtgtttgctaaatatacttataatttataattgatgtacatttgaatcacgcaactcagattagcatatatacaatttgcaaatacatgtaattttttggtcgagagtagttacggactacggagtattagatccatttgcattagattgatcattatcggttcatattagacatatgtgttcatcatcaaaaagtcatatgatacaatatgatatatgacttgatgatgatagccaactcgattatattccacatgcgatctggttcacgaatgattttaaagcgaacatacaacacttcagatgcaggttcgatatttttatgttcaacatcatcaaacaatagtaaacggtgtagaacatttatatcgtttgacgtgctcgaatatctaataaggtatgtcaattcatatatcatgagatgcaattgcttcaagaataacaatgatgattcttttatcttttcgagtgagttgacgtaattaataggtaagggttctcaattaaagccaaaaatcacattatattgatgaaaaagtcatgagaattactgataaaaatattattaaaacataaagagaaaaaaaaacatattaataaagctgaaagagacatacacacattattaaagcggaaagagaccgaatacaaacacacacttgacaactattaatttccaaataagtcgtgactcaaacttctctaaaagctctttactccgatcatcgagattctctttttcacttactctctcataaacatcttcagcttcttagattcaatcatttctttcattaattggtttgccttattttgcgccatgcttattttgtctcgtttcaattcttggtccttagattgtttaaattcattacactcttcgttaatcactactaaatttacgtgatctttctagatgtattttctcttgctttgatgtgcatagtcttcctttatcttggttcgacgatctttaaactggttcacgatatacctcttttcaatttcaaactgctttttgtaagttttgatatcaagaaaatattcagatggattcattgatatttttttagtaagttgaaatttgtgatattgatataacaatggaagtatgagtcccattttataaagaacaaaaaaatcaagaatctacacagccaataagaatacaacatgtatccattccatattttaatctaaaagaaatttctttgcccaatcaataaacaccacatggcatgttactaattattatttaaaacctgtaaattctatttaattttttttgttcttttttctgtattaaactgaaaatagaaaagagactactttaactttaacaaatttattaatgtctttagtcttataaacctccgctccgtttattaggctcctcttcgtccccaacggctagtaataaaaaataacatttttataactaacactcaatttaaacccttagatctcaattaaaagcaaaatcaacggtcacgattcgattcgattcgaacaaaaaaggaccgttagagagagctcaaacttttccttttcaaaataaaacagtgccctttcctcaaccacaaatcttcaccattcgcaatttcacagtcgagaaaaaaaagttagggttttatttgttgttcctgagagaagcgaaagagatttttgattcagagagagtggcgtctggttgggttgaagccgggacgggaaagagtcgtctccgggatttcttttcttctttgttaacgagtcttggaggagcgttacttcagatcaccgaagaagaccaacaacaaggttcagatatt

SEQ ID NO: 11612 - DNA, 1291 bp, Unknown; identical to SEQ ID NO: 11603
  misc_feature (1)..( 1291): cDNA_ID_2706949_gDNA_ID_2214505_Annot_ID_133746 3000 nt of promoter + ATG

SEQ ID NO: 11613 - DNA, 471 bp, Unknown
  misc_feature (1)..( 471): cDNA_ID_2707010_gDNA_ID_2214506_Annot_ID_133747 3000 nt of promoter + ATG
ttcagcttaataccttttgaacaaatgtgtacaaaaccagtttaattttgacgagaaccggtcgaatatttaaccgatttggcttgattttcaaaaccatgaaaactttacaattaaaatttgagcggtctaaaccattagaccgtttagagatccctccaacccaaaatagtcgattttcacgtcttgaacatatattgggccttaatctgtgtggttagtaaagacttttattggtcaaagaaaaacaaccatggcccaacatgttgatacttttatttaattatacaagtacccctgaattctctgaaatatatttgattgacccagatattaattttaattatcatttcctgtaaaagtgaaggagtcaccgtgactcgtcgtaatctgaaaccaatctgttcatatgatgaagaagtttctctcgttctcctccaacgcgtagaaaattctgacggcttaacgatg

SEQ ID NO: 11614 - DNA, 3000 bp, Unknown
  misc_feature (1)..( 3000): cDNA_ID_2708068_gDNA_ID_2214506_Annot_ID_133749 3000 nt of promoter + ATG
atggacaagtatttgcattgtgttaatagtaatgtcgatggctcgtgaagctgtctctacaaattatgcagaagctctcaaaaacagtcttttgtatttcgaagctcaacgttctggaaaattgcctccgaaccaaagagttacttggagaggagattctgctcttagagacggttctgatgctcatgtaatttaacactcaaatccttttttttttttttttttgtaatgtatgtttatcaagttcaactaaaatatttgctatttgtaaaaatgtatagattgatctcaccggagggtactatgatgcgggagacaacatgaagtttggatttccgttggcgttcacgacaacaatgctagcttggagcaatatagagatggcatcacagcttagggcccaccacgagaagggaaacgctctcagggctctcaagtgggccaccgattatctcattaaagcccatcctcagcctaatgtcctgtacggacaagtgggtgaaggaaactcggaccacaaatgctggatgagacctgaggatatgaccactccgcgtacttcataccgcatcgatgctcaacatccaggttctgacctagcaggtgagacagctgcagcaatggcggcagcgtctatcgcctttgcaccatctgataaagcctatgccaatatactcattggtcatgcaaaagatttatttgcattcgctaaggctcaccgtggactttaccaaaactccattcctaacgcgggtggcttctacgcgagcagtggatatgaagatgagttgctgtgggctgcagcttggctccaccgtgccaccaacgaccagatttatcttgattacctaacagaagcagaaacaggaggtccaaggactgtttttgcctgggatgataagttcgtgggtgcacaagtcttggtcgccaaggtagtttatgactatttcactaaagaaacatatcactgacttatttgacaagaaacaaacataatacaaaaatttgcaaatgcagctagcacttgaagggaaagtagagagcagtgaacagatcgtagagtacaagagtatggcggagcagtttatctgcaactgtgctcaaaaaggtgacaacaacgttaagaaaacccctggcggtttgctctacttcttgccgtggaacaacctccaatacaccacagccgctactttcgtcctctcagcatattctaaatatcttgaagccgcaaaagcctccatcgactgtcccgatggtgctcttcaagcttctgatcttctccaagtcgctcgttcccaggtagttaataaaacctaatatagtaccaactataagacatgttgttgaaaagatatcaagactttttcagtataatatttactaatttgcgatttcctcatgtgatataggttgactatatacttgggtcgaacccccagaaaatgagctacatggttggagttgggaccaattatcccaaaaaaccacaccatagagcagcctccatagtatcgatcagacaggacaaaacaccagtgacgtgtagtggagggtatgataaatggtataacaatcctgcaccaaaccctaacgttttagcgggagcagttgtcggaggacccgacgataacgatgtttatggagatgagaggagtaatttccagcaagctgagcctgcgacggtcactactgctccgcttgttggtgtcttggccctcgttttttaattttgtctctcctcgttttgcaaatttgagtatgtttgctttagaccttgttatcttatataagtcctaggctgttcattgatttaggtctaaatgtaatttggcttgaaaatataatataattgatagttaaaagttaaaaaccaatatatttcagaaataattgatcttgaactggaaactattttctacatgattggatcataattgaccaagaaaaaatgtatttttgctactgagagaactgtaagctgaggaaaatagttctgcttctttctctgtttataattccacattttaatcactaatttatcatcaatgtccatatatactacacaacgcaattttgagtacctcacttttccctgactttcaagcttggactttactgtgaagtacaacaatcctctgtcaaagctgtaattaaaatccttcctttattattggatcaggcttaattcccaaagacaactaacacaaaatgtaaactaaaccaacgtcgacatctcatcaattttccggggaatgtttttcaacttcaaatttcccaaatccaacccctttttaactattgttttttaagaaaaatgaggaaaaaatatcttcaaattagtaaccctaatttttaaggcttattggattgtcactgtccagatgagttagtcccattggtttgtagggtaaatgagtttctagcctatatgactccttcgactttgggtttgatcatagcctaaccattataatttggactgttctatgacatgatcatcagcccatttgacatccctatcaagaatgtgatttttctctattttcaactaaaattgtgattaaaaatatcttaaaaccctttccgaaactctttcttaagaaatttaagaaattttgaataacattggatttcatatgacttttataaatgattatttgaataacaagaaagtgtaaatgattttacctaagtttcatgttcagtactaaactaggatttggaaagatatttagaactcaatatttgaataacatgagatattaaagaaaaaccaaagtcttctaaaattcttaattcttagttgaataacagattacaacatttttagctaattttttttttgagcaagtcctttactagccatggactccatcatttatagattctctataaatagtgaatacatacatagacatagacatccaaaacacaagcaaaaagtaaaatctattgtacaattggtcttgagatcgtctaaagatttatcaaaaaaagatg

SEQ ID NO: 11615 - DNA, 3000 bp, Unknown
  misc_feature (1)..( 3000): cDNA_ID_2708064_gDNA_ID_2214506_Annot_ID_133750 3000 nt of promoter + ATG
aaatggttaaaaatgatgcaaaaaaaaataaaataaaaattaagacaaaatctgtaaattttatacaaaagattgaaagaatattgaccaaaaactgtaaatttctacatggatagtaagaaactttcaaaaaatgcataagattattaatagatatatacataagaaaaatagaaggaatatatttttaagaagatagcctaactaattatagttcgcaatcttattggtcttgtctatatcttttaggataaatgagaagatgtctaatattatgagatctaggtacaacatttttagctaatttatttttgagtaagaactacgaatgttaatgatccttaattagccatggattccatcttatatagattctctataaatagttgaacacggacatatacatagatatgccaaacacaagagaaaatcaaatcaattctacaattggtcttgagatcgtctaaagattatttaaaaaaacgatgtctcaactgaaaattggatcttcacaatgcttatggacaagtatttgcattgtgttatttgtattgtcgatggctcgtggagctgtctctagaaattatggagacgctctcacaaagagtcttttgtatttcgaagctcaacgttctggaaaattgccttcgaaccaaagagttacttggagaggagattctgcgcttagagacggttctgatgctcatgtaatctaaatctcaatccctttttttttgtattgtaatatatgtttatcaagttcaactaaaatatttgcttattgtaaaaatgcataggttgatctaaccggagggtactatgatgccggagacaacatgaagtttggatttccgttggccttctttacaacaatgctagcttggagcaatatagagatggcaacacagcttaaggcccatcaagagcaagaaaacgccctcgcggctctcaagtgggccaccgattttctcattaaagcccatcctgagcccaatgtcttgtacggacaggtgggcgatggaaactcggaccacgagtgctggatgaggcctgaggatatgacaactccacgtccttcatttcgcattgatgctcaacatccaggttctgacctagcaggtgagacagcagcagcaatggctgctgcgtctatcgcctttgcaccatctgatgaagcctatgcccaaatactcattggtcatgcgaaagaattatttgaattcgctaaggcgtaccctggcatttaccaaaactccattactaacgcgggtggcttctacgcgagcagtggatacgaagatgagttgttatgggctgcagcttggctccaccgtgccaccaacgaccagatttatcttgattatctaacacaagcatctggtacaggaggtccgaggactgctttttcctgggatgataagttcgtgggtgcacaagtcttggtcgccaaggtactatttcactaaagacaacatatcagtaacttatgtgacaagaaataaacatatataacacaaagtttttgcaaatgcagcttgcacttgaagggaaagtagagagcaatggaaagatcgcagagtacaagagtatggcagagcagtttatctgcaactgtgctcaaaaaggttccaacaacgttaagaaaacccctggcggtttgctctacttcttgccgtggaacaacctccaatacaccacagccgctactttcgtcctctcagcatattctaaatatcttacagacgcaaaagcctccatccaatgtcccaatggtgctcttcaagcttctgatcttctcgacctcgctcgttcccaggtagttaactaaccctaatatagtacataccataagacatgttctgatgttcatacaatattaatgtgtgatttctacaacatgttatataggtagactatatacttgggtcgaacccccagaacatgagctacatggttggagttgggaccaattatcccaaaaaaccacaccatagagcagcctctattgtatcgatcaccaaggacaaaacaccagtgacgtgtagtgaaggattcgatgcatggtttaacaatcctgcaccaaatcctaacgttttaatgggagcagttgtcggaggacccaacgataacgatgtttatggagatgagaggactgattaccagcatgctgagcctgctccggccactgctgctccatttgttggtgtcttggcggccgttgcttaatctttctctttgttttgcaaatttgagtatattgctttagaccttgttatcttatataagtcctaggctgttctttaatctaggtgtgaggtctaaatgtaatttggcttgaaaataaaatatatttgatagttaaaaccaataattaatcttaaactgaaattattttctacatgattagatcataaattgaccaagatgtccaatattgaccgattcgattttgggcgtgacaagcaccaaaccattataacttggactggtttatcatatggtcattaggcccatttgacatccctatctagaggtgcgatttttcttatcactattttcaactaaaactgtaaataaagtctttaaaatcctttccaaagctctttcttaacaaatttatgaaattgtgaataacaatggatttcatatgactttataaatgattaattgaataacaagaaattctaaatgatttgaatgattttacataagtttcatgttcagtaaactaggatttggaaagatatttagaactcaatatttgaataacatgagattttaaagaaaacccaaagtcatctaaaactcttaattcttagttgaatacaacatatttagctaaaatttttttgagcaagtccttaactagccatggactccatcttatatagattctctataaatagttgaatacatagacatatgccaaacacaagaaaaagtaaaatcaattgtacaattggtcttgagattgtctaaagattaattgaaaaaacaatg

SEQ ID NO: 11616 - DNA, 3000 bp, Unknown
  misc_feature (1)..( 3000): cDNA_ID_2707006_gDNA_ID_2214506_Annot_ID_133751 3000 nt of promoter + ATG
cctattccatgaagatttagtacgttgatcgttaaagtaatcctattattcagaatataatcaggaaaatatttatttccgctcatggtcatggatcacgatattttctggcaccgtcattgattattacttactaagatagatacatcctctatatagcgaataagaggatcacaattattttttctggtaccgctcattgattatatgcatggtctttatactgaaaaagggatcacgtaccaattatatagatacgtaaatataaggaagtatatatatatatatatattgattacatatgtagatacgaatatgctatatatatatatatatacatatatgtacgtctaatattttgtcagtaaaaatagcttacaaccatgtcttgtatatcatcacaatgcttcatcacaatcaaaagcatttgcattgtgttattattatcgattacttgtggagcagtttctgcaaattcaaattatggagaagctcttacgaagagtcttttgtatttcgaagctcaacgctccggaaaattgcctttggaccaaagagttatatggagaggagattctgcactcagagatggttctgatgctcatgtaagtttaatatccaaatctattttatttcattattctttttctgtaatgaatatttattacttgaaataaaatatttgccaattgtaaaaataggttgatctcaccggagggtattacgatgctggagataatatgaagttcggatttcctttagcgttcacaacaacaatgctagcttggagtagtgtagagatggaatcacagcttaaggcccatcaggagcacggaaacaccctcgcggctctcaggtgggccaccgattatctcattaaagcccatcctgagcccaatgtcttgtacggacaggtgggtgatgccaacttggaccatgcctgctggatgagacccgaggatatgaccactccgcgcccttcataccgcattgaccctcagcatcctggtgcggatctcgcgggtgagacagcagcagcgatggctgcggcttctttggcatttgcgccatctgattcagcctacgccaaaacacttattagtcacgcaaaagaactatttgaattcgctaaggattaccctggagtctatcataactccattcctaacgcgggtggcttttaccctagcagcggttacgaagatgagttactttgggccgcggcttggcttcaccgtgccactggagaccagacttatctcgatcatctaacacaagcttctaatagtggaggtgcaaggtccgtttttgcgtgggacgataagttcttgggagcgcaagtcttggtagccaaggtaggttatatgactttcctaaaagagaccatacccttacttacgccacaattcactcactcttttgcaaatgatagcttgtgtttgaagggaaagtgaagaacgaagggaagatgattgagtacaagagtatggcagagcaattcatctgcaactgtgctcaaaagggtttcaacaatgttaaaaagaccccaggaggtttgctctggttcttgccgtgggacaacctccagtacactgccaccgcttctttcgcattagccacttatgcaaaatacctcgaagctgcacaaacatcgattcaatgccccaatggtgatgtccttcaagcttctgatcttcttaaccttgctcgtgcccaggttaggcaggcattcgtgtttttcccttttaaattaaattacgttttgagaatcctcaagacttaattcttataaagatatgcaaagtgttcgtaatcttcatagttcttaggattttctgtgatgattacatggtttatgactaaaatgattaacataagaagaaaacaatttacatggtttatgtaataggtagactacatacttgggtcaaaccccaagaaaatgagctacatggttggatacgggaccaattatcctaaaagaccacaccatagaggagcctctatagtgtcaatcaaaaatgatcctaaaccggtgacatgtaatggagggtttgaagcttggtacaacaatccaaaaccgaatcctaatcttttggttggagcaattgtaggtggaccggacgagtacgatgcatacggagatgaacgatctgattttcagcacggcgagcctgataccgtcacggttgctcctttgcttggtgttctggctgccattgcatgaccttaagtattattttctttggactacatttcccaaggacgctctagcaactaacgttttaggtctaagggtagagaaacaaaatttgatttgttaaaatatcttgatttagtgagacattttgaagactgatgaggtttttcctctgtttcaagactaaagtgatttcggctcggttaagttattttggtttgtagcattgattctcttgaaaaattttaacaaaaaaaaaaaaaaaaaatctaagatatctgtacttgtactatcattcaataagaaatcaacaaatggttaaaaatgatgcaaaaaaaaataaaataaaaattaagacaaaatctgtaaattttatacaaaagattgaaagaatattgaccaaaaactgtaaatttctacatggatagtaagaaactttcaaaaaatgcataagattattaatagatatatacataagaaaaatagaaggaatatatttttaagaagatagcctaactaattatagttcgcaatcttattggtcttgtctatatcttttaggataaatgagaagatgtctaatattatgagatctaggtacaacatttttagctaatttatttttgagtaagaactacgaatgttaatgatccttaattagccatggattccatcttatatagattctctataaatagttgaacacggacatatacatagatatgccaaacacaagagaaaatcaaatcaattctacaattggtcttgagatcgtctaaagattatttaaaaaaacgatg

SEQ ID NO: 11617 - DNA, 3000 bp, Unknown
  misc_feature (1)..( 3000): cDNA_ID_2707002_gDNA_ID_2214506_Annot_ID_133752 3000 nt of promoter + ATG
tccagacaaagcgaataatgtcgacaattagtgttgtttcatatactagcatacgtgtagtctcgagaattcgaatctagaccaacattttggaaataattaatgactagtagtatacaaagtcaaatttaaaaaaatgtttttaaattttttaaaaaattgaaaaaataaaataaaatgttatttagtgcttttaggaggaagatccaatatctttcatgtctctgcaaaaacattttcctacttttaaagacatcacacttaactaataaataattcaaaattaaaataatattaacttttataataaactattgtaaagacatctctaaaaaggtcataaatgaagatgctcttagagcaaccccaaccttgtatcttagctaattcttagctagttcttagatataaaagtgattaaatttaataaaaccaacaaaccttagctaagataaacatcttaactaagatgttttcttaaaactaagaaaagtataggtgttgtgttttaattgggtagaaaaaaaagaataaaaagaggacataatttgaatgttgttttttaagaaaccaatagttcttaaccattggagtaaaaattagttaaactttttctaacttttcttaacttagtaaaagcaacattttaatttataataaggttaaaattcaaaattaagaaccaattggttctaaaccagtggggtcgctcttagtatatgttaatatatgtgtttccaaactacaaacaaatattaaccagcttcgttagttctgccataataatctccaaacattttctcgataaaatagattattaattttctcgagaatgtttgttgaaactgtgattcaactctctcagttcattgccgaatccgtcattatcgtctctgtagccgtcttcactctccgtctcttctatagattcgcttgtttcctcgcgagccgttcttggcgtcgttaccgtacattcacggtccatcatcgccggagatggagaaaaaccacagccgaggaaaaacattcatcaccgtattgtacgatttgtctcgaaaatgcgacggagggagaaaagatgaggcggatagcagcatgcagtcactgtttccacgtcgattgcattgatccgtggttggagaagaagtccatgtgtcctttgtgtagagctgagatcccgccggtcccgccgggaaatcctctgcgcgcgctttttattcctcccggcgtgattgagatgttcaccaaaggaatcgactccgacgcgtaggagtactgcttctctttcgtcatctcaaactttttagacaaaatattaatccgttgaattaatatttgtttatcaaaaataatatttactgtacgtataattcgccgaatgataaagagtttacacaacataaaaattagataaaactctaatatgttggtgaccagaaaaatattcgacatgacgacatagttatgcattaatggagaatcatatactgtatattcgacattatacgtcacctacaaactttcgttagtgttagaaaatgacagtattaattagtgtttataaaactttttatgagatgcaagtacactcctaggatttgttttttcttcactaatttagaaaatttcttacccactctaccacccaataaaattgttctgtgtcgaacaagtggttttagtctataaaatgacggatggtttgaccaaaataatataacaaagcaaaaaaaataaagctagattaaaaaataatttatgacttaacggccaacgaatccgtcaaagtattggcactacgtgtggcggaataaaagaattataactataagaaaacaaatttctgatcctaaatattcttgatttgtcatccgtagaggagagtagcgattagcactagtcagatcagtcagactctacgtgaatgaaacgataccttttgtttgatcattattgcagtcattgcttcttcacctatttgcatagaagcgaaaaaatatttggtccgcgattcttgtaatatggtcaaaacaattttaaaagatctccggatttaattttctcatcaagatatatacgtatccactatgcaacgggtgtgaccagaagctgagaagacacatgggttacgttaaaacgaaatactaaatgaacaaaaccatgatgggcccattcatgatgaggttgatccatttgagaattggttctctcttggaacttgaatcaagtaacacttccatacttgtgagtctatgaatatttagatcttttgacattgggattgtatttattgattatgcaattgcaaggaaatgtacgctctcgcactcaaattttttttaactggggcaataattaatttaagacccaacattacagttagattggaaattaaataaaaactatatgggtttgagtcaacgacttcttaacacaaatcactaaactaattagagaaagctacactatatgcattacgattcttattagttattaatcagtctctttgccataaaataaggagaacaaaccagaaagttaattaataaataatatataagttgtagtaactgtacttttttcggggaattcattgaaactttcaaatgtgttgcctattccatgaagatttagtacgttgatcgttaaagtaatcctattattcagaatataatcaggaaaatatttatttccgctcatggtcatggatcacgatattttctggcaccgtcattgattattacttactaagatagatacatcctctatatagcgaataagaggatcacaattattttttctggtaccgctcattgattatatgcatggtctttatactgaaaaagggatcacgtaccaattatatagatacgtaaatataaggaagtatatatatatatatatattgattacatatgtagatacgaatatgctatatatatatatatatacatatatgtacgtctaatattttgtcagtaaaaatagcttacaaccatg

SEQ ID NO: 11618 - DNA, 3000 bp, Unknown
  misc_feature (1)..( 3000): cDNA_ID_1013645_gDNA_ID_2214506_Annot_ID_133756 3000 nt of promoter + ATG
cattgttctcactcccggtggacatcgtattgaacatcttagccttggtaccaaaacgatattacccaatcctctgttgcgtctccaagtccttgcggagtctaattcgctcgccggagattcacaagacgcgatctttacacggaaaggactctctttatctatgcttctcgaccagaactacatacccgaaccggaaccggacgacttttcactggttcactctccggaggaatgataacaagatgaatacgactgagaatgtcttcgtctccatcgatgttccttatcgtcccgggcatgcttcttaccctctttccaatatcgcaattgatacagagatttactgcattcccggatataattttccctcatcatcaatcgtatggatctttgacacccaatctggacagtggcgtcaaggacctagtatgcaagtggagcgattatcagctaccgtaggactagtcggtggtaagatctatgtgatcggaggcaacagaggcgaagagatcctagcggaagtatttgacttaaagacacaaacttgggaagcagcgccgattcctaaggcaaaggatagaaacgaatggttcacgcatgcaagtgtttcacttgataggaaggtttatgctttaaattcgagggaatacatgaattcttacgatactagagatggttcttatcaaagatatacgatacctgaagataattggtggaagacaggaaaatgcgtgattgacaatgtgctcttcgtttacttccttagatttgggttaatgtggtatgactctgagctgatgttgtggagagtggtttatggtttagatcttgacaaagctcgatgcattgggatcggggaatactacggaaagttggcgtttatatggggaaaaccaagtaatgttagtgaaagcaaagagatttggtgtagaatgattggcttgcttaggagtgaagtaggaattcatggaactgaagaaccgtctcaacttctcagaatcgttcctaacaactatagtttgcgccattgtctgtctctttcgggttaaacttaatcaagagatatattgttgacgttagatgtttatttagtctttctttagtcattatgatcaatatcactacaatgtgtttacaagattcattgctgttgcggtttcagcatcttgctttgttccttccaccctatccattttgcataattagcttagcaagtttttaatattgtaagttcacccattttgtcccatttactaaaaaatcgattcaaacgaaacctgaaatgtatctcctaattaaaacatctaacttgtggatagagatattggtgtattttggtacaaatgctgtagttgagatgaagcagaaaacttgtccaaatgaaaactactgtctgtattcgatccaaaagatggctgacaaacaattctagttaatagcacgttatgatgtaatgtagtatataagatccaatttcttggtcttgcatatgtatccaagagagacgatcagttttttaaaacaagtatgtttttcaaagattcgtcttcaatgtatgatcaagaccatgctaagaatcaagtgtattatatacaaatcgtattaaagtattaactcaagaaaaagtgtcaactttcacaagattcaagcaaaaaggttttctttttaagaaactggaaccgttaaaagagtcaataacaatgctctccaaataaaagtgatttttttgcaaatcccattatggcattatcaaagagagaagaacctcatacaagaaaaaggaaggagaaaccatgagagagcacacagcgattagctagacattggatgattgtaaacgtattcaatggcgagagagcaagaatcgatcttgtcagcttctttgtctggaatttccagcttgaattcctcttcaatagccatcactatctccactgtgtccaaactatctaatcccaaatcgttttggaaatgaacctcaggagtcacctgtcgatatttatcacaaagccatcaacaaaaataaccctaaccaaacaacccttattagagagagttgatgaaggattcataaatgcaaaatccataagaatgaccatatcaaatcaaatccataggaacaacaacacgataagctacacttactaaaccacattgagatcaataaccttcaatttactaacaacactaatgcaacatcgtttcagatacatttggtctctatttccactagatcaatacgaaatcaaccaaaagctcctacattgacaaatattcaaggcaaaataatcattttgttcccaataatgaggaaaacaaaagataagaatcacgatttggccaaattttatgaagatcgagctgaccttagagggatcgactttggggaagctcttgacaacatcgagtactctatcgacgacagcttctctgctaagatgatcatcgtgcgaagaaaatgaccggatcgtaccaaggaacccaattttagactgattcaatcctagggtttgcaccggaaccctcaggtgacgaagaattgcatttctcagtgccattttcgtctctttcttcgagctcgagaattagggatttgatttgatgagagagacacagaagagtcaagtagccaaaaggggcaaaaatagttcaggtcatacgagatgacacgtgccccctactataaggctagcccaaatccttacgtgggcttataaatgctgcccataatgtagtaaattccttaatcagcttctaagtttttatatattttgtaacttatctcaaatagtttctaatttaacataaatgacccaattgggtcactcgaggaataaactgcaatttacgaataacaaactctcactaatacagtatttgcaattccagagcgacgggatctctctccggtaaatatcggaaacttttattctcagcaaagcgagatctcgacgtttctcagatccgtccggcgagttagatccttgagaaatcatg

SEQ ID NO: 11619 - DNA, 3000 bp, Unknown; identical to SEQ ID NO: 11614
  misc_feature (1)..( 3000): cDNA_ID_2708068_gDNA_ID_2214506_Annot_ID_184111 3000 nt of promoter + ATG

SEQ ID NO: 11620 - DNA, 3000 bp, Unknown
  misc_feature (1)..( 3000): cDNA_ID_1399068_gDNA_ID_2214506_Annot_ID_133757 3000 nt of promoter + ATG
atttaagtgatctgaactaacgacatgtgtacgaaattaattatctgtttctttatgggtcaaagattaaaaatgctgtgcttctttctctatcagactatcacatggaaagacgaaacgaaatgagagtttttattacctagcagctcacagttatacataattaaattcatagaccgacaaatcacagttttgagaaataagtaaacaaaagtactgaagcagcgagcatttgaaactccaaagaccacaaaagatcacagttagggacaaaccatagctaaaacagagtcttctttaaaaacaatccgatgaagaaaaaaagttgaaaaacaggcaaaaattttacagatggaagacgataactgatcgaatcatgcaaaggggcttgaggacattttttagtagtgtgttttgttgttctctatcgatttgttgttgtgttgttgttgccaaatctaacaagagcatcctcctgattgctgctgagcgagagatgcatttgcattggaagacttgagattgacatcaaccatatcctcttgctttgttgaagacaatgtctccattcccggcaaagctgctgctatcttgcggaagagcgcctagcaatacaaaaaggtttgaaatcataagaaaacaagatttgcacggagtgatagcgttatggatttgcggtaattgtttagagagtatcagtgaaagatccatacaaatgaggaggatgtaataatcagcaggttgggttaaaaatttataagtctaggttaattaactattgaatattgatggaactaaacaaagttagggcttagttgaactaagcagcaagtttttgttgtgcaagaaaccctcagaaatgtgtcaagccaagatctttgttaccttaatgttgaagcccgctttggcactggtttcgatgaacattacattaagttcgcgtgccttagcttctgcttcctctattgacacttgcctgagaaacaaaatatttaatacaaaggcccaattggcagtaacaaatgtagtaggcaccatcaagtgtcaaagcgtgttgactataaagaaaccctgtaaagatatgcagttgagcagcaaatgattttccatttattatcttgtagggtcgtttggcaacatactcaataccaccagaaaagtaagacgtggtttaacaacagtttgtacttgagtaaaacaaaaaagacacccattcgtcttgtcaacatacttacgaaatcagagcgtgtttaaacaaggaggactaccaaatttcagtctcaattgctattgaacagtaatttgcacatcatggtttaacaagaaacaagtagaggaagagatggtagatcattattaccttttgtccactagatcagttttgtttcccacaagcacgactatgacatcactaccacgttctgtcctaacctcatcgatccacttagtagtgtttaggaaggactgcctgcctatatgtcagtggaaaacaaaataaatctcgagtttcacaacgcacaatggatcaacataaagaagaaatcgaaacgcataaattcataagattactgaaaaccacatccccaagatctcagatatgggaaaatattcatgtgtttgagagaacgagtgaaggtacacatacttgcaacatcatacacaataacagcaacggaggaatccctgatatagctcggaattagactcctgaatcgctcttgcccagctgtatccctgtcatatgatttcggctctcgatgttaatcatcaaaaaatgatctgcaatgttattcttcagtattcgaaaattgaaagaggctcaagatcttaccacaactgaagtctgaccgttcgatcttcaaggtacattgtctttgatagaaaatcaataccaattgtggcctgatgattatgaaacaacataaaaactacttagaaaaggaagaacattctgtaaaatgacgataagcaagcatggttcacatattattaggagcttaaacgtaattctcataatcacagaacaagatcagatgctttcattcatcaattgagaactaattcgattagataaacaatgataacatgatcaaagaaacatcctcatattagtgttactgcgatcttctattggactgaattctcgactttgtacaataaacgagagtgagcgattacgatgccaaaatctcattcagctgattgttacgtcctatacattgactaaaacacgatctacaaatcagatcacacataattacgcaaaaccaaacgcccgatcacgtaaacgagtaagaacttcgaactgaaaaacacgattcccgtccatgaaaacggatctcaaaatcaatcaaaccctgggattttcccgactataatccctcaaaatagaagcaaacgtcgtgcatcgtcgagataatacctagatttgaacaatggaaatttacctggtaagtgttgtcgaatttgtcgtacatgaatcgagtaatgatactggttttgccgacggattgatctcccagaaacaccagcttatacttagcgagtgccgagaccggagccatgatttctcaaggatctaactcgccggacggatctgagaaacgtcgagatctcgctttgctgagaataaaagtttccgatatttaccggagagagatcccgtcgctctggaattgcaaatactgtattagtgagagtttgttattcgtaaattgcagtttattcctcgagtgacccaattgggtcatttatgttaaattagaaactatttgagataagttacaaaatatataaaaacttagaagctgattaaggaatttactacattatgggcagcatttataagcccacgtaaggatttgggctagccttatagtagggggcacgtgtcatctcgtatgacctgaactatttttgccccttttggctacttgactcttctgtgtctctctcatcaaatcaaatccctaattctcgagctcgaagaaagagacgaaa

SEQ ID NO: 11621 - DNA, 3000 bp, Unknown
  misc_feature (1)..( 3000): cDNA_ID_2706991_gDNA_ID_2214506_Annot_ID_133759 3000 nt of promoter + ATG
tccctaattctcgagctcgaagaaagagacgaaaatggcactgagaaatgcaattcttcgtcacctgagggttccggtgcaaaccctaggattgaatcagtctaaaattgggttccttggtacgatccggtcattttcttcgcacgatgatcatcttagcagagaagctgtcgtcgatagagtactcgatgttgtcaagagcttccccaaagtcgatccctctaaggtcagctcgatcttcataaaatttggccaaatcgtgattcttatcttttgttttcctcattattgggaacaaaatgattattttgccttgaatatttgtcaatgtaggagcttttggttgatttcgtattgatctagtggaaatagagaccaaatgtatctgaaacgatgttgcattagtgttgttagtaaattgaaggttattgatctcaatgtggtttagtaagtgtagcttatcgtgttgttgttcctatggatttgatttgatatggtcattcttatggattttgcatttatgaatccttcatcaactctctctaataagggttgtttggttagggttatttttgttgatggctttgtgataaatatcgacaggtgactcctgaggttcatttccaaaacgatttgggattagatagtttggacacagtggagatagtgatggctattgaagaggaattcaagctggaaattccagacaaagaagctgacaagatcgattcttgctctctcgccattgaatacgtttacaatcatccaatgtctagctaatcgctgtgtgctctctcatggtttctccttcctttttcttgtatgaggttcttctctctttgataatgccataatgggatttgcaaaaaaatcacttttatttggagagcattgttattgactcttttaacggttccagtttcttaaaaagaaaacctttttgcttgaatcttgtgaaagttgacactttttcttgagttaatactttaatacgatttgtatataatacacttgattcttagcatggtcttgatcatacattgaagacgaatctttgaaaaacatacttgttttaaaaaactgatcgtctctcttggatacatatgcaagaccaagaaattggatcttatatactacattacatcataacgtgctattaactagaattgtttgtcagccatcttttggatcgaatacagacagtagttttcatttggacaagttttctgcttcatctcaactacagcatttgtaccaaaatacaccaatatctctatccacaagttagatgttttaattaggagatacatttcaggtttcgtttgaatcgattttttagtaaatgggacaaaatgggtgaacttacaatattaaaaacttgctaagctaattatgcaaaatggatagggtggaaggaacaaagcaagatgctgaaaccgcaacagcaatgaatcttgtaaacacattgtagtgatattgatcataatgactaaagaaagactaaataaacatctaacgtcaacaatatatctcttgattaagtttaacccgaaagagacagacaatggcgcaaactatagttgttaggaacgattctgagaagttgagacggttcttcagttccatgaattcctacttcactcctaagcaagccaatcattctacaccaaatctctttgctttcactaacattacttggttttccccatataaacgccaactttccgtagtattccccgatcccaatgcatcgagctttgtcaagatctaaaccataaaccactctccacaacatcagctcagagtcataccacattaacccaaatctaaggaagtaaacgaagagcacattgtcaatcacgcattttcctgtcttccaccaattatcttcaggtatcgtatatctttgataagaaccatctctagtatcgtaagaattcatgtattccctcgaatttaaagcataaaccttcctatcaagtgaaacacttgcatgcgtgaaccattcgtttctatcctttgccttaggaatcggcgctgcttcccaagtttgtgtctttaagtcaaatacttccgctaggatctcttcgcctctgttgcctccgatcacatagatcttaccaccgactagtcctacggtagctgataatcgctccacttgcatactaggtccttgacgccactgtccagattgggtgtcaaagatccatacgattgatgatgagggaaaattatatccgggaatgcagtaaatctctgtatcaattgcgatattggaaagagggtaagaagcatgcccgggacgataaggaacatcgatggagacgaagacattctcagtcgtattcatcttgttatcattcctccggagagtgaaccagtgaaaagtcgtccggttccggttcgggtatgtagttctggtcgagaagcatagataaagagagtcctttccgtgtaaagatcgcgtcttgtgaatctccggcgagcgaattagactccgcaaggacttggagacgcaacagaggattgggtaatatcgttttggtaccaaggctaagatgttcaatacgatgtccaccgggagtgagaacaatgacggcggcgtcaatgaagacgacggtggttggttggttttctgcggtggttcgtcggcgttagacatcgagagctattaggaggaggagactagagaacaactgagtgaatcaatcaaattgagggctttagccaaaaaccaaaagccggttaaattcttctctgattctgctttaatcggttaaaaccggtttatatttcttgtcttgatcagggaaacacacagagttttagaataaggcccaggaataagcccggtgagtgaatctttctaaggaatcgattttaaaacaaggcccattaaagggtgaagaaaaggcccatgaaaatgcttaaaccccctttgtctcccagcttcgtacacaggagagactgagataaggaaagaagaagaggaagaagaaa

SEQ ID NO: 11622 - DNA, 3000 bp, Unknown
  misc_feature (1)..( 3000): cDNA_ID_1808635_gDNA_ID_2214506_Annot_ID_133760 3000 nt of promoter + ATG
gtcgatacaacaaggcgtcgagctgactcagattaatgagttaatgggacccacaatcacctctcttttgaaaggcccaattatcaacgtccttgtctcccgggcccacgacagctgcccttgtaccccgtttgccctacttttttcttttttttttaaactcacctgcagttgacacgtgcggtgatcctcgctcgtgcgccagctaagatccgagttcgtgctacgtggctgttaggtaaaggtcttaaggtttgcatgggaattaaaatctgttgttttgagtctacggttactatttgatcttttagggtcgtcgtgtatgacacgtggccttagttactgaagaatgatctcaaccgctgattaattcgaatggtctagctctacgctatagccaatagctactttccttttgggcggttgtaataggtaggtacgacttatacacacaacgaaatattcatagctaaaccggtttaatccgatataaaaaccaatttgaacagttccacgtaatgccatgtcatatatttttaaccaattatgtactgccatatctacaactccacgtaaacttctgtagttactaagtgggccggttcgtgtcccaaattaggcccatatcaatgggttttgtaaatcaacggtcgctaatgttcccagtctatcggtgccgagatggatcaccgggaaaagagtgaccggcgactactgctatggttcttcgccgtagccaccgccgtaaaactccttctcattccgtcgtccagaagcaccgatttcgaggtccaccgtaactggctcgctatcacaaactctcttcctcttaccaaatggtacttcgacgagactagccaatggacactcgactatcctcctttcttcgcctacttcgaacgcttcctctcaattttcgcgcgtctcgtcgatcccaggatcgtagatcttcaatcaggactcgattacaatgccgaatctgtaatttacttccaacgaatcagcgtaatcgtctcagatctatgtcttctctacggtgtttatcgattgactcgaaaattagaaccgttgaaacgaaatctgatctgcgcattggtgatttggtctccggggctattgatcgtagatcacattcattttcagtataatggatttctactgggttggttattgctttcgatttcgtttcttcaagaagggagagatcttttgggtgggtttttattcgcagttcttctatgctttaagcatttgttcgccgtcactgctccggtttactttgtttatctacttaggcattattgctggtctggtttagttactggtttccgacggcttgtaactattggtgcggtggttgtggcggtttttgctgctgcctatggaccttttatctatcatggacaggttagtgtagttctttcctattcaatgttgaagaatatagccaaattcttttgagttcaagttgaagattctaatgttgttgatgtgtttaggagattgtgaatcatttttgttgttgtttgatttggcaaagagttagaatttgttagaaattttggtgctagagagctatttcactacttttatcaatggaaattatcctagacgaatcagtgaatctctatacatcaatcaagtcaaaccttgtcctaaatagatttattgagaaaacatcttatggtggtagttttcgtgttctctcgttgtgttgcagatacagcaagtcatcagtagaatgtttcctttcgggagaggattgtgtcatgcatactgggcacctaatttttgggttttctacataatactcgacaaagggcttgcggttttgctgcggaagctaggatatgaaattcaaattccttccgcatctttcactggaggattagttggagattcttcgccttttgcagttcttcctcaggtactactcttcatgagtatctgtcatatctcatgaattgtttcactcaatcttattctgttggactggtgcaatgacagatcacgccattgacaacatttgcaatggtattactagctatatctccatgtctcatcaaagcctggaaaaaaccacactcggggctcgttgctagatgggtagcttatgcatatacatgcggttttctgtttggatggcacgtccatgagaaagcatcgcttcactttaccatcccacttgcaatcgttgcagttcagagtctagaagatgctaaacattactttctggtttccataggtatatactattctctaaccagaatcaacttttacgcataatcattcattccttgtacttaatctctgtatttttcctgcagtctcttgctattcgctctatccactcttatatgaaccgcggagtacccgatcaaggttctgttgctgttattgcattccgtggtaatgtggctcggctttgcagctcaatacacagattataaggcgcagaagaaggagactagtgaaatcaagagcaagtttaggattggatgttttgagaagagctatctaatgggtttgattatagtagagatagtgtctcaattcttgcatccgtattttctaggtgataagttgccatttttgcctttaatgttgatctcaacatattgtaccgttggtattatgtactcttggatttggcagctccggaagatcctgacatgacatatagatagattcatgtaatagttaacttgattttagtactacgtgagtttttccctccgtagtatatgacttttcagtataccccacgatactgcattactgcttcggtgactctcaataaagtgcaattgagatttctcggttcaataaaacatacatcggttaggcttaatagaataaagatattgggtcttaatagttaaatgggctgtaatattggcccaatgtaaaacataagaagcactgacgagaaagctggagccaaagtcgtaacggaggaagaagaagatctgcttctgcaaaaaaccttatcctgctatg

SEQ ID NO: 11623 - DNA, 3000 bp, Unknown
  misc_feature (1)..( 3000): cDNA_ID_2711238_gDNA_ID_2214506_Annot_ID_133761 3000 nt of promoter + ATG
gatccatagaaagatcaatagaaacagagcaaatcttttagaggctttggagatataagtggttttaggagggtttatagattttagacaaaaaggtatttatatagaagaaaaaaagactatttgcttgattatgtaactgaagcttctactaagccacgacgagagttcctgtccgtacggtgtttccggcggcggattctttagtttcagaagaatttttccggagagatcttgaagattttttccactttctctccttagcttcatcagattcaatctgttcttctctacactcgttgctacaaaaagccttgtctcctctgtaaatcacaaaaaccataaacaatcagaccaaataaatgaattatagaaaaaaaccagatctagaaactcaattgaaagtttaatgctttagtttgaatcgaatcaatacctgtacatgaagatatcggagttaagaccaaggtgtttccggcaaagagaacacgattccaaaaagtgtggctcttcacaacccaaaaaaccagagtaatacgaagccatttgcttaattaaatacgaaagcttccgaatttacgatgacgaaatagactgcgaaaagcagattcgagaggaagaagaagaagcgagaggaggaggaggaagaaggaggttgatttggtgttcatttataaagccggctttaggactttctgcttgacttgagctgatcacctgtgtcacgtaccactttagttacagtactctacaatacatcctcaccgttcatcgtgaccgaatcttcatctcgaaagatctatacgttaaagttcaataattcattacttttattatattttattattgtctttttgtgttgtggtaaattctttttttttttctgattattttacctcatcgataaagttaaagtgcaatgaatcaaactctttgtccgttacgagtactattttctttgtttttatttttgcaattacattacgaatgtcgagtaaattttaaaattattttatttcttttgtaagagcaataaagaacatatattagtattattttgggaatacaataatttgggtggatctcgttcgacgagagaatcaaacaagtcttgcgttttgtaagattcgttggccacaataacatgcatagcgcatgatggtggacttttcccaaatattcaattaacattaaatgaaagtttctaaattttcgttaacaaaaaaacaaaaaagagaaagtttctaattttttatatgaatattactactaaaataatttctattttattaatctgttctcgtgtgtactttctctgcttttccttaggattcatttcgcctggacaatgtttcattgcatgtgtgtaatttataatcgcctctcgttttgtttaatgctttgcttgtacttatttgtatttcattaacttcttcaatggacatatcgacagtaacgtcttttttttattgttactatagtagagtgaattaatttattcgtgtttatagtgagacaaaaacattttggtacacatgtacatgtccaagtaaaaaatattccaaagacattggatgaatttaaatctctttcgaaatagtactattctattctatattttatatcgatatgaatactatagctaagaatcctctagttgaaaatgtgtaaaagagtctttggcaaaatctttgttcaaacaataatatttaaaaatacgatctaaatagtcataaagtttttttttaaaaaggttctagaacatgtaattcgaatacgtttacacatttactactactagtaatgtgtacatacatactccatacgctaatacttgtaataaaacgaataagagggtgaccgacctattttattcatttactatagtagtattaagttcttagtccgagttcaattatagttttaatactaaaaccacataacgtgtcacataggtgaaattctgtatactattataaatatcagataccgactagaaatatcacatttttatgctcttgattcatattataatcctccaacatgagacttttgactttttaaatcaaaggtaagaaaacactatcatgatttattaaattaaataagatcacgtcaagaaaactcaatgaatctgagtaagcaatgactcacattacgaacggcaaaccaataataaaacattaaaaatgtatatatttaaagtgtattaatacatacaaaaataaaaggtgttttcgtgatcaattataataaagttccaaaaaaagaaaggaggttttacataattggttaggaccacacaacttgtcatctgtcgatacaacaaggcgtcgagctgactcagattaatgagttaatgggacccacaatcacctctcttttgaaaggcccaattatcaacgtccttgtctcccgggcccacgacagctgcccttgtaccccgtttgccctacttttttcttttttttttaaactcacctgcagttgacacgtgcggtgatcctcgctcgtgcgccagctaagatccgagttcgtgctacgtggctgttaggtaaaggtcttaaggtttgcatgggaattaaaatctgttgttttgagtctacggttactatttgatcttttagggtcgtcgtgtatgacacgtggccttagttactgaagaatgatctcaaccgctgattaattcgaatggtctagctctacgctatagccaatagctactttccttttgggcggttgtaataggtaggtacgacttatacacacaacgaaatattcatagctaaaccggtttaatccgatataaaaaccaatttgaacagttccacgtaatgccatgtcatatatttttaaccaattatgtactgccatatctacaactccacgtaaacttctgtagttactaagtgggccggttcgtgtcccaaattaggcccatatcaatgggttttgtaaatcaacggtcgctaatgttcccagtctatcggtgccgagatg

SEQ ID NO: 11624 - DNA, 3000 bp, Unknown
  misc_feature (1)..( 3000): cDNA_ID_1396391_gDNA_ID_2214506_Annot_ID_133762 3000 nt of promoter + ATG
tgcgaataaaaacccacccaaaagatctctcccttcttgaagaaacgaaatcgaaagcaataaccaacccagtagaaatccattatactgaaaatgaatgtgatctacgatcaatagccccggagaccaaatcaccaatgcgcagatcagatttcgtttcaacggttctaattttcgagtcaatcgataaacaccgtagagaagacatagatctgagacgattacgctgattcgttggaagtaaattacagattcggcattgtaatcgagtcctgattgaagatctacgatcctgggatcgacgagacgcgcgaaaattgagaggaagcgttcgaagtaggcgaagaaaggaggatagtcgagtgtccattggctagtctcgtcgaagtaccatttggtaagaggaagagagtttgtgatagcgagccagttacggtggacctcgaaatcggtgcttctggacgacggaatgagaaggagttttacggcggtggctacggcgaagaaccatagcagtagtcgccggtcactcttttcccggtgatccatctcggcaccgatagactgggaacattagcgaccgttgatttacaaaacccattgatatgggcctaatttgggacacgaaccggcccacttagtaactacagaagtttacgtggagttgtagatatggcagtacataattggttaaaaatatatgacatggcattacgtggaactgttcaaattggtttttatatcggattaaaccggtttagctatgaatatttcgttgtgtgtataagtcgtacctacctattacaaccgcccaaaaggaaagtagctattggctatagcgtagagctagaccattcgaattaatcagcggttgagatcattcttcagtaactaaggccacgtgtcatacacgacgaccctaaaagatcaaatagtaaccgtagactcaaaacaacagattttaattcccatgcaaaccttaagacctttacctaacagccacgtagcacgaactcggatcttagctggcgcacgagcgaggatcaccgcacgtgtcaactgcaggtgagtttaaaaaaaaaagaaaaaagtagggcaaacggggtacaagggcagctgtcgtgggcccgggagacaaggacgttgataattgggcctttcaaaagagaggtgattgtgggtcccattaactcattaatctgagtcagctcgacgccttgttgtatcgacagatgacaagttgtgtggtcctaaccaattatgtaaaacctcctttctttttttggaactttattataattgatcacgaaaacaccttttatttttgtatgtattaatacactttaaatatatacatttttaatgttttattattggtttgccgttcgtaatgtgagtcattgcttactcagattcattgagttttcttgacgtgatcttatttaatttaataaatcatgatagtgttttcttacctttgatttaaaaagtcaaaagtctcatgttggaggattataatatgaatcaagagcataaaaatgtgatatttctagtcggtatctgatatttataatagtatacagaatttcacctatgtgacacgttatgtggttttagtattaaaactataattgaactcggactaagaacttaatactactatagtaaatgaataaaataggtcggtcaccctcttattcgttttattacaagtattagcgtatggagtatgtatgtacacattactagtagtagtaaatgtgtaaacgtattcgaattacatgttctagaacctttttaaaaaaaaactttatgactatttagatcgtatttttaaatattattgtttgaacaaagattttgccaaagactcttttacacattttcaactagaggattcttagctatagtattcatatcgatataaaatatagaatagaatagtactatttcgaaagagatttaaattcatccaatgtctttggaatattttttacttggacatgtacatgtgtaccaaaatgtttttgtctcactataaacacgaataaattaattcactctactatagtaacaataaaaaaaagacgttactgtcgatatgtccattgaagaagttaatgaaatacaaataagtacaagcaaagcattaaacaaaacgagaggcgattataaattacacacatgcaatgaaacattgtccaggcgaaatgaatcctaaggaaaagcagagaaagtacacacgagaacagattaataaaatagaaattattttagtagtaatattcatataaaaaattagaaactttctcttttttgtttttttgttaacgaaaatttagaaactttcatttaatgttaattgaatatttgggaaaagtccaccatcatgcgctatgcatgttattgtggccaacgaatcttacaaaacgcaagacttgtttgattctctcgtcgaacgagatccacccaaattattgtattcccaaaataatactaatatatgttctttattgctcttacaaaagaaataaaataattttaaaatttactcgacattcgtaatgtaattgcaaaaataaaaacaaagaaaatagtactcgtaacggacaaagagtttgattcattgcactttaactttatcgatgaggtaaaataatcagaaaaaaaaaaagaatttaccacaacacaaaaagacaataataaaatataataaaagtaatgaattattgaactttaacgtatagatctttcgagatgaagattcggtcacgatgaacggtgaggatgtattgtagagtactgtaactaaagtggtacgtgacacaggtgatcagctcaagtcaagcagaaagtcctaaagccggctttataaatgaacaccaaatcaacctccttcttcctcctcctcctctcgcttcttcttcttcctctcgaatctgcttttcgcagtctatttcgtcatcgtaaattcggaagctttcgtatttaattaagcaa

SEQ ID NO: 11625 - DNA, 3000 bp, Unknown
  misc_feature (1)..( 3000): cDNA_ID_2706988_gDNA_ID_2214506_Annot_ID_133763 3000 nt of promoter + ATG
attgggtaatatcgttttgggacgcgggctaagatcatcgaaatgatttccagtggcagtgacaaaaacaatgacggcgatgccgatgccgatgccgatgacgacgatggttggtcggtttttcgcggtggttcgttggagctagacatcgactctagtttaaaggagaagactagagaattgagattttattgatttattctatttcggtttcggttattagccaaaaaacaaaacccggtttatttattcttcgattctgtttcaatcggtttattttgtttctttttgcgctaaaacggttctttgttgttgtctcttgaactcaaagaagacaaacattgttcttttacatagactgatagacgagaattcgcttataattctgttacaagaatctctactacaagatcaaacttttataacgaagatagctaatcatactaaaatctgcaagagtccttcatagaagaaacacactaaaaaagatgtaaaacaaaccaaagccagagacttgagtacactagtcaaagaacatggcataaaccgatctttctctttcgcttcttagtctttgaaggaggatgtaaaactactttgatcgcttcatcaaacacggcttttacgttctgcaaatttagcatcatcataagtctttctttatcagattgaggtccaaaatatttggtctaattgtaaaatgtaactcaagcattaatggttactttaccatttgtgcttttgagctgcactctatgtatgctaatgctcctatttcctttcttagttcttgaccctataaaagaagcaatctttgagttataaaagagtttgattcttaacatggttcttgatcatatacattgaagaagaatctttaaaaaaacatacctgttctgggaagattgtgcaagcacctggataattctttgggaactgcatgttgtctcttagatctgcaatatcaagaaattcatcttatatactacataacatcacttacacattgatgttagattcctaacattcaagacataacagagtggttcattatcttcaacctgatttggttcccacaagaacaataggcacagtcggggcataatgtctcagctcgggtacccactgcgaaagaaaaccgatccatatgcacatgagatcagtgttgtaaagttaaattacagtgaaattaaaagtaaaaggaaagataatctcaagtctcaacctttttagcaatgttctcaaagctaggcctgctaataagtgagaaggcaagaatgaaaacatctgctcctctgtaactcaatggtctaaccctattgtagtcttcttgacctgtaatataatgtgaatcacccaaaagatatataacacaagaatcataattggtctcatttaagttttgaagaaacatgagcaaaatctgatagtgaattcaagaaccaaaacaatgttgcatcaaagattcaaatttttcaactgacttcttttaaaaggaccaaaagattagaccttgacatattgttgtagatataaagctaaagacaagaacaactttgacattaggtaaaagcatttaccagcagtatcccagagacccagattgacagttttaccatcgactaaaacattagcattgaaattgtcgaacactgttggaacataatcctgtaataacaagatctcaacagtcaccaaaagctatcaagaaaagcaatccaaaagagagagagggagagatggatttatatacagtggggaacgtgttgctggtgtaggaaataagaagacaagttttgcccacagctccatcgccaacagtgacacactttataaacgttgtagctgttgctgatgatgttgatgttgcagccattgaagctgacattgattgagaaaattctctgattttacttaccctgttctctctctttctgtggttttattctggttcaagtgaagaatgagaatgagacttgagtggtaaaaaaggagtcaactttaatttgagctgtcagagagccaaaacgccttaaaaataattttttattcggtgggtttgatttctttcctattttttgaatttagatagattttgccatattttacttctttccaaaaaaactctaattggtaacacatagctgtacataacttttatctgttaactttttttgaaatagtataaaattactaaaaaacagttatattaaaaaaaatgtataaaaaagctgagagaaaaatcttttagtaacgcttttgataaaaaaaattataattggtagaaatgaaagttgtacaaattatagtgctttgtttttttcaccaatcaatgcaaatgcaaaggtccaaatgtttcagcaaaatgaaaataagtggtggttatatcaaatcaaattttgtaaattcagttacatttacatgactaattttacaagatgtgtaattttaattatctctagatcatttgttttttttttcgatttaagtttggacaatggatcgaccaccaaacacatcatcattaacaaagatggaaaggcaagtccattattactaccgtgttgatacaaaaaaaaatgaattttatgatttctttcttcctaagatataatttggaatcatagtttaagtacaaaaaaatgtttccttctacgtgaatctttgtattacaactgtcagtgtcataaggcccatccgaaaagcccatttctaaatactagaattttaaaaaattaaacaatgattaaaaaaaaaaaaaaaaacaaagagaagaaaacaaaacagtagagaatgagaaaaaaccacagggaaaagcagagcactctttatctcttcttctctctttcttctactctgtgatcaaactatcgaagaaaaaacaaaccctagatttatccgcccctcttcttcctctgatgataagaaagtcgaagactttgagaatctaaagctgaaaaattttgttttttttcattgagggaatcgaatcgagttatg

SEQ ID NO: 11626 - DNA, 3000 bp, Unknown
  misc_feature (1)..( 3000): cDNA_ID_2711232_gDNA_ID_2214506_Annot_ID_133767 3000 nt of promoter + ATG
gtcaaccaacacacttgaaactccatacgagtaaaggcccattggggatgaggatatttgggccaatccttcttaccgtttttcgtttgttaacaattaccgaattaaaagcttgatcgccacgtctttttcttaatagaatatattgattttatttatcttttatttttagaccaagctcaggctatcatctctccgttaattagggttttcttctctatctcgatttcaataccattgttgatccgctgagctagggttgttcgatcccgataattgtgtcgcttagctctgatctctgttcatcgaatttggttaatttgttttgattggttaagatacattggaaagcgatgccaccgaaggttgtgaagaggggaggcgccgcgagaagaggtgggaggcttacgagatcggcgctcaaggcgcagaatcctcacgtggaatcttcccatgacgaatctgttaatatcggtgagctctcaggctccgatgcactggaagccaaggaggtgactccggaggttgataaaactgttgaggaagagaatccattagatgtgccgaagtcatcggattcaattgatgattctgaagctgcagcgaatccgcatgttgatgttccgtcgaaaagtaagattcttttagcctggttattaattttgtttcgtttttgggattctctacgttttcgttgttttgatggatctaagtttcgctttgacgaaagtttgtgacttagagttccaacatatctgaccatagagattaaatgaatgtctgaccattgaatgtatgaatctaatttggaggatggatgtttagctgtttttaattctgtggaagatagacgtatcttctgagattgttatctctgaacaaactttaggctacctggaatagtgtagatgttttactcgcttttactcgcagaggagactgaggtagaggaatctgtggatgattttggaaaagatgaaagattggatttagatgacaatgaacctgagtatgaggctgaggaatatggcggggaggagtttgaagagagggaattgggacaggaggaccatgagttggtaaatgaggagggggaagaactggaggaagagattgaggtcgaggaggaagctggtgagtttgcagacgagattggagatggtgcggaggaccttgatagtgaggatgatgatgatgatcatgctattgaagaggtcaagcatggagaaactgttgatgtggaagaagaagagcatcatgatgttctccatgagaggcgtaagcgtaaggagttcgaaatatttgttgggagtttggacaaaggtgcttcggaggaggacttaaagaaagtgtttggtcatgtgggcgaggtgactgaagttaggattttgaagaatcctcagacaaagaagagcaagggttctgctttcttgcgttttgcaactgtggaacaggcaaaacgagctgttaaagagcttaaaagcccaatggtaattgtctacactttagtatttgatggagagtttgtgtagctttacattttgtatcatgctcttggtcattgggactgcagataaatggtaaaaagtgtggtgtaactgcaagccaagataatgataccctcttcgttggtaacatatgcaagatatggaccccagaagctgtaagtatttgggtgtccgtagatatgtcaattaaacccaactccacagttcgtggtgatcctgacaatcaggtatttgttgttgttccagttgagggagaagcttaaacactatggagttgagaatatggatgatataacgttggtagaggacagcaacaatgtcaacatgaatcgagggtatgcctttttggaattctcatctcgctcagatgccatggatgctcacaagcgtctcgtcaagaaagatgtgatgtttggagttgagaagcctgcaaaggtctcttttactgattctttcttagacctggaagatgagataatggcgcaggtactcacattgcaggatcaattatttctagcaactttcatcctaccatgtcttctttagagcgttggaggagtttataggggcatgtgtgggtgccacctattctgtatggtgacttagaatacttgctaaacccatcatgaaaacagagtcagaatacatattccttttggccctctaacaacatgctagatactgaattattgattgttggtgaatctattatatctaacttatctatcttgctcatagtaattagttttatgatatttctggtgttacaggttaagacaatcttcattgacggtctgttaccttcatggaatgaagaacgtgttagagaccttctgaaaccatatggtaaacttgaaaaagttgagcttgctcgcaatatgccatcagcaaggaggaaagattttggctttgtaacttttgatactcatgaagctgctgtgagttgtgccaaattcatcaacaactcagagctaggcgaaggggaggacaaggtatgcataatttaaatgcattatccttatccacgaagtattttcttgctttctaattctctttttttttccaggcaaaagtgagagcacgcctgtctagaccacttcagaaagcaggtaaaggccgacaatctagtcgctcagaccagcggtctaggcatggggctggacggtctggaaggagttcatttgctcgtcttccacctcgtagccttgcttcctctcggagtgctagaggcgctggatctcgggccccatcttctagtgcaaagagagcttctggatcaagaggaagacgtcctcgcccacctctacctccgcctgcaagagctaggcccttgcctccacctgcaagagccaggcccatgccaccacctgcaagagccaggcccttgccaccacctgctaggtcatatgatagaagacctccaggtaccactggaattattacatgtttagttatcttttttagttgaatctcttttgtgttcatgtatcta

SEQ ID NO: 11627 - DNA, 3000 bp, Unknown
  misc_feature (1)..( 3000): cDNA_ID_2706977_gDNA_ID_2214506_Annot_ID_184136 3000 nt of promoter + ATG
agtgactcgcaagatggcgttgaaacatagaatgataactaaatgggccgttaatacaatcttaggcccataattatcaatatttaagaagtatatagtagaccgttaatacaggcttaggcccataacattcaatattttgggctcaactgtctaaatgtatgaattatgatcctagatgggaaatatgagtttgttcaaaaaagaatcagtatagcatcttctttacttttctttttcgtagtttttttgggaagtgaacttgtgattggtaggaaggttactggtgatcgacgtttcctttaaggccgacaaagttaatggaccacggggagttttataaaggaggttttctttctttctttctttagcttaaaaaggtgtaatgatgactttttcaatctcaattttaaaaactttttggtgtattaatattgattcatatacgtgcaatctggagatcaagacattgaatactaacaccaagacgaatttttcggattgatggtttttgagttttcaaaataagtatgttggaatggtgcattggcgaatgaagcattgaccagacaaaggtcattggaaagtagtttttttttttttttttgcgtaaagctaaaggaaggtaataaaatacagtacatgaaaacgaaataagtagtgatattaaatactttagttgacaaaattgacagcggaaaaaacattacatgaaggccataaactaagagctttgaccaaatctgaaggtaaatcaggtttcagaatcagaagaggatatctattccaactggtgcaacggtagttgtacctgttgtgtcactattgcttcatagtttcgtatttatttattgtttctatgatgctgatatttgataatatatagagatatattgtgtttgcgttaattggtttggtcagtcgacaacccaagatttacttgtttgttattcgttcatcaacaatcttatagttttctctgtcaaatattctctttaagtaattttttaattaggaagtttagggattttttataggtcataggtgtaggttaaattaggtttgacaatgtataaggtgactctataaaatattataagtttttctaaatgaatatatcattagttggattaccaatttgaatatttttatgagattttgattaagtacttgaagtgttacgtgaaaatatatatagttcatgttttatcatggcaatttttttaattatgactaaccattatatgaatgttttaaagaataattctcgtttctattataaattttggtatgaaatctctatttataaaaataatgtgtatgtttatcaacaaaaaagaagaagatatgtatatgttttcttgataatacccgtacatagaaaggctattactttgacttcaagtaaaggtgtagcaattatctatgttcttgcttttttccaagcatataaggataatcgttggaatctaggaaaacttttaacgcaactcaacttcagataacaaacgtaaattttaacatggttaaatattcgatctaatttgtatatatacttagcgacaccagctttcacttatataaaattcacgaataaaatagttcatatgatggtagctaaattttcagtactttagaaaatatgaaatgcaagtgaagtagaattcagataaccggccaattgaatagaaaatttgatttagttggatagaggaaaagaatgttctgaaaaagagtaatgatgtgcatgtgctcgcgaaagtttccatagtgttgatggtagcgaccagtcttgagttccattcacgctaaatcacgtggactataaagattacacgtaccataaccataaagctctataaagattgcaattcaaaaaaaaaaaaaaaaaaaaaagaattgtaataggggctagtttctgattttgcttgctgtaaatgtaacatttcctcaagttttgacatagtttttaaaaaacctccttatagggacatgtcacatgtgttggatgattgattaacaatccggtggaccagaaaacaatgagtaattatacggaggccggctttagttaaacttcacacatcaaaatatatggcccatccctcgccttttgcaattgtcgccgaccggcgcgtgacgatctacaaaatttcgattttaaactcagaaaaatacataatacaatatacgtcaaaattgcatctacttattctaatggtagttgaaggaaaaaaatcagaactctatgacttgtgttataccatatattacgacaaaaaaaaagggattaaaaagtcgttgacgtttgacttaagtgccaaattaattaaccaatgcttaatgacctaaccaaagtcactttttattttagtccggtatgacttgtgacggcgacgctgaaaacgattgaagtacacgcgcggggtcctccagcctaattgccacctgtacaccagccctgtccgtcgtaactataaaaatctcattttccttttttattttatttccaaacctccaaacaattaaagaaacggcaaaaatttatgctgaaatctttttttcttccttattctcctctttcgcttgatttcgccgtccgattatctctatcgccgataaatatccggcgtcactcagtagatcttgaagctgttgctttcttgctttgctcttcgcgcaagattctctttctctgttttcattgaggattcgaagttgatcgctatttgattcgattggttttgagttttcgatcctcgacggtgattgaattctcctctttactttatttttggtttttgaagctcgctgtatcaatcgtgacgttttttgtgattcgcattgtgtctgtagtagttgatcaggtttccgattggtttcttattgatttgattttaaaaattcgattgctgatgaaattatctggttctgcatttgattgttcgcaggatggagattttgaagtgaatcggaggagcgaataagagaaagtgagag

SEQ ID NO: 11628 - DNA, 3000 bp, Unknown
  misc_feature (1)..( 3000): cDNA_ID_3022692_gDNA_ID_2214506_Annot_ID_184135 3000 nt of promoter + ATG
cgaacaatcaaatgcagaaccagataatttcatcagcaatcgaatttttaaaatcaaatcaataagaaaccaatcggaaacctgatcaactactacagacacaatgcgaatcacaaaaaacgtcacgattgatacagcgagcttcaaaaaccaaaaataaagtaaagaggagaattcaatcaccgtcgaggatcgaaaactcaaaaccaatcgaatcaaatagcgatcaacttcgaatcctcaatgaaaacagagaaagagaatcttgcgcgaagagcaaagcaagaaagcaacagcttcaagatctactgagtgacgccggatatttatcggcgatagagataatcggacggcgaaatcaagcgaaagaggagaataaggaagaaaaaaagatttcagcataaatttttgccgtttctttaattgtttggaggtttggaaataaaataaaaaaggaaaatgagatttttatagttacgacggacagggctggtgtacaggtggcaattaggctggaggaccccgcgcgtgtacttcaatcgttttcagcgtcgccgtcacaagtcataccggactaaaataaaaagtgactttggttaggtcattaagcattggttaattaatttggcacttaagtcaaacgtcaacgactttttaatccctttttttttgtcgtaatatatggtataacacaagtcatagagttctgatttttttccttcaactaccattagaataagtagatgcaattttgacgtatattgtattatgtatttttctgagtttaaaatcgaaattttgtagatcgtcacgcgccggtcggcgacaattgcaaaaggcgagggatgggccatatattttgatgtgtgaagtttaactaaagccggcctccgtataattactcattgttttctggtccaccggattgttaatcaatcatccaacacatgtgacatgtccctataaggaggttttttaaaaactatgtcaaaacttgaggaaatgttacatttacagcaagcaaaatcagaaactagcccctattacaattcttttttttttttttttttttttgaattgcaatctttatagagctttatggttatggtacgtgtaatctttatagtccacgtgatttagcgtgaatggaactcaagactggtcgctaccatcaacactatggaaactttcgcgagcacatgcacatcattactctttttcagaacattcttttcctctatccaactaaatcaaattttctattcaattggccggttatctgaattctacttcacttgcatttcatattttctaaagtactgaaaatttagctaccatcatatgaactattttattcgtgaattttatataagtgaaagctggtgtcgctaagtatatatacaaattagatcgaatatttaaccatgttaaaatttacgtttgttatctgaagttgagttgcgttaaaagttttcctagattccaacgattatccttatatgcttggaaaaaagcaagaacatagataattgctacacctttacttgaagtcaaagtaatagcctttctatgtacgggtattatcaagaaaacatatacatatcttcttcttttttgttgataaacatacacattatttttataaatagagatttcataccaaaatttataatagaaacgagaattattctttaaaacattcatataatggttagtcataattaaaaaaattgccatgataaaacatgaactatatatattttcacgtaacacttcaagtacttaatcaaaatctcataaaaatattcaaattggtaatccaactaatgatatattcatttagaaaaacttataatattttatagagtcaccttatacattgtcaaacctaatttaacctacacctatgacctataaaaaatccctaaacttcctaattaaaaaattacttaaagagaatatttgacagagaaaactataagattgttgatgaacgaataacaaacaagtaaatcttgggttgtcgactgaccaaaccaattaacgcaaacacaatatatctctatatattatcaaatatcagcatcatagaaacaataaataaatacgaaactatgaagcaatagtgacacaacaggtacaactaccgttgcaccagttggaatagatatcctcttctgattctgaaacctgatttaccttcagatttggtcaaagctcttagtttatggccttcatgtaatgttttttccgctgtcaattttgtcaactaaagtatttaatatcactacttatttcgttttcatgtactgtattttattaccttcctttagctttacgcaaaaaaaaaaaaaaaaactactttccaatgacctttgtctggtcaatgcttcattcgccaatgcaccattccaacatacttattttgaaaactcaaaaaccatcaatccgaaaaattcgtcttggtgttagtattcaatgtcttgatctccagattgcacgtatatgaatcaatattaatacaccaaaaagtttttaaaattgagattgaaaaagtcatcattacacctttttaagctaaagaaagaaagaaagaaaacctcctttataaaactccccgtggtccattaactttgtcggccttaaaggaaacgtcgatcaccagtaaccttcctaccaatcacaagttcacttcccaaaaaaactacgaaaaagaaaagtaaagaagatgctatactgattcttttttgaacaaactcatatttcccatctaggatcataattcatacatttagacagttgagcccaaaatattgaatgttatgggcctaagcctgtattaacggtctactatatacttcttaaatattgataattatgggcctaagattgtattaacggcccatttagttatcattctatgtttcaacgccatcttgcgagtcactttgcttagttcttctcatcatcatcttctctatgattcttcagaaaacgatg

SEQ ID NO: 11629 - DNA, 3000 bp, Unknown
  misc_feature (1)..( 3000): cDNA_ID_2711228_gDNA_ID_2214506_Annot_ID_184134 3000 nt of promoter + ATG
catgaacaagaagaagaaatggattcatcttttaatccaacgatgtaaattaccaagaattagaatgagcatcattgttagttccacctccaaaattctcctgatcatcattaaccacctttgatcccaagggtcctccaccctacaaaaaatcatattagaccttccaaatcaagatcaataaatacttcaaataaaattaaacaagatctttttatatatgtatataaagaaagagagatcaaagacctgaagattattagaaaaccctagaggtgcatgagtagtagtagtggaggaagagttgtgaatggggaaagaaggagaagaaagagaagaggaagaagaagaagagaaaaaggttaagacattggtttcttcaaaaggaacgaggaagttcatattctcttgaatcgtcgtcgacgacgatgtcacttgttgtagatcgtaattactgaatactcttctccctcctccttccattgtttttaatctcaatctctccttgttcctttttgttgactattttgtaccaatttaaaatagtgtatgacactaatttatttctatataaattaataatgttttaaatgttactttgacggtttatcttctcttgctttcgtatagaaagggtagggcttcgtgtgtatgtccccacacgtgtcaaagaccctccaaacatattatttgtaccattcgtgtctttggcagtcaacttcatgtgaagtgttttaatgtttataaatcatatcgctaacaaaacaaaattcgattccattatatactcgaatatatatatttcttcgcataattcaaaacatcgtaaatccttgatatttatgcgtattgtggtcgaccaaaggcggcgatttttaaattcagtttaacaaaaaacaaattgcattttatgaatatatataggttattccacaacattctaatatcgtataaagaaatatatatgtacgaagaaatgtaaatacgaatatacaataagtacttttctgacgtactaattaatgatcagtataatactaacaacaaaataatcataccaataacgtttacaatacatcaattttattagataattaacgaattttactttcatttgtttaagcaagtaacctgaatcattaattaaacctaaccattccataatgaggccaaaagaaggtttggagtttggactgattattatgatcagctttctgaagcaacctaagaaattaaatgaaggacattgttcatttcacatgacaattttgatagagagagaaaaagatgggagagaaagaagttgtcaaggaggtaatcgagtgtggtggaggtacatcaaagcttccatccatctcaagatgtgtcctaaagctgatgatggaaacgacacccacaaaagttacctcttctcaaatcatgtcgaatccaccttcataatttttgttttgtaaatttaatcccaataattttatttgaataatttcattagactatatgtttatatcgtttattgaaaatcacaatttttttaaaaaaatttatgcatatgcaataatttataaaagtcgttagacatcaatcagaatatcaaacaaaactcatccatgtttttatttggcttttaacattcctcggtcgatgttacagtaatggctggtttgaaaaaaaagtgtatttcttacagtattgagaatttgatagttacacacaacaacacaaacaccccaagaaaagagccggccaacttcctccacaatagcaacacaaagcaacaatgactaatataacatttttttaatcttctttttgacaaaaccataaaacatgattgaggtggattttaattttatttttaatttaccggtccaatctactccataattaactatcatcataaggttcagaacacttgcttaaatagccattaaaggaattatactaccattagtttgttgatcttattcttaccgagttactgacaccaagagtactgttggtttttcaggtagaaacatatggctacggtagtttcaaaagctaaggtcttcttgtttgtttatgtatgaaaattatcggttttactctaaaagaatcatatataacgctttagttttcttttccgaacacattttattaagttgtaaatacaaacacaagatatagtcgaaacgtttagagttggaaaaatgatttgatcaaataaaactttatattaggttaaatgcaaacataatcaaaagatgcaaatgaaaagaggagaataattaattataagatcataggttaagacaaagagagaaagagaggcataataaaggttatatataataggggatgaattccatgcaacaatgattacacgtttcaatcaaatccgtaaggaattttccaaatttaatgatggtgagatttctaaggcatatttttctctcttgtaggtgcccactttgtctcctccttcattctcctttcgttttcttttcttagtttgttttcatactttgatgtctttgaaaattcatgtggagatgcatacacgagctcgtcacgtaccgttggctataacctaaacctaactacatagttctatatatatccactattttcatacaagttcaatatcaattttcattgaaatgagtttgaggataaaacaagaacaaaaaatataagttgggttcgtaaatacgtaagttatcaaaaaaaaaattgaaactctaaaatcaatactatttgtggatctatatccagcaaacaaaggaaaaggaatgtattactgaattccaaaataagatccagtgggcgacaaacccaagcccaattgtaattcaggcccaatgggcctacaaagcagaacaagataccaaattaaggcacaagttagttcgaaaaactttctccggcggaaacttacgccggcggcacaaactttgtgtcttgctcaagatgattgcgtcgaattttatgtaaacaattggctctccgatgttgtcagcc

SEQ ID NO: 11630 - DNA, 3000 bp, Unknown
  misc_feature (1)..( 3000): cDNA_ID_4254303_gDNA_ID_2214506_Annot_ID_184132 3000 nt of promoter + ATG
gggcatgtgactcgctgcttatcatgtgtgccagacacaagtggagtgtgagtaaactgagtaagccacctattttgtgccctgacacatccttcgctttttgtacatatattggtccacctcttattacacgatttaacaacatttctcattacattaggacataattttctgaatggaataataaactttattcaagtaaagaggagaaacataaagttttctttttcttttggattttagtatgaaatatatatataatagggtattgattccctcaacctacagcaacatcatggcatcatgcatggaaccttgagggacaaaaagaaagatttatgatctgatgtctagatttgtttgggttttatcttcatttcaacattattatgatcattatttgttttttcttggatcaacattacaatagtttctctataattagattttggggaaagtaaaagagatatgtccttagatttgtttgggtttatctttcatttttctggtaaaaaatgttttttttaatcaacatttctatacttttttcgaccactggggttttcggaaactaaagaaatactaaattaacgggccatgttaggcccattatcggctcaaaagatagttatgaagcgattgttgaagagatgagagactaaatgatcttcttttagttttactacaaacattgtacttttagtttgtcatatgagtcgagctgcttaaatgatgttctttttttatttatttttaaaattgataaaaaaaattgatgttctttctttgatcgtgacgtggcatcaaataattggttcttgggcccgtttgtgtaagccaacaacaacgacaattggtttcttttatattttcatgaacgattgttgtatgtatcatctcgatcttcttagaagatatctgtaacaaaaatgtcgtatgcaacttaagatgaaatggataatagctaggcccaccaaattaaaatggattggtctgataaaatcttcaacaacaaaaacatttgatatggtctgatttaaataaatatcttgaaaagagaattggcttatatagagaacataaaaactgaacttacgaattcggaattttaaaactgtacatgcaaccaagaaatgtggtcctccatctttatataatttcaagacaaaattatcgactagactaggcctattctataaatcaatattaaatgtattctaaaacgtaaatgttgtgaattatatgaattaaactaaaggaaaaaaggcgtatttgaaggatgggggatggtcacatggagtagcacatggaaattgggtatgaaaaagatacgagaagcgagagacacgttaagcagttattgacgatccccaaatactccaaaaacactatatactattatatctacactaaaaaatcatatcgtctgtgtaaaatcatattcttagttctgtcacgagacatgctttactttttcatcactccaatcccaatctaacctggctgtcatgtttgattaacttcaggtactaatcaagtatacgatcagtactatcatcatacaaaacccaaaataaataaaatatggtaccaagacgttgtgttccttgtaactttcgtttgcatgcaatagatctcaacgtcgataatttgaattaatttcggttgttaacaataaaaaagatttctaacgtataacacgatatagtttaaggactaaattttatatacacttcttacaattttcagtccacatgcttccattttaaattcagttattatgttttatacagtttcataaatatattcttactttaatatattatcaaatgaagcaaataaactcgagtaaattttaaacgttccaaagggatgatgataaatcagtaacagttgatcacacaagttgacatatcgtcctgtaaagttaaaatctttgtttctttttttccttaaacgtgaaatctcttcttttgtttcacttttttctttggttgctctttagcttttgcgtttgctgttcttaattagaatttgcctaaatgcgtccaaattagctgtccctcttggcatcttagatttagatcgatctattatttattcatatctatatttctgctaacaatcaatatatttttggggttataaagaaaggattaaatttgatgttaccagatgggaattgattcacattattagaaacacatgcatttcgtgagatcactattcgtgactttgtaattcaaataaaaaatttccccacatgtcatgtaacatggtgagtatgggatcccatctccatacactacaaaccaaaaattaagacacataatggttaatcgtttaattttcttgtaattcaaatatatataattgtaaataaaacttcgcgttatcatccgcagttacttctgatagtttctaaatttgtagatatataacgtgtatatttcatgaatcatgacgtagataaactatggattacctaaaatcagattacataattttataaatattgattaggatacgatattacgtttatctgtgtcgatttgatatgttgtgtttaacgcattaattgtgtttccctcttgttagaacttaagttttcaaattcaataatcattaacttgtgaaatataaaccccacatttcgcatatactaatgttttcattttcaaaaatactactatagtttggtcttttcggttccaccgccgacggtgatagaagagttaatgactactaatgaataacacaatttaaaatccaaaagagacacattcctaaaattgaatttggataaaataaaaacattattacttatttacaaaaataaaataaaataaaataataaataataactgcccaatataacgaccaacttaacacacacgccattaacaacagagcagaacaaagagaagactcttcttcattagatcacacaaaaaagtaacttttttttctttctctctctgtcatacacacaaaaaaatg

SEQ ID NO: 11631 - DNA, 3000 bp, Unknown
  misc_feature (1)..( 3000): cDNA_ID_3022706_gDNA_ID_2214506_Annot_ID_184129 3000 nt of promoter + ATG
gtgaaaaccctagatgtagaaggtgaagatttcttaagatgtttgtctaaagcatcattgattcgtttccgatcaatagctccaccaaggatctccgatctcgatgatccaccaccacccattattcctcctccactccgatccttgtacataactcgattcgattccctcaatgaaaaaaaacaaaatttttcagctttagattctcaaagtcttcgactttcttatcatcagaggaagaagaggggcggataaatctagggtttgttttttcttcgatagtttgatcacagagtagaagaaagagagaagaagagataaagagtgctctgcttttccctgtggttttttctcattctctactgttttgttttcttctctttgtttttttttttttttttaatcattgtttaattttttaaaattctagtatttagaaatgggcttttcggatgggccttatgacactgacagttgtaatacaaagattcacgtagaaggaaacatttttttgtacttaaactatgattccaaattatatcttaggaagaaagaaatcataaaattcatttttttttgtatcaacacggtagtaataatggacttgcctttccatctttgttaatgatgatgtgtttggtggtcgatccattgtccaaacttaaatcgaaaaaaaaaacaaatgatctagagataattaaaattacacatcttgtaaaattagtcatgtaaatgtaactgaatttacaaaatttgatttgatataaccaccacttattttcattttgctgaaacatttggacctttgcatttgcattgattggtgaaaaaaacaaagcactataatttgtacaactttcatttctaccaattataattttttttatcaaaagcgttactaaaagatttttctctcagcttttttatacattttttttaatataactgttttttagtaattttatactatttcaaaaaaagttaacagataaaagttatgtacagctatgtgttaccaattagagtttttttggaaagaagtaaaatatggcaaaatctatctaaattcaaaaaataggaaagaaatcaaacccaccgaataaaaaattatttttaaggcgttttggctctctgacagctcaaattaaagttgactccttttttaccactcaagtctcattctcattcttcacttgaaccagaataaaaccacagaaagagagagaacagggtaagtaaaatcagagaattttctcaatcaatgtcagcttcaatggctgcaacatcaacatcatcagcaacagctacaacgtttataaagtgtgtcactgttggcgatggagctgtgggcaaaacttgtcttcttatttcctacaccagcaacacgttccccactgtatataaatccatctctccctctctctcttttggattgcttttcttgatagcttttggtgactgttgagatcttgttattacaggattatgttccaacagtgttcgacaatttcaatgctaatgttttagtcgatggtaaaactgtcaatctgggtctctgggatactgctggtaaatgcttttacctaatgtcaaagttgttcttgtctttagctttatatctacaacaatatgtcaaggtctaatcttttggtccttttaaaagaagtcagttgaaaaatttgaatctttgatgcaacattgttttggttcttgaattcactatcagattttgctcatgtttcttcaaaacttaaatgagaccaattatgattcttgtgttatatatcttttgggtgattcacattatattacaggtcaagaagactacaatagggttagaccattgagttacagaggagcagatgttttcattcttgccttctcacttattagcaggcctagctttgagaacattgctaaaaaggttgagacttgagattatctttccttttacttttaatttcactgtaatttaactttacaacactgatctcatgtgcatatggatcggttttctttcgcagtgggtacccgagctgagacattatgccccgactgtgcctattgttcttgtgggaaccaaatcaggttgaagataatgaaccactctgttatgtcttgaatgttaggaatctaacatcaatgtgtaagtgatgttatgtagtatataagatgaatttcttgatattgcagatctaagagacaacatgcagttcccaaagaattatccaggtgcttgcacaatcttcccagaacaggtatgtttttttaaagattcttcttcaatgtatatgatcaagaaccatgttaagaatcaaactcttttataactcaaagattgcttcttttatagggtcaagaactaagaaaggaaataggagcattagcatacatagagtgcagctcaaaagcacaaatggtaaagtaaccattaatgcttgagttacattttacaattagaccaaatattttggacctcaatctgataaagaaagacttatgatgatgctaaatttgcagaacgtaaaagccgtgtttgatgaagcgatcaaagtagttttacatcctccttcaaagactaagaagcgaaagagaaagatcggtttatgccatgttctttgactagtgtactcaagtctctggctttggtttgttttacatcttttttagtgtgtttcttctatgaaggactcttgcagattttagtatgattagctatcttcgttataaaagtttgatcttgtagtagagattcttgtaacagaattataagcgaattctcgtctatcagtctatgtaaaagaacaatgtttgtcttctttgagttcaagagacaacaacaaagaaccgttttagcgcaaaaagaaacaaaataaaccgattgaaacagaatcgaagaataaataaaccgggttttgttttttggctaataaccgaaaccgaaatagaataaatcaataaaatctcaattctctagtcttctcctttaaactagagtcg

SEQ ID NO: 11632 - DNA, 3000 bp, Unknown; identical to SEQ ID NO: 11625
  misc_feature (1)..( 3000): cDNA_ID_2706988_gDNA_ID_2214506_Annot_ID_184127 3000 nt of promoter + ATG

SEQ ID NO: 11633 - DNA, 3000 bp, Unknown; identical to SEQ ID NO: 11624
  misc_feature (1)..( 3000): cDNA_ID_1396391_gDNA_ID_2214506_Annot_ID_184126 3000 nt of promoter + ATG

SEQ ID NO: 11634 - DNA, 3000 bp, Unknown; identical to SEQ ID NO: 11622
  misc_feature (1)..( 3000): cDNA_ID_3022714_gDNA_ID_2214506_Annot_ID_184124 3000 nt of promoter + ATG

SEQ ID NO: 11635 - DNA, 3000 bp, Unknown; identical to SEQ ID NO: 11621
  misc_feature (1)..( 3000): cDNA_ID_2992387_gDNA_ID_2214506_Annot_ID_184123 3000 nt of promoter + ATG

SEQ ID NO: 11636 - DNA, 3000 bp, Unknown; identical to SEQ ID NO: 11620
  misc_feature (1)..( 3000): cDNA_ID_1399068_gDNA_ID_2214506_Annot_ID_184121 3000 nt of promoter + ATG

SEQ ID NO: 11637 - DNA, 3000 bp, Unknown; identical to SEQ ID NO: 11618
  misc_feature (1)..( 3000): cDNA_ID_1013645_gDNA_ID_2214506_Annot_ID_184120 3000 nt of promoter + ATG

SEQ ID NO: 11638 - DNA, 3000 bp, Unknown
  misc_feature (1)..( 3000): cDNA_ID_3022725_gDNA_ID_2214506_Annot_ID_184116 3000 nt of promoter + ATG
agaaagccaaaacatgtctctttcttcaccaacatcagcaatagaccaatacggtgatgggcatttcagaaagatagcttcaaatgtagctgcttatatcaagatggttgcagagacacttgttaacactattcctaaggctgttgttcattgccaagtcagacaagcgaaactctctttgcttaattacttctatgcacagattagtcagagtcaggtttgttgtctcttacattcgtttatccagttcggttaactagctaagtttggttttagttccggtttaaggatttgggtttggttctttttagcaggggaaacgattgggacagttgctagatgagaacccggcattgatggaaaggagaatgcaatgtgcaaagaggctcgagctatacaagaaggctagagatgagattgatgcagcggtttgggttcgatgaacgaagccggtttgattttattggttgacatattaaaccttttaagttgataaacagacaactattgtagtacttgtggttatctccggtataatcgttgctatttcttgcacacacaaaattaacttaagttttttacttggtaataaaatttccttttctttgacccattaacttgggcctttgtgcccagataagagaattaaaacttacgcgcctaaaatggctaaaataaggcgcgaaacctgaagagccctagctcgaaggttccttctcttatcctcaacctcgcgattcgttattcggaccctacccagacgattcgttattcgcatcaggtttgattcatttgtctttgtctaattgatttgaattttcggaaacatttcttgacttctctgcttaatcgtcgcttacttacccgtgacatttgatttctagtaatggaagaaattggaggagctgaagcagtgataaatctcaaatctggatattcgctaccaatttcttatcacccatgttttgggcctcacgaggatctacttcttcttgaagctgatgacaaactcgtctctgatatctttcatcaaaggtacgattttgaagcttttgggtttgttttgatttttcatttgtgtcttagggtttcttaatttagtatccattctctttagggtaacattgagaggacttcctgatgaagatgctgttctttgcaccaagtctaagacttatgctatcaaatttgttggtaattctaattccatgttccttattcctccttcaatttttcctggagatgcacaagtttctgataccaacaacaatgtatcggttctcaaaatcgctcctggtaatatggaacttgttgaggcttctcctaggcttgataaacttaagcagattctcttggcaaatccttttggtgctggtgaagttgaagctatgatggatgttgataatgatgacttagaccatagtgggaagaaagatctagcgttgtacacttggagcgatttggttaacacggttcaagcgagtgatgaggagttacgcaatggcttgcagagtctttctgctattgagattgatggtttctggagggttatagatgagaattacctagacgtgattctgagaatgcttcttcataactgtgtattgaaagattggtcatttgatgatcttgatgaagatgaagttgtgaatgctttggtagctgatgagtttcctagtcaactagcgagtcactgcttgcgtgtgtttggctctaaagttaatgaaactgataagtggaagttggaaccgaggcttgtgtgtttgcactttgctagacagatactgagagaagaaaagatgagactagagagtttcatggaagagtggaagaagaagataccagatgggatggaagaaagattcgagatgcttgaaggagaggttttaacagagaaaatcgggatcgagacacgggtctatacgtttagtgtgcgctctctgccttcaactccagaagaaaggttttcagtactctttaaacatagatcaaaatgggaatggaaagacttagagccttacctaaggtaattgaacaaatcttgtgttgacagattccataagaagttgtgttattccatttatgaattgatttgggtttttgtgttatttgcagggatcttcatgttcctagactatctatggaagggttacttctgaaatacacacgcagagcacaacctaaagctgatgcaccacctgtctttagtgcaagataagatagtttctctatttctaaaaccttcggtttctttgttttgtgttatttgatattttagaagtgaaattacaggtcacagatcatccagtttcttaactaattggttaaaactatatttattggctgggcccaaaattgaagagaataggccctggatctggttgtcttgttaggcctagtctttgtcatgtctagtaattatacagtacaacgttaaataaatgaaaaacatgttacttgttttgtgcagagcaagagactttggttttgttactttgtttgattgagtgtagtcgaaaattggattacgttaactctatttgttttattttggttcgcaccaactcttaattaataaactaagttaattttgactaatcccaaaaattcaaagtagccaatctcaaattttctctctattttaacattgtttaatatactacttactagcatacatgtagtctcgagaattcgaatgtagaccactagtggaaattgttaatgattactatatactagcaaagtcaaattttaggaagaattttgatcaaaattgacggttaataagtcggaagttggattagttattagtagtaagttgcttcgaaactacaaacaaactactgtacatctaatcatcaccgttcaattaatccaaattctcccacgtgattaaatcatgaccgtcgatgtcatcaagataaaaccttatatatagacactacacaaagcagagcattgttacttgtgccatagtctccaaacattttctcgagaatg

SEQ ID NO: 11639 - DNA, 3000 bp, Unknown; identical to SEQ ID NO: 11617
  misc_feature (1)..( 3000): cDNA_ID_2707002_gDNA_ID_2214506_Annot_ID_184114 3000 nt of promoter + ATG

SEQ ID NO: 11640 - DNA, 3000 bp, Unknown
  misc_feature (1)..( 3000): cDNA_ID_2707006_gDNA_ID_2214506_Annot_ID_184113 3000 nt of promoter + ATG
ttatttccgctcatggtcatggatcacgatattttctggcaccgtcattgattattacttactaagatagatacatcctctatatagcgaataagaggatcacaattattttttctggtaccgctcattgattatatgcatggtctttatactgaaaaagggatcacgtaccaattatatagatacgtaaatataaggaagtatatatatatatatatattgattacatatgtagatacgaatatgctatatatatatatatatacatatatgtacgtctaatattttgtcagtaaaaatagcttacaaccatgtcttgtatatcatcacaatgcttcatcacaatcaaaagcatttgcattgtgttattattatcgattacttgtggagcagtttctgcaaattcaaattatggagaagctcttacgaagagtcttttgtatttcgaagctcaacgctccggaaaattgcctttggaccaaagagttatatggagaggagattctgcactcagagatggttctgatgctcatgtaagtttaatatccaaatctattttatttcattattctttttctgtaatgaatatttattacttgaaataaaatatttgccaattgtaaaaataggttgatctcaccggagggtattacgatgctggagataatatgaagttcggatttcctttagcgttcacaacaacaatgctagcttggagtagtgtagagatggaatcacagcttaaggcccatcaggagcacggaaacaccctcgcggctctcaggtgggccaccgattatctcattaaagcccatcctgagcccaatgtcttgtacggacaggtgggtgatgccaacttggaccatgcctgctggatgagacccgaggatatgaccactccgcgcccttcataccgcattgaccctcagcatcctggtgcggatctcgcgggtgagacagcagcagcgatggctgcggcttctttggcatttgcgccatctgattcagcctacgccaaaacacttattagtcacgcaaaagaactatttgaattcgctaaggattaccctggagtctatcataactccattcctaacgcgggtggcttttaccctagcagcggttacgaagatgagttactttgggccgcggcttggcttcaccgtgccactggagaccagacttatctcgatcatctaacacaagcttctaatagtggaggtgcaaggtccgtttttgcgtgggacgataagttcttgggagcgcaagtcttggtagccaaggtaggttatatgactttcctaaaagagaccatacccttacttacgccacaattcactcactcttttgcaaatgatagcttgtgtttgaagggaaagtgaagaacgaagggaagatgattgagtacaagagtatggcagagcaattcatctgcaactgtgctcaaaagggtttcaacaatgttaaaaagaccccaggaggtttgctctggttcttgccgtgggacaacctccagtacactgccaccgcttctttcgcattagccacttatgcaaaatacctcgaagctgcacaaacatcgattcaatgccccaatggtgatgtccttcaagcttctgatcttcttaaccttgctcgtgcccaggttaggcaggcattcgtgtttttcccttttaaattaaattacgttttgagaatcctcaagacttaattcttataaagatatgcaaagtgttcgtaatcttcatagttcttaggattttctgtgatgattacatggtttatgactaaaatgattaacataagaagaaaacaatttacatggtttatgtaataggtagactacatacttgggtcaaaccccaagaaaatgagctacatggttggatacgggaccaattatcctaaaagaccacaccatagaggagcctctatagtgtcaatcaaaaatgatcctaaaccggtgacatgtaatggagggtttgaagcttggtacaacaatccaaaaccgaatcctaatcttttggttggagcaattgtaggtggaccggacgagtacgatgcatacggagatgaacgatctgattttcagcacggcgagcctgataccgtcacggttgctcctttgcttggtgttctggctgccattgcatgaccttaagtattattttctttggactacatttcccaaggacgctctagcaactaacgttttaggtctaagggtagagaaacaaaatttgatttgttaaaatatcttgatttagtgagacattttgaagactgatgaggtttttcctctgtttcaagactaaagtgatttcggctcggttaagttattttggtttgtagcattgattctcttgaaaaattttaacaaaaaaaaaaaaaaaaaatctaagatatctgtacttgtactatcattcaataagaaatcaacaaatggttaaaaatgatgcaaaaaaaaataaaataaaaattaagacaaaatctgtaaattttatacaaaagattgaaagaatattgaccaaaaactgtaaatttctacatggatagtaagaaactttcaaaaaatgcataagattattaatagatatatacataagaaaaatagaaggaatatatttttaagaagatagcctaactaattatagttcgcaatcttattggtcttgtctatatcttttaggataaatgagaagatgtctaatattatgagatctaggtacaacatttttagctaatttatttttgagtaagaactacgaatgttaatgatccttaattagccatggattccatcttatatagattctctataaatagttgaacacggacatatacatagatatgccaaacacaagagaaaatcaaatcaattctacaattggtcttgagatcgtctaaagattatttaaaaaaacgatgtctcaactgaaaattggatcttcacaatgcttatggacaagtatttgcattgtgttatttgtattgtcgatg

SEQ ID NO: 11641 - DNA, 3000 bp, Unknown; identical to SEQ ID NO: 11615
  misc_feature (1)..( 3000): cDNA_ID_2708064_gDNA_ID_2214506_Annot_ID_184112 3000 nt of promoter + ATG

SEQ ID NO: 11642 - DNA, 3000 bp, Unknown; identical to SEQ ID NO: 11630
  misc_feature (1)..( 3000): cDNA_ID_4254303_gDNA_ID_2214506_Annot_ID_133769 3000 nt of promoter + ATG

SEQ ID NO: 11643 - DNA, 3000 bp, Unknown; identical to SEQ ID NO: 11629
  misc_feature (1)..( 3000): cDNA_ID_2711228_gDNA_ID_2214506_Annot_ID_133770 3000 nt of promoter + ATG

SEQ ID NO: 11644 - DNA, 3000 bp, Unknown
  misc_feature (1)..( 3000): cDNA_ID_2711224_gDNA_ID_2214506_Annot_ID_133771 3000 nt of promoter + ATG
ttcaaaatctccatcctgcgaacaatcaaatgcagaaccagataatttcatcagcaatcgaatttttaaaatcaaatcaataagaaaccaatcggaaacctgatcaactactacagacacaatgcgaatcacaaaaaacgtcacgattgatacagcgagcttcaaaaaccaaaaataaagtaaagaggagaattcaatcaccgtcgaggatcgaaaactcaaaaccaatcgaatcaaatagcgatcaacttcgaatcctcaatgaaaacagagaaagagaatcttgcgcgaagagcaaagcaagaaagcaacagcttcaagatctactgagtgacgccggatatttatcggcgatagagataatcggacggcgaaatcaagcgaaagaggagaataaggaagaaaaaaagatttcagcataaatttttgccgtttctttaattgtttggaggtttggaaataaaataaaaaaggaaaatgagatttttatagttacgacggacagggctggtgtacaggtggcaattaggctggaggaccccgcgcgtgtacttcaatcgttttcagcgtcgccgtcacaagtcataccggactaaaataaaaagtgactttggttaggtcattaagcattggttaattaatttggcacttaagtcaaacgtcaacgactttttaatccctttttttttgtcgtaatatatggtataacacaagtcatagagttctgatttttttccttcaactaccattagaataagtagatgcaattttgacgtatattgtattatgtatttttctgagtttaaaatcgaaattttgtagatcgtcacgcgccggtcggcgacaattgcaaaaggcgagggatgggccatatattttgatgtgtgaagtttaactaaagccggcctccgtataattactcattgttttctggtccaccggattgttaatcaatcatccaacacatgtgacatgtccctataaggaggttttttaaaaactatgtcaaaacttgaggaaatgttacatttacagcaagcaaaatcagaaactagcccctattacaattcttttttttttttttttttttttgaattgcaatctttatagagctttatggttatggtacgtgtaatctttatagtccacgtgatttagcgtgaatggaactcaagactggtcgctaccatcaacactatggaaactttcgcgagcacatgcacatcattactctttttcagaacattcttttcctctatccaactaaatcaaattttctattcaattggccggttatctgaattctacttcacttgcatttcatattttctaaagtactgaaaatttagctaccatcatatgaactattttattcgtgaattttatataagtgaaagctggtgtcgctaagtatatatacaaattagatcgaatatttaaccatgttaaaatttacgtttgttatctgaagttgagttgcgttaaaagttttcctagattccaacgattatccttatatgcttggaaaaaagcaagaacatagataattgctacacctttacttgaagtcaaagtaatagcctttctatgtacgggtattatcaagaaaacatatacatatcttcttcttttttgttgataaacatacacattatttttataaatagagatttcataccaaaatttataatagaaacgagaattattctttaaaacattcatataatggttagtcataattaaaaaaattgccatgataaaacatgaactatatatattttcacgtaacacttcaagtacttaatcaaaatctcataaaaatattcaaattggtaatccaactaatgatatattcatttagaaaaacttataatattttatagagtcaccttatacattgtcaaacctaatttaacctacacctatgacctataaaaaatccctaaacttcctaattaaaaaattacttaaagagaatatttgacagagaaaactataagattgttgatgaacgaataacaaacaagtaaatcttgggttgtcgactgaccaaaccaattaacgcaaacacaatatatctctatatattatcaaatatcagcatcatagaaacaataaataaatacgaaactatgaagcaatagtgacacaacaggtacaactaccgttgcaccagttggaatagatatcctcttctgattctgaaacctgatttaccttcagatttggtcaaagctcttagtttatggccttcatgtaatgttttttccgctgtcaattttgtcaactaaagtatttaatatcactacttatttcgttttcatgtactgtattttattaccttcctttagctttacgcaaaaaaaaaaaaaaaaactactttccaatgacctttgtctggtcaatgcttcattcgccaatgcaccattccaacatacttattttgaaaactcaaaaaccatcaatccgaaaaattcgtcttggtgttagtattcaatgtcttgatctccagattgcacgtatatgaatcaatattaatacaccaaaaagtttttaaaattgagattgaaaaagtcatcattacacctttttaagctaaagaaagaaagaaagaaaacctcctttataaaactccccgtggtccattaactttgtcggccttaaaggaaacgtcgatcaccagtaaccttcctaccaatcacaagttcacttcccaaaaaaactacgaaaaagaaaagtaaagaagatgctatactgattcttttttgaacaaactcatatttcccatctaggatcataattcatacatttagacagttgagcccaaaatattgaatgttatgggcctaagcctgtattaacggtctactatatacttcttaaatattgataattatgggcctaagattgtattaacggcccatttagttatcattctatgtttcaacgccatcttgcgagtcactttgcttagttcttctcatcatcatcttctctatg

SEQ ID NO: 11645 - DNA, 3000 bp, Unknown; identical to SEQ ID NO: 11627
  misc_feature (1)..( 3000): cDNA_ID_2706977_gDNA_ID_2214506_Annot_ID_133772 3000 nt of promoter + ATG

SEQ ID NO: 11646 - DNA, 3000 bp, Unknown
  misc_feature (1)..( 3000): cDNA_ID_2707044_gDNA_ID_2214507_Annot_ID_133775 3000 nt of promoter + ATG
caaatctatgtaaaataacatacttaatcatgatataaacatttttatacttggattatccacacgaaagaaagagttttgcttgagcaacaaaatgtgttcagaaggtacccccaccggtatttcttacaaaattaagggtacattttagtaatacttattaagttacatttcagtttctgaatttttttaaagatcatgagagtaatcgttgaatacaaatccaaaaatccttcaataagacttaacaattgtagttcttttgtttaaacttttacttcttttttttatcattcttaaggaaaaattacaaaattatcaaaaacaaatcagagataaattatttctagataaccactaatatggattatattctagagtttcatgtaaattatgtaatacaaatatttttggatgatctagataaccactaaaatggattatattctagagttttgaggatacaccttttttgtaatatatatatagtctggattcaaatatacttatatagacaggtgcaaacaaaaaaaaaaatctattcatggtcaataagtgaaagactacaaatctaaaacttattaagaaaagaaatctacattttgatatcatactgaatttgattatatttcatttaattaaaaaaagtttttaatagtgtatgattaagaagtaaagttaaaattaattataatttaggggtcacattttaaaaaattgttttagaccaccaattattgagaggtcccgcttaaatgttgaaactaaatctcatatatctagagttttgaggatacacatttttataatatatacagtctggactcaaatatacttacttatatagacatgcacaaacgaaaagaaaatatctatccatggccacaccaaccgaatagctaaaagtttaaaacttattaaggaaagaaatctacattttgatatcatactgaatttgattatatttcaattaattaaaaaagctttcaacaatgtataattaagaaataaagttcaaattaataaaaaaattaagggccacattttaaaaaattgttttagaccgccaactatttcagaggccgcgcttgaaactaaaatctcgtatcttctagggttttgaggtgcacctaattttcctatataaagaatttttacatacattttcgaaatcgccgaaaaataggagagagcgagagttcatggtttacatcaaccgaaactcgaattcttattaaggagaaattcattgtagttttgttgatctatatcttgtttcgcatacggatagatcttctgcggaccacaccattttttccgctcatcaacttcaaggggataattttacaccatttcaatctcataaggtatcttcacatccctatttgatttgtttcactacatagcgagcataatacttttgaataagttgtaaattttcatgtaataattgtttttaaagtgttagagacaaagggcatgaacttgttaatgttccagatttgattttcgtatgaaaactattttacataaccatcatgtgtagtgaatcttttatgtattcaattcaacgagatcttcatattaagattttgaagaaaagaagaataaatctatacatcataatttaaatatctacatctaatatatactaacaatttggtcacttggagttcattgccaaaagttatgtttttcaaagaaagttcactgccatcctagtgattctaaactcttaggatatgaatggtagacaataggaggaaaaggataaggtaaaaacttttaatgaaattgttttgactaatattttgggggtgaaaaaatatcactactctaggacactatttcgattaagacaactattaaaagaaaatcattttcatttttaaatgaatagttaacttacaatattcttagcaacaacaagtttcactaacataaaacaaagctcaatctcgtctttaagtcaagtaaaactttgatttattttattcatcaacctaaattaccattcaacaaattttcataacctaatgtaaaatgtaattctaaaaaaaaatacgaatgacatgcaaagtatcatgtgtccctacatttataaaaactctcttgtttcgtcttcttcttctccagtctctccgttcaacaaaaattgaatctttttgacatagtttgtataagaatcattgtatttggtattcttcttcttctttttcgcgaacgattactctagtcacaatcttattttctctgtttgagttcatatatacccacaagttttcttttcaaagtctcagttttttttttgctttttctatttcattgcaggttttcaagattccgagtatatactttgggtttgatcaagctctctactactttctttcatggcttcttttcataaaggtaacgtttttatttggattctgcatttcatagttttagaaagttttagacttttttctgactcgtgaagatgaacgtagcgtaacgattgttttaatcttgattttacatcctagagttgttttatttggaaagttacatgattgtgagtgctaattatattggttgatgtgttgtaccataaaagaggaaactttctttgtctaagatgttcttggaacttatagtaatgaatgtggattcactacttgctttgtctttgtgaatgaatgtggaaacatgtatcttgttctcttctgggttttgtgagcttttgtattgttgtttctagttctctggctcgttgatgtctcagcaacatgtagaatttgagttgttttgttctgcggttgtagttgaggtttctttgtgttactgtacaaggtaccaaattagattttctagttgcataaattttgatctgaaatgaagtttggtaaacaagctcatgtagcttttatttttgttgatacattgttattttaggacacaataagcttgttttttcttcttcatccaggagctgcaggtgactcaatgggaagcagtaaa

SEQ ID NO: 11647 - DNA, 3000 bp, Unknown
  misc_feature (1)..( 3000): cDNA_ID_2707024_gDNA_ID_2214507_Annot_ID_133777 3000 nt of promoter + ATG
ggcactaagctgattgtatctggtggttgtgctgattcaggagctctactcagcgatacattcctgcttgacctatcgatggatatacctgcttggagggagataccggttccatggactcccccatctcgcctcgggcatactctaactgtctatggtgaccgcaagattcttatgtttggcggtctagctaaaaacggtactttgagattccgctctaacgatgtatacacgatggatcttagcgaggatgaaccgagttggagacctgtgattgggtatggatctagcctccccggaggcatggcagctccaccaccaaggctggaccatgtggcaatcagccttcccggtggtagaatcttgatctttggtggttcggttgcagggcttgactcggcttctcagctttatcttcttgatccaaatgaggagaaaccggcatggagaatactgaatgttcagggaggtccgccgaggtttgcatggggacacacaacatgtgtggtcggaggaactcgattggtcgtattaggtggtcagaccggtgaagagtggatgttaaatgaagcacatgaactgttactagcaacttctaccactgcaagtacttgatcaagtgatgaagttaaaaaggcatttagatgtgttggacaaaagatctatacattgatcaaaaacatgttcatattgtctgtacatggtgagtttgatacgtccatgttttgttcatctgttgacttaatgttttttttttgtatatgcaatattacgaattggattgtacataacgtcttttgtagtgcaagtggccaaatgatctaaatccaaacctttttttttgtcctcccaaaatgtttcatgtctgattgaaatcaaaattattgtgtttagggtttagatcttttctccacggatcatataataattgtttttttttttgaagaattattaagaaaaaaaaggaccaaaaaaaagaaaagaaagattcgtcggaaaaagcaggaaaaaaaaaagaatgcaagaaatgtgaagtgtgtttgactctttcattggtcagtgtgaaaagtaaagtacatttacacttgcaagaaaaaaaacacagagacgaaccaaaacctcactctctcccctgaaactaatcttccactttttcactgtctgcaacttgcaactacaactagcaagcaagaacctttcttcttcttcttcttaatctcagattcttgtctgaaaactttctctttcattttctctcaatttaacactttcaagatgccgatcaacaaagacccatcaacacctcctcctgttatcggaaaaatcggtccttacactgtctttatgactcctcctgcgactcctaaaccacctgaatctccctccgctgtgtctcagaagcctgtgatggcaccaccggttcttcctccgccgcagcagtttaaatcggtggcttcttctgaccaggacggctcagttttggggttctttaaaaacgccgtcacaaaggttcaaaatggtgagaaatctgataaacaattaactgattttcagctcaaagtttcctcatttttagatcttgaatttgagattgatttttccgataccctttgattgattgattaggaaattgaactcaaaaatgatataaatcgttgtaaagtttctatctttgtgaagtgattggaaagtactaatgttacatgaattctagcttttcatactgtttatgtgatttggtcctaaaagcaattagattgtgaatttgacattcatgttgtgtgtgtgtgttctaatccatttgactacagcacattcaagtgtggatgatcatttggtgaggtggtttgggttaaaccaatctaagtatcagtgggctttggatgagtactacgaaagcaaagaatcagtaagtttttttttgagtctctatatgtttcctttgagtctctatatgtttagtttcttgttcttgcgggtcctgtatcgttctttgtactagtttctatcgataatcgattcctttagtccgattgattcatcagctttttgtttcatgtacattttgcgtaagcttagaagtaaagctagtttaagtgtttttttgctctttgcttctaggctaatgaacataacaatatacaaccaatgaaattgatacaacatatttgaagcttgatattcactcaatatcagttgtaaaaattgttcattggtatttggtagtcaaaaatgtcattgattggttttagagttactactctctttagtcattgatttgcttatgttcctcaagtaaatcttgtagttaacacatatcttttgaatcgaacgcaggatatgaagaccgtgaaagcaaaggagatgccggggaaagtacagagtgtataagcaaccatgtataaactcatttcccctttggccaattctaaaatctgtttttctgagagagttcaaaaaagcttgagtcttgaggaaagttctcttcagatgatatttaatcttagagatttcttttggtatatttcaaaacctatgtagtagctctttctagtttcatctaacaatggtgaaatctccaaagcaaaatggagagatgtcattggtcatttggtttgttgtaagtttaatcacattatttactttttaattgtatcgttataatctatatattgtctcaattcaaaaaagtttgctcagtgtttttcttttgattgttgtcatacatgaaaacttttgctagatacctctcaaaacttcaataattatcttcatcaaacctaacaaggcccattacaaaggcccaaaaacattattgtttaatattttccgattaaataaatagataaaaactgaaatgtaattgagcagaaaaaaaaacaaaagagacgaagaagggtttaagttagggcttttgaagtaaaccaattttgtgcgtctcccttttcttcttctcttcccaatttcaccgcctctctctatcgccggaaattaaccatg

SEQ ID NO: 11648 - DNA, 3000 bp, Unknown
  misc_feature (1)..( 3000): cDNA_ID_2707040_gDNA_ID_2214507_Annot_ID_133778 3000 nt of promoter + ATG
gcaatttactgtcttttaacaaccatctccatccagtttttctttaatggttgagtgggcaaaggtatataaaccgtataccaaaaattgtgccaaagggagtgtgggacactatcaagagattcttctaaacatgaaggaagatgaggtacctaacaaaatctcatctctgtcattatgcatttgttttatattaaatatttagattatattttttcagattaaatggcagccttatagcaaagttgaatttctcgaggaatacacctctcaattgagtatggtatttgcacatgttccatgcatctgttttaacaccatcgcatacaaccgaactatttggaaaagccaccaaatagttctccgattaggaatgacgagaccttggaatgagagagcctccaaacaagtggcatgaaagcagtaggtgggttgaccattcacatgtcactgagctggtcgagaccttgccagaagaaaccagtagatcggttgatgcaaatgtgattttttttttttttctaacacaaatgaatttggttctcactttacttgatttaacagttggagtcctcggatgaaaatcacaaggaagcaaatgaagaggagggagcgaatgaaacggtgggagcgaatgaagaagagggagcgaatgaatcagtatgtcattctcaataatgcaaatgaatttggttttgtaacatatactctaagatattaggaaactaaatattaataactggcaggaaagaagcgatctttgacttcttaaaagaggaagagataaaatactaacagatagatttactccatcttctcgcaccagaaacatggaggggaacaagaaacaaaaattacgcttgatagcctcgtttcctccaaaatcgaggagatgatagattttggaggctatcaagaaacaagcgtggcctatcgattttggaggaaacgaggctatcaagcggaatttttgtttcttgttcccctgcatgtttctggtgcgaaaaagatggagtacatctatcggttggttttaattttccttcacttctaagtagttcgtctcttcctcttttaagaagtcgaagatcacttctttcctgccagttattaatatttagttttctaatatcctagagtatatgttacaaaaccaaattcatttgtattattgagaatgactaactgtttcattcgctccctcttgttcattcactcccatcgtttcattcgctccctcctcttcattcgcttccttgtgattttcatccaaggactccagctgttaaatcaagtaaagtgagaaccaaattcatttgtattagaaaaaaaaaaaaaagacaattcacatttgcatcagccgatttactggttttctccggcaaagtctcgaccacctcagtgacatgtgaatggtcaacccatctattgctttcattccacttgtttggtggctctcccatctccaaggtctcgtcattcctaatcggaaaactatttagtggctctcccaaatagttcggttgtatgcgatggtgttaaagcagatgcatggaacatgtgcaaataccatactcaattgagaggtgtattccttgggcaatataactttgctatatggctgccacttaatctgaaaaaatataatctaagtatttaatatagaacaaatgcatatgacaaagagatgaaattttgttaggtacctcatcttccttcatgtctacaagcatctcttgatagtgtcccccacttctgttggcacaatttttggtatacggtttatatatctttgcccactcaaccattaaaggaaaactggatggaaatagttgttgaaagatagtaaatcgctctaatgcaaatacctacacgaaaaaataaaaaacaattaacattatacaaataatcaacatcaacataattagtttttgtttcacataaaaactttacttgcagagcaaagacaaaaccgcagaaaaatgtggtttgacctttagtaaaagccttcttccatttgcataaagcgtcttttaggatagttgaagatgatgtctaccctctaaacacacaagattatatggcagacaccacccaaaaccaaggcgtaacacaaacacgtaacagtgtacaaacttcttctagacgtgcaaggcaacctcgaagaaggtctatcattgaaagcgtgatcgaaaatagtggaaactttattacggagtatcgtgaaagacggggtgttgtacttttgtatcaagatgttattaacgctcttagacgtcttgatgtcccgaagcgtacaccattctggcgggctgcagtacgatgtcttgctcaagccaactatgcatcggcttttgttgctctagaagaagaggaaaatattgattggcttgaagctattactggattcagcaaagacggagaacgtttcgatgagcaagaattgggttttggatgcaatggtttcatgataaattcaagtttctaatgtttttaaatcaataaaactgattctaatacactcatttggtaaaaccaaaaaaatctcataagaaacttacaggatattttgtgtaaaccggatagataaactaaaccggtaaggtaaaattaagaaaccggtctggttaaagatggaaaaggagaggcactgagaagagccgagtcatcgaccgaccgaatcatctctcttcttcttcttctcctcctcttagaagtgggcggtggagacttccattacctacaaatatcagattcctcttttcttcgctcgattccatttcaaaatctgttcttctatctcctgttcctgaagaagacgatttctgggtttgtctaaagtttggaacttttttcctgtggagacttcgattacctacagatatcagattcctcgattcaaaatcaaactttgttcttctgggtctcttctcctgttgctgaggaagaagattagtgggcttaagctttattttgtgggtgtgtatgcaaaatcaaatg

SEQ ID NO: 11649 - DNA, 3000 bp, Unknown
  misc_feature (1)..( 3000): cDNA_ID_2707036_gDNA_ID_2214507_Annot_ID_133782 3000 nt of promoter + ATG
tctctctgatcctgctagtgctcggcatttaaagtttgcgaggagtaatgttctcaaaagcatccagctcgggaatatttggccctcctttatcctattctcgattctctctatccctagatagttccctcctttagcataacactgaagcatcaaggaataagatgtttcagtaggtttgaaacctttacttttcatgtcggaaatcacattttcgcctgatctccaatctccttttcttgccaaggcattaagtaacgcgttgtaagtcgtaacgcaagcgttgaaccctgctcttgtcatctcaccatacattttcgatgcatcaacctctgaaccacatcgcccataggcactgatcagcgtgttgaatgtgtccctatcaggttcaaatccgcagctcttcatttcacggaacacccggttcacaaacttatccatacccttattcccacacagagcaagcattgtgttccaagtggcacgattaggggaacatccattagacttcatatcacataacatctttatcatttcgttggatctcgacttcttccccaacagactaagcactgcattgtaggtgcaagtattcggaacacaaccagcttctttcatactataaaacagcttcaaagcctcgtcctcctttcccgcctttccatatgcatctatcactgtagtataagtgattgcgttcggcattacaccctttttcgtcatcatctcaatgacaccagcagcttccttgctaaaaccagctctaacataagcagcaacaagctcattatatgtcacagaatctgctgggcagctattttcctccatctctttcaaaacactcaacgcttctgtataaactcctgctttaccaaaaacttgcaacaaagcattgtacgtaacagtaccaggttcatagccgcatgacttaagttcagcgaaaaactccttggcctctcttaacaaaccttctcttgcacaagcagagagcacagtactacaagtaaactcatcaaacttcaatcctttgcttctcatttcatctaaaacccctagaattttccgccaagatcgacccattttcccgaaaacatcgagaatcacattgtaagtcaccaaagtaggtgaaggacccatctctttcatcctctcaaacaaatcgatagccttttcatacttcccagtccgtgaatacgcatgtaagatcgtcgtgtaagcccgaacatcgaggagatattcttgtagaggaattttatcgagcaacttagctgcaacagagtactgagattctctacctaaaatcctaacaaagatttcgataacttgatgatctagcttcaaagctccagaatttgaagacaaaactaaccattcaaacaaaaaaacagctctttcccaatgcccagaatcatctagacccttaaccaaactaaccaaatcagttctaagcaattccgatttcacagaatcaaaaaacctactcaaaccagtcaaaggctgttcaacaatggaattaaccaagacaacttctttcttacacaagagtttcaaagacccatttctctcgttctcaatttcaatacccagaatgggtttcgacgatgatgaatcagtcgagacttcgagagaagggaaacgagcggcggcggagttggagtgtctaggaggcggggaagagaggtgaacgagatggtgaagaagagaatcgagagggaaagaaggaggagaaggaggaggtaagtgaagagtagcggaactgaatttgatagattggttagaggattgagatggtggaggtctcttggattgaattgggtatggaggtttgtgagggaagagtgctccgtccattgaaagacgttatccgaaattgggattgaaggagaagaagagtgagtgaaagttagcgcctttgggttgaagttgagattttgaatggccgtaaaagggactcgtccctatcggcacaagattggcctttccagatgatgcgttacgaacatttttgttctaatccgtatgactgaatatcttaactaaaccgaaccgaaccgaatttgaactaaccggaatgtatacacgaagtaaaaacaatagataaaatgtgaaaaaaaaattaaaatccccaaactgtaaaaaatacaaaaaaccataatcagattttgaaatttgaaatatttttgcgattttattgagttcatgtgtattttaaacgaaaaaaattacttgattagaccaaattggttcagacaaccttaaatctataaattggtttgttagattttacaccaatttgatcacttaactaaattaattaaattagatgattatcccaccatatttttgagcattaaaccataaaaccatagttataagtaactgttttaatcgaatatgactcgattaagattaggaaaaatttataaccggtaattaagaaaacattaaccgtagtaaccgtaaatgccgattcctcccttgtctaaaagacagaaaacatatattttattttgccccatatgtttcactctatttaatttcaggcacaatacttttggttggtaacaaaactaaaaaggacaacacgtgatacttttcctcgtccgtcagtcagattttttttaaactagaaacaagtggcaaatctacaccacattttttgcttaatctattaacttgtaagttttaaattcctaaaaaagtctaactaattcttctaatataagtacattccctaaatttcccaaaaagtcaaattaataattttcaaaatctaatctaaatatctaataattcaaaatcattaaaaagacacgcaacaatgacaccaattaatcatcctcgacccacacaattctacagttctcatgctaaaccatattttttgctctctgttccttcaaaatcatttctttctcttctttgattcccaaagatcacttctttgtctttgatttttgattttttttctctctggcgtgaaggaagaagctttatttc

SEQ ID NO: 11650 - DNA, 1878 bp, Unknown
  misc_feature (1)..( 1878): cDNA_ID_2711125_gDNA_ID_2214507_Annot_ID_184166 3000 nt of promoter + ATG
atataacaataatatatgatattctgaaaaaattatgagcaactatgttacttgtgtgatttaaaatttgcctaactcaattttaaactaaatcttattttatgtacttcaacaacattgtgataggctcatgattaaaatttggattgacatcaactgaacaagatttgaaaagtattcgtatgaaaaaataaaaagataacaaaaattaaatgtcatttaagtcaatattttttgatcttctgtcattgcatatatcaatattagagaaatgatcatgtcttgaatgatttgaaatttgtctaacttgattataaataaactatttctagtttgatgtgttcacttgatataatactccaacaacagtgttatcgactcatgattaaatatatagaattgatataaactgaacaagatttcaaaagtattcatatgaaaagaatttaaaaaaaaacaaaaattaaagcagcatttaagtcaatacttttagatcttctctcattgcatatatccatataacagaaatgatcgtgtattaaattatttgataggtctaatgttttaaaggtttattatttaaaaaaacttgaatgtcaatgttatcaaagactcaaaataaaattactaaactaataagaggtttggtaacgaacaagtacaacacaaaaaaatagtataataaaaagagtatagtaaaagtagtgcttaatttattatcattaattttttttatttttttttattttaaagaaatcaattaagagtaggattgatgatatatttaatttgcttatttaatttgattaatattttaatttaaaaaatatagaatgacacatgtcatttttttttgtgatgatgtgtcattcatttggagagagttggccaactttcatatatatgatttatattagtcaattggagaaatttacacataaagactaatcaacttgattactgcctatatctcatccctcgtgatgatctccaatttcataaggttttttcaagtgatcattcacttaattgcacagaaatatagtaatgtttgatctttttatactttagtatggtccacgttcattattttgcaaacttgcatgacttgtcaacttatattgtatatcatcaaaaataatgtattccacatacacaaaaacttactttccatcactagagtcaactttaaatcctatcctcgttgtaaacttagatcttgagaaggatgtaatctggtaagatggatcaaatcacatgagttcttcttcttagtccctcttgttcaagtagttgctaagaagtggtaacatggctttgagttggcaaagataagattaagatcaatttaaacttgacaccgagactggtttagattttgcctttgattaagaaaatctgattaatgacacaaaatatacatttgtttttataactgtaactaatttcttcataattataatttcagtcaatactagtatactactctttaatgcatcataaaaaaaaacagccatatattgagggttgaattatattgtacccaaaatacatggttgaataacactctcaaagaaacatacataatcaaaagtcctcaattaagcaattatagcctatatataacaacagtataataaaataaaatattatacaaatcactatgtgagcctcaacctagcctcacatcaaactcgcaaaatatatgattggacattacagagtgtaacaaagtcattatcataattgtattcttcaaattataaaataaactaaattgcatgtaccatacgtaacccgtaattgtaaatttgatcaactctataaatggagacaaaaacacacacaatgatcaaaaccttaacattctaagccatg

SEQ ID NO: 11651 - DNA, 3000 bp, Unknown
  misc_feature (1)..( 3000): cDNA_ID_2687599_gDNA_ID_2214507_Annot_ID_184164 3000 nt of promoter + ATG
aaattgtttttaacagacctctgtaaaaatttaattagcgaccttttctatgctaaaatatttttcaagtgtttatatataatcaattgatatatcaaacagaatcaaaagcaagggttaatttgcaaaatggctaattttttttatagttgctaaaaatataattttaaataactaactaaaagcaaatgaaaaagtactttaatagttgaccttcaaaaatatttcatttaatattcacgtagagctactcgttttattcattggtaaaatttaagaaaacgtggtaacaaatgattttcttttttggaggctaatataataatgaatactattaagtacgagagaaaaaaaagattaggctaagaactaataataatggaatgatggaatataaaaattctattttgtttggatgatctaacctttcatttaacctaaatgggtgattttcttttctgtaatatatcacttttatattatatgattttaatgttaacagattttattaaatagagttgaagctatatgatttcaggatgccatatcatactaatattctacgtacaaaacaatttagcacagaaatagttttaccgaaaactaattgatggcaagaaatcacatgattattattttttgtaatttgttttgtatattttccattaatattttgctaattaactcagctaaaaatgtttcaaaaaatagatctgattatttggatgttggttttatatttccttgttataaaaacaaagaatatgacgaataaatttaactttttgaaatcctaaaaaaaaaagcatacacatttaaataaatacttttatgtatttacctatgaaagttaaattgattttgtctatcagatacataaatgatcaaataataaatgagaaaaacctgcccatatgtgccgatatatatccagttgaattaaaccatcatcttcttgtttctttgtttttaaaattctcttatgaaatcgatcttttagataaaatacaatcgaatttatggaagcaagaaaaaaaaattacgtaggggaggtgtattattgggggacccagcacgatcaaaaagtcaatattcatcagccaatttgctgaataaataaataaataaccttgaaaacaatttttggttaaattacaaaaataatgatatccacaaacatgtgaattgttccagcaattgctgaccttgccatgaggcaccttggaagagccattgcttcattacaatcctttaaagccataaatatgagattaggattaccaaaatttcacatataacaaattgttttatatcattactagcttaatatgtgttttattatagttttagatcgacgtcatctgaatattttcccccaaactcctaaattttataatctgtgtctaaacctaattttatatttcaaaacatccctttttctggaagaaacttgtcttttaattttttttttttttttcacacttgtcttttaatttccttaagagaccaaatcaagttaatttagtgtactcaccacctttaaaacaggtcaagttaatttatttgaacatcagtaataaatttatgaacatctcttttcaacatcggtattcttaaatagtgttttagaatcgtcattttaactttatgtttcactaaacttagaaaatatttagttttttttatctcaattagtaattatcatttaaatttttattttctcggtttctacttcgccactattatttaacatattattaaacaaattagtattatacgggttgattttaattttccaattacaaattaattaaaattcaactttttgattggttgtataatccgaaggaaaaatgtttacatacgaattgttttaaaaacactttgatttaaaagtccgacctaaacaatcaacatgaaaattaaacttatgagcaaattaggttgatctagaaaataacttttgcatttgtctcatagggaattataaagttagtatctacacacatatatcaaatatacatgttatatctatattactctctctctctctctctctctctctctatatatatatatatatatatatatgtatattcacaaatccatgtatgtattttaaattttgtttgttttttttttccttcaaaatgagtaacttatatagaagtcattaagattagctttgcacaactctttgggaacaaaaaagaacccaaattttaagcattattcaatgttcatataattattatgtatattatttttccttattgattatcaattttatatacacaaaaagatatcagtgaagaacttatgattgtgcatattttctgtccatacataaccacaatattaatcaaaaatttaaatttatcttagatatttttcttatgataattcaatactgtataattttttaaaatctatacattacagttttgtcttttaaatcatattctaatatgcataaatatctagaaaaatactaactccatagaattaaatttcttatgtaagtttagtatattatcctaaatttgtgttaatgttaagatttctactaaatttgatactcaaaagtaaaaagtttctcttaatagaaaaaaataaatatagattctcttacattacaggatcagagtataaaaccagtttaagtaaacaatgtttcaaaaaacagtatgatatctgaaattttaattataaaaccaaaaatccaaagtcaaatatacgttttccaagtgagaaaggacccataaacaattaacaaccattgatgatcaccaaatcataatcaacggtcgaaatgaatgaaaaataaaagtctgaaacggtggagagtttcgtcgttttgagtggttataaaaagagaaggcgtatatctcctctgcaacagaagctcgctttctctctctctctctcgtgtgtgtgtgtgtgatcgagtggtgaaacgacagagaggggcgtcgttttgttgatttcttctgggtgaag

SEQ ID NO: 11652 - DNA, 3000 bp, Unknown; identical to SEQ ID NO: 11649
  misc_feature (1)..( 3000): cDNA_ID_3022338_gDNA_ID_2214507_Annot_ID_184163 3000 nt of promoter + ATG

SEQ ID NO: 11653 - DNA, 3000 bp, Unknown; identical to SEQ ID NO: 11647
  misc_feature (1)..( 3000): cDNA_ID_2707024_gDNA_ID_2214507_Annot_ID_184158 3000 nt of promoter + ATG

SEQ ID NO: 11654 - DNA, 876 bp, Unknown
  misc_feature (1)..( 876): cDNA_ID_3022366_gDNA_ID_2214507_Annot_ID_184153 3000 nt of promoter + ATG
aacataataataatgtataaaacataataacaccaaaagttttaatacagtaaaatatgaaaattatagtcaaacaaagaacaaatatgaatttaagcaaaaaattattataaatctattttaaagaatttttatacataatatatatatatatataattgatacatttatataattattaacttatgatattgatgggaccatatatttacatagaactttcaaaaaaattattatcttattgatttatcgatttgtgtcactttttacattagtcctaactcgtgactggaaaaatttattaattttttgaggttctactgtatataatacttaaactgattaatgagatatatccatttaataaatttataaataaatttaaattaaaaataaaatggaatgataaagattttttttaacagagttttctagcacttaatcttctttgcttccctttatttaccataaccacaattctcatctaattgtcaaaccttgatcttcaactcaaattgaagctaaaccatgttcttaaacttgacatgtgttttaaataaataccactttgttaacacagtttttaatcaacactatattctgccagactgccatcatatcatttttgcaaggaaattttctcaatatgattatctacctaaatgatactatattttaacatataaggttacgttttgattctgtagtttatggaagaatccttataatattattcctaaactaccttccctgttttatttctactcaaaaaccctttttttttttttttttttttgtaaatctcactttcttcttctctcttcaggctgtgaatattctgatttctgactaagctctctacaattctctctcatg

SEQ ID NO: 11655 - DNA, 3000 bp, Unknown; identical to SEQ ID NO: 11651
  misc_feature (1)..( 3000): cDNA_ID_2687599_gDNA_ID_2214507_Annot_ID_133783 3000 nt of promoter + ATG

SEQ ID NO: 11656 - DNA, 1878 bp, Unknown; identical to SEQ ID NO: 11650
  misc_feature (1)..( 1878): cDNA_ID_2711125_gDNA_ID_2214507_Annot_ID_133785 3000 nt of promoter + ATG

SEQ ID NO: 11657 - DNA, 3000 bp, Unknown
  misc_feature (1)..( 3000): cDNA_ID_3022386_gDNA_ID_2214508_Annot_ID_133789 3000 nt of promoter + ATG
caacaaaccacaaacgctaccattctaacaaatccatgataatctctaaaattctctaatcgcgagtggaaaacaccgatgaatctaagctaataggataaatcaaaatggtgcgatggtggtggtacctgaatcttatcggaaaggtaagaaggatctgggaatccagaatcgctgtcgctgctgcaccaggaaccagcaccaccgctaccacctcccgtttccagaaaatctgtaaccattaggcctaggtcatgttcaccgtcgtgactcgaatctatccctcgattcaaccattcctccgccggaacaactctcaagtccatacccatcgttcccaaatctcggtcaattgttcaaatttcaaacccagaacttatgaataaaattgaattgaattgaatttgagtctgtacaaaataaaaaacgcgtatcgtcccctttcacgagtcttgtgtgtgattgattttattatattatatagcgatgagagagacagagcttgaaggttctttttagcgaaagagaaaaatccaggaagataggcgaaaaggaagatgaagcgaagatgaggttaatataatactcatgttaaatgacaaaaatgcccttatatgattaatgatattaccatttgagcttgctgtggaagctgtaacgaaccgaaaattaaaaacagaataacgaacatagacggagaatatgatattattcgttttaccaaagaaactaacaaatagttttaactttatctaacaaaggggtaaaacgggtaatttgtttgggatgaggtggagcgtagcggacaatcgagaaattaaaagtttggcttggggacgaagttaaaggtgggctttaacgttttaaattggctgactcggacgatatttcttgtatttaataccaaaaatgaatgactttataattcatttgtagattgaaagttacgtattgattcgaaaatcaacacattgtgttttcaagtgggcataaactataacaccttgttgattgattaatagattacctaaagacattatggtttattactggtctttcaatatatttttatcgcattgtcaatgatattgtttttgtatcccaagtccactgttttggtctctacattcattttgattgggatttatctttttaaaatttcttctaatgttttttcgatatggttattacttgctttgattttcttttcagtatgtgtattgctttgcaaattgtttttttcttaagatgaaaaacaactcattaaattgtttgagaaatactactaaaacaaataaacaatgaggagaattatggaaaacaaagtgtaataggctttaattcattgctagtgggctttttgggcctatgggcatattacttaccactatccaacccaaaatgccaaataaccgacatgtctcacacaatccaattttgggccatacggccgaaattatttaaacctgtgctcataatttactttacaaattattacttttccataaattgtggaaaagttatctgtaacatccgattcaactggagtctagactactatagacattgatacgttttgagtttttagatacttggaagatatatgcatttatgaatacagattacagacacatactagtactactgtatgtctgtatatggatacaaaaaaaatcatgtatgaatactaaaattttattagaaatctatttttcaattgttgcaacaatcaagttgtcaaatttatttttgtaaccgttaaacaaacaaatatcgatttaggtttctaatctgaattgacatctcaaacaaaaaaggctgaatactttctgaaaatagtgtatggaatgaaggtggcttttagagccattataaccggaagaaaattcaggtgacttttagaaccattataaccggaagaaaaggtgaattttaatttttagctgtgtggaagacacggcaagtccaagtagtaccttcgtacgtcaatattgtccaaccggccgtgtcgaaaatcttcttgagaaaaattggattttcatctataaaaaaaaaaagtccaagtaataccaaacaaagacagcgacgtgtaaaacaatacaagactcataatcacaaacctaccacccaagtcaaacctatattccatttagtgaattcttgattatgacttcttgaaatcatttgtattcatatgtataattatttaagtcatttttctgtaagtaaaatttttatatatctagaataacgagttccctacgacaagatacagttgaacgtaaatgtgacatctcaattttcattggtgtctagtactctagtgattaggttttcgacatttattgtactgattaagtaaaaattcatggtacaaacatcgaatatatatttttctgcttacacacaccaattaacgtggatagaccaattgaaatattttgttacgacaaagcaaaacaaaacaaacgtcatgtttcgctgtttgtttgtcgtcccgttaatggtaatctttcagacacatacagtacccaaacaagtaatttgactaaaattttctctctgtctaaatttcagaagaaaaaaaaactttaggatatattgccaaaagatcttaaaaatgggtcatatcattttgatcatatagaatccaacgacctttatcttttcgccgaactatacttttttgtgtccatttgtttgactttctttcacacacacatccacaaagaaaaaaggaccattcttctccttcttctagtcacccctcgtgcctctctttaacaccaaacccaaaactcccttctctttcttccttcctctccgatctccgttcacatctctctctcatctttatcttcttctttttttgccttgtgggttgaaagtttctatattttctctttctcttctgtttacataatccattttcagctcaagcagctgaagaataacgatcaagaaccaaaaaagaagaaaacgaatctgttcttagctttg

SEQ ID NO: 11658 - DNA, 3000 bp, Unknown
  misc_feature (1)..( 3000): cDNA_ID_1808049_gDNA_ID_2214508_Annot_ID_133790 3000 nt of promoter + ATG
aattcatggtacaaacatcgaatatatatttttctgcttacacacaccaattaacgtggatagaccaattgaaatattttgttacgacaaagcaaaacaaaacaaacgtcatgtttcgctgtttgtttgtcgtcccgttaatggtaatctttcagacacatacagtacccaaacaagtaatttgactaaaattttctctctgtctaaatttcagaagaaaaaaaaactttaggatatattgccaaaagatcttaaaaatgggtcatatcattttgatcatatagaatccaacgacctttatcttttcgccgaactatacttttttgtgtccatttgtttgactttctttcacacacacatccacaaagaaaaaaggaccattcttctccttcttctagtcacccctcgtgcctctctttaacaccaaacccaaaactcccttctctttcttccttcctctccgatctccgttcacatctctctctcatctttatcttcttctttttttgccttgtgggttgaaagtttctatattttctctttctcttctgtttacataatccattttcagctcaagcagctgaagaataacgatcaagaaccaaaaaagaagaaaacgaatctgttcttagctttgatgggttcttgcttcagttctcgagtcaaagcagacatcttccacaatggtaccatctctctccaactatcaattttcttgcaatctggaattatgcatctctctgtttttaattcatggagatttccgattttgattattgtaaatggtcaacatgtgtgtctgtgtaggtaagagcagcgatctttatggtctaagtctctcaagtcggaaatcgtcttcgactgtagcggcggctcagaagacggaaggggagatattgagttcgacccctgtcaaaagcttcacctttaacgaactcaaactcgccacaagaaacttcagaccagatagtgtgatcggagaaggtggctttggttgtgtctttaaaggctggttagatgagtccactctcactccgactaaacctggaaccggtttggtcatcgccgttaaaaagcttaaccaagaaggttttcaaggtcaccgtgaatggctggtactgtgttttcatttccccaaacttaagagtcatgtgttatatatgtgtgaatgcgtgtctgatctgttgtgttgtgttgtgctattcagacagagatcaattacttggggcaactgagtcacccaaatctagttaaactgatcggttattgcttagaagatgaacaccgtcttctagtctacgagtttatgcaaaaaggaagtcttgagaatcatctattcagaagtgagtcccatggatcatctttatctttgattaaatctgttttcttttgtttttggttctgatggaaaatggttttaatataggaggtgcatattttaagccactcccatggtttctacgggtcaatgttgcgcttgatgcagcaaaggggcttgcttttcttcacagcgatcccgtcaaagtgatataccgagacattaaagcctcgaacatcttacttgatgcggtatgtagagaaatatacacattcaaagaattagatgtcttcatagtactttcctgatgactttgattcccttaaacaggactacaacgcaaaactttctgactttggactagctagagacggtccaatgggtgatttgagttatgttagtacaagggtcatgggtacttatgggtacgccgcgcctgagtacatgtcatcaggtaaaaatctatcaccttaaatatgaattatgactaggttgatcaaatgttttagagcataaggataattgtttttaaatcctcgtatcatttcaggtcacttgaatgcaagaagcgatgtgtacagtttcggagttttgcttctagagattttatctggtaagcgagcgttggatcataacagaccggctaaagaagaaaaccttgtggattgggctcgaccgtacctcacaagcaaacgtaaggttctcctaatcgtggacaatcggctagacacacagtacctacctgaagaagccgtgagaatggcaagcgtggcggtgcagtgtctctcatttgaacccaagtcgcgcccgaccatggaccaagtggtccgtgccttacaacaacttcaggacaacttgggaaaaccgagtcagaccaatccggttaaggataccaagaaacttggttttaaaactggtactactaagtcatccgaaaaacggtttacacaaaaaccttttggcaggcaccttgtgtaggtcaagttgataactgaattccaggatggacatttttccggcggtttacttgaaactgccgatatccgttttcgacggattgaatgcggttctggacaaaccgtgcaggtcaagactaataaaggatacattaaattttccggttacatgtcccatacccaaccttagagaacatgtgtagcctttagcttaggcttccttgtgtgctgttatattgagtatatatgaggtaatttttgcctcttgtgttgtaacacttgtatttttgttcctttaacatttgatgtagagatttttcctatatcttcagttttgaaacccaaatttattgcaagtcaaaatatgaaaattctaatcaatgtgcaatgaataacacaaatccgaattgtgctttgttggctgcagacctgcagttaacacaaatcttataaatttgaaatgtcgttcaaactccaaaccacaaaaaggggaagcaaaacgcaaccgtttcacgatttttgtctagtttggtccaatttctcaattacggttttgtgaaatgcgtgtcggtctttggttctgcattcgaactgtgtggcgttttgtgtaacttatccacttagtgagcaaaactactcgactcgtagtagttgcagagaggttttagccgcagaagaaaagggtttactctgtcttcttcagacttctcagtgatcgaagctatg

SEQ ID NO: 11659 - DNA, 3000 bp, Unknown
  misc_feature (1)..( 3000): cDNA_ID_3022386_gDNA_ID_2214508_Annot_ID_184174 3000 nt of promoter + ATG
ctagcgatctcaaaatgacttctgaaatcaatatcaacaatcaaacgatcatcttgaccaacttcagtatcactcaatatgatatctatatactcattatctcctgcaaacaaacaaaacatatcattctctcagaattctatgtccagaaacacttgtataagacggttcttagaagcgaaaacataccaccaggaactttgccaccaccttgccatctagctgaacatacagctgcatcatatccagaaagtctcaaaagcttagcgagataaaacctgatgcaactagcgttacatgtaccggatttcacagagtgtagatctttctccttaatagtaagcatcaatgtacgaaccaccgagagaacctcggtttcgtgttgagccatagagtacttgagatactgcagatacaaacacatactcttaattcaacaaaatgttcttcaccattcctagaaacctatgtactaaaacatgccttccttcaaattacaacaaaccacaaacgctaccattctaacaaatccatgataatctctaaaattctctaatcgcgagtggaaaacaccgatgaatctaagctaataggataaatcaaaatggtgcgatggtggtggtacctgaatcttatcggaaaggtaagaaggatctgggaatccagaatcgctgtcgctgctgcaccaggaaccagcaccaccgctaccacctcccgtttccagaaaatctgtaaccattaggcctaggtcatgttcaccgtcgtgactcgaatctatccctcgattcaaccattcctccgccggaacaactctcaagtccatacccatcgttcccaaatctcggtcaattgttcaaatttcaaacccagaacttatgaataaaattgaattgaattgaatttgagtctgtacaaaataaaaaacgcgtatcgtcccctttcacgagtcttgtgtgtgattgattttattatattatatagcgatgagagagacagagcttgaaggttctttttagcgaaagagaaaaatccaggaagataggcgaaaaggaagatgaagcgaagatgaggttaatataatactcatgttaaatgacaaaaatgcccttatatgattaatgatattaccatttgagcttgctgtggaagctgtaacgaaccgaaaattaaaaacagaataacgaacatagacggagaatatgatattattcgttttaccaaagaaactaacaaatagttttaactttatctaacaaaggggtaaaacgggtaatttgtttgggatgaggtggagcgtagcggacaatcgagaaattaaaagtttggcttggggacgaagttaaaggtgggctttaacgttttaaattggctgactcggacgatatttcttgtatttaataccaaaaatgaatgactttataattcatttgtagattgaaagttacgtattgattcgaaaatcaacacattgtgttttcaagtgggcataaactataacaccttgttgattgattaatagattacctaaagacattatggtttattactggtctttcaatatatttttatcgcattgtcaatgatattgtttttgtatcccaagtccactgttttggtctctacattcattttgattgggatttatctttttaaaatttcttctaatgttttttcgatatggttattacttgctttgattttcttttcagtatgtgtattgctttgcaaattgtttttttcttaagatgaaaaacaactcattaaattgtttgagaaatactactaaaacaaataaacaatgaggagaattatggaaaacaaagtgtaataggctttaattcattgctagtgggctttttgggcctatgggcatattacttaccactatccaacccaaaatgccaaataaccgacatgtctcacacaatccaattttgggccatacggccgaaattatttaaacctgtgctcataatttactttacaaattattacttttccataaattgtggaaaagttatctgtaacatccgattcaactggagtctagactactatagacattgatacgttttgagtttttagatacttggaagatatatgcatttatgaatacagattacagacacatactagtactactgtatgtctgtatatggatacaaaaaaaatcatgtatgaatactaaaattttattagaaatctatttttcaattgttgcaacaatcaagttgtcaaatttatttttgtaaccgttaaacaaacaaatatcgatttaggtttctaatctgaattgacatctcaaacaaaaaaggctgaatactttctgaaaatagtgtatggaatgaaggtggcttttagagccattataaccggaagaaaattcaggtgacttttagaaccattataaccggaagaaaaggtgaattttaatttttagctgtgtggaagacacggcaagtccaagtagtaccttcgtacgtcaatattgtccaaccggccgtgtcgaaaatcttcttgagaaaaattggattttcatctataaaaaaaaaaagtccaagtaataccaaacaaagacagcgacgtgtaaaacaatacaagactcataatcacaaacctaccacccaagtcaaacctatattccatttagtgaattcttgattatgacttcttgaaatcatttgtattcatatgtataattatttaagtcatttttctgtaagtaaaatttttatatatctagaataacgagttccctacgacaagatacagttgaacgtaaatgtgacatctcaattttcattggtgtctagtactctagtgattaggttttcgacatttattgtactgattaagtaaaaattcatggtacaaacatcgaatatatatttttctgcttacacacaccaattaacgtggatagaccaattgaaatattttgttacgacaaagcaaaacaaaacaaacgtcatgtttcgctgtttgtttgtcgtcccgtta

SEQ ID NO: 11660 - DNA, 3000 bp, Unknown
  misc_feature (1)..( 3000): cDNA_ID_1808049_gDNA_ID_2214508_Annot_ID_184175 3000 nt of promoter + ATG
atatatatttttctgcttacacacaccaattaacgtggatagaccaattgaaatattttgttacgacaaagcaaaacaaaacaaacgtcatgtttcgctgtttgtttgtcgtcccgttaatggtaatctttcagacacatacagtacccaaacaagtaatttgactaaaattttctctctgtctaaatttcagaagaaaaaaaaactttaggatatattgccaaaagatcttaaaaatgggtcatatcattttgatcatatagaatccaacgacctttatcttttcgccgaactatacttttttgtgtccatttgtttgactttctttcacacacacatccacaaagaaaaaaggaccattcttctccttcttctagtcacccctcgtgcctctctttaacaccaaacccaaaactcccttctctttcttccttcctctccgatctccgttcacatctctctctcatctttatcttcttctttttttgccttgtgggttgaaagtttctatattttctctttctcttctgtttacataatccattttcagctcaagcagctgaagaataacgatcaagaaccaaaaaagaagaaaacgaatctgttcttagctttgatgggttcttgcttcagttctcgagtcaaagcagacatcttccacaatggtaccatctctctccaactatcaattttcttgcaatctggaattatgcatctctctgtttttaattcatggagatttccgattttgattattgtaaatggtcaacatgtgtgtctgtgtaggtaagagcagcgatctttatggtctaagtctctcaagtcggaaatcgtcttcgactgtagcggcggctcagaagacggaaggggagatattgagttcgacccctgtcaaaagcttcacctttaacgaactcaaactcgccacaagaaacttcagaccagatagtgtgatcggagaaggtggctttggttgtgtctttaaaggctggttagatgagtccactctcactccgactaaacctggaaccggtttggtcatcgccgttaaaaagcttaaccaagaaggttttcaaggtcaccgtgaatggctggtactgtgttttcatttccccaaacttaagagtcatgtgttatatatgtgtgaatgcgtgtctgatctgttgtgttgtgttgtgctattcagacagagatcaattacttggggcaactgagtcacccaaatctagttaaactgatcggttattgcttagaagatgaacaccgtcttctagtctacgagtttatgcaaaaaggaagtcttgagaatcatctattcagaagtgagtcccatggatcatctttatctttgattaaatctgttttcttttgtttttggttctgatggaaaatggttttaatataggaggtgcatattttaagccactcccatggtttctacgggtcaatgttgcgcttgatgcagcaaaggggcttgcttttcttcacagcgatcccgtcaaagtgatataccgagacattaaagcctcgaacatcttacttgatgcggtatgtagagaaatatacacattcaaagaattagatgtcttcatagtactttcctgatgactttgattcccttaaacaggactacaacgcaaaactttctgactttggactagctagagacggtccaatgggtgatttgagttatgttagtacaagggtcatgggtacttatgggtacgccgcgcctgagtacatgtcatcaggtaaaaatctatcaccttaaatatgaattatgactaggttgatcaaatgttttagagcataaggataattgtttttaaatcctcgtatcatttcaggtcacttgaatgcaagaagcgatgtgtacagtttcggagttttgcttctagagattttatctggtaagcgagcgttggatcataacagaccggctaaagaagaaaaccttgtggattgggctcgaccgtacctcacaagcaaacgtaaggttctcctaatcgtggacaatcggctagacacacagtacctacctgaagaagccgtgagaatggcaagcgtggcggtgcagtgtctctcatttgaacccaagtcgcgcccgaccatggaccaagtggtccgtgccttacaacaacttcaggacaacttgggaaaaccgagtcagaccaatccggttaaggataccaagaaacttggttttaaaactggtactactaagtcatccgaaaaacggtttacacaaaaaccttttggcaggcaccttgtgtaggtcaagttgataactgaattccaggatggacatttttccggcggtttacttgaaactgccgatatccgttttcgacggattgaatgcggttctggacaaaccgtgcaggtcaagactaataaaggatacattaaattttccggttacatgtcccatacccaaccttagagaacatgtgtagcctttagcttaggcttccttgtgtgctgttatattgagtatatatgaggtaatttttgcctcttgtgttgtaacacttgtatttttgttcctttaacatttgatgtagagatttttcctatatcttcagttttgaaacccaaatttattgcaagtcaaaatatgaaaattctaatcaatgtgcaatgaataacacaaatccgaattgtgctttgttggctgcagacctgcagttaacacaaatcttataaatttgaaatgtcgttcaaactccaaaccacaaaaaggggaagcaaaacgcaaccgtttcacgatttttgtctagtttggtccaatttctcaattacggttttgtgaaatgcgtgtcggtctttggttctgcattcgaactgtgtggcgttttgtgtaacttatccacttagtgagcaaaactactcgactcgtagtagttgcagagaggttttagccgcagaagaaaagggtttactctgtcttcttcagacttctcagtgatcgaagctatgatgacgacaacaaccaatact

SEQ ID NO: 11661 - DNA, 3000 bp, Unknown
  misc_feature (1)..( 3000): cDNA_ID_2991401_gDNA_ID_2214508_Annot_ID_184179 3000 nt of promoter + ATG
ctacgactacactcattcgaaatatatattagtccggtttgtgtccgaattgcatatatatatattttttttatttattttattattattaaatgatgctgaatattataaatgttatatgctgacacgaaataaatgtaaagacgtgaatttgttgggagaggagtggtagatacttaattcacatgcaagagcatttgtgttctcatgataaaggcttcttaggctactatacgtgcatgtgtattttggatgtacataagaaaataaattgcatacaataattccgaaaattgtaatttcactaactcgttgccaggattaattcgacaaatgtgacatatcacatatcaagtatgtatgattaggtatatatagtacactgggtgtatggccaaaaataaaacttgtaatgcacaacacatgtatatggacagaaataacaaacatatatactcactcaaacatacacctatcattttttaatattttcatccacctataatttgctattcacatttcttaacttgtaaccatataccgatatacgggatatgtccccctatcatctcgaggaagagaaggaacaaaaatcgtcggtaaccaaacaaatccatctagaatttcaatctaaaaaaaccagacagaaaaacagatgttagaagctggcacagattggactgacgtggcagatatatgaagatctggttggtgcatagatatgccttgtcatcgccatactcgacacaacctcttctcacgttcaccgcctctttaactgttttttcttcttttttccaattatcacttctcttattcttatttttattttcattttctaaatttcaccattcaatatttttttattagggaaactaacgacatttatgatgcttaaattttaaaaaagttttaaaactataataggtttttgatgtctttgatggtggtggcgcgccgatgcataaagattaaagtgagttagtgtgcatgttctttttttttcagcaagaagaaaaaaaaagaaagaaatatgatcaattaatttacacaaaaaatcagtaatagtttagatatgtaacttaattataattgagctggaatgtgaaaataaatagaaacgctaaagtcgtccattacttctaaagttttcaaactaactagttatgtttataattcaacacacaaaaaactagttatgagaattgtagtttatatctggattccaatattctattggatgtttaatttcttggatccatcttcataatactttttttatcatattgctaaagtaaagaaatgttgaatagtgggagtggagggagatatgaagctttgacttttctcacgtgagtgagaactgggaagtggagaaagctttgtctttaaacgtatatctttgacagtttcgtgacataaaacattgaccgaataggtccatgagatatcgggtcgggtcgggcgtatcactttacgtacggctaatgcacggcgcaatacgtggtccgatgaatgcggcaatatgggtccttaattttttttgctttttttttttctgaaacttgttgaatttgtttctaattaaaaattcactttcttctatgtaagtgggagtctttctctacctcctaaagcgaaatctcttaaaatttagggggtaaatacattggcggcaatcggtaaaacatttttgaatggaaacatatatctataaagtgcatctacttatcatatatacttaatgattaataattgaggttagtattgagtttttagcaaaattaaagatgtgaaagaagtcgcaaatgacaatggcaatgacatgcatgaaaatagtaaaagtgtttaggaccaaaaaagggtaaagaagtaatgatggcgatactgttgagcttagcaaattccgttcgtgattgatgctagctacaacttgttttttaagcaaaccaaatttattctccctttcacttaacccgattagaaatagactcacaccttttttttttagattaaccaataaaactcatatatctggatgctctgtaattttcttatatctcaatatcgcagaccagatttcatatatttttggcggatttaaaaagtttaaatttggagtagatgactgaataacatttgagctaaccacatttgggtattgtttaaaatttgtatgcacagtttcttatatgacatgacttactcatgaacgcatatttctgatagaaatgtactagtttttttctttctcatcaatgtattgctttagaaaatatttacttttttcaaaagaagagagaatctgtacgtagattcatggaatttgcataagacaattcacctttgaactagactacgcgcgcaagttaaaaaaaaagtgaaaaacgagcagagtcaaaagacatattaaaggcttataaatgtttacattttatttggtcagcaaaacaaacatacatttgtataaaataaaatataaagtaagataacctctcttcataagtatgaaacgcctcaaataaggtcaactcgatattctttgtcgaactttttttagcatcaaaatttccaagtcttaccaattttaaaatccaggattcaacgagataatatatttgtaagtatcattatatcatctaagaaaattagattacattaaaaaaatgacaaaacggttacaaacctacctccaccttacgtagaaatagtaatcttattttaaaagttttaactttgacaaaaggaaattaaaatttagccaattatctctcgatctctctctctcactctaactttggagtttccttccctccataaataccgaacctcactccttcttcctccaccatcctcatctctcaatcaacaaacctaactctttctctatacaagagcgcaagctcgaaggcgctcttgttctttcttcattttctccttaacaatcaccctcatagtaactttaaaactctctgtttctagtaattcacacacaaaatg

SEQ ID NO: 11662 - DNA, 3000 bp, Unknown; identical to SEQ ID NO: 11661
  misc_feature (1)..( 3000): cDNA_ID_2991401_gDNA_ID_2214508_Annot_ID_133793 3000 nt of promoter + ATG

SEQ ID NO: 11663 - DNA, 3000 bp, Unknown
  misc_feature (1)..( 3000): cDNA_ID_2707121_gDNA_ID_2214509_Annot_ID_133797 3000 nt of promoter + ATG
cttacctgttacatggacacatctgttgatcaaaccttttaaactcaaacacacttcaacattaatttgagagactgagaaatttagtactttatttgcttggatcgttagaatatttgcaccgagttctctgattggcatcattgcagcttcttcacacaatgcttggagatcgcttcctgagtatcctgtaacatagggatagcttacgcttatcagttacttgacttatgaatctgtgtttttttatacaaagtctatagagcttgccttcggtttctttgacgattttatcaatgtcgccatcggataacgagtgaggctggcactttaatttagttttaaaaagtagttttctgacgttggaatccggcaatggtacatatattctcttcacctaacaaagtgataaaatcaaatcatataaccagatactttcctagcaattggtggacaagaaaaattctgatgacaataatgttcttaccaatctcctaagcactgcatcatccaactcctgtggcttgttagtagctcctgcaaaacattacatcaaagtaaatttttaggaaaggaaaacagactatatgtaaactgatactccgagatgttaaacagaatgaagattgagtttgatgtggactgatttagcagaaatcataccaatgataatcaccaaatcatcaggattagaagtcacaccatcaaactggataagaaattctgatttcagccttctgcttgcttcattctcactggttgaccttgttgacattatactatctatctgataaccagagcaaaaacatattcagatctccaagtgacaatatgttgatatgaaaaagatcctttttcagggatctttaggtcttcagtcaaatacaacttatatggtattatctagaactctggtaagagtagttcttcccatataagacagaaaaaggaaaaagtgtgcatacttcatccataaatataacagacggttgtctggatattgcaacttgaaacagcgttttaactagcttttcagcctcacccacctgaatcaatacagtaaagtcagtttgtctattcgaattgacaaataaattcaacaagccttgttagttattacaaaagacagtacagtgacagaataagcacacacccattttgatgtcaaagaagatgctgagacattgaaaaatgttgcctgtgactcagaagcgactgccttggcaagcattgttttcccattgccaggtggcccaaagagaagcagacctaacaaagaagttactttaccaaggacggcaatggagaagataaagaagaaaccaagcttgaaatgttacctctcgctggtcttcggagaccagtgaacaaatctcttcgttttgccggtaaaattaccatctccaacaaagcttgtttagctccattaagtccagctgcaataattaagcataagcttgtttccacatactgcgccgaaaaggaaaaacaagaagaagagcataacattgacactcaccgacatcatcccatttcacagatgggcttctatccactattgttgtatttatcatctcaaccaacttatcatcatagacatttccagattctttcacaggttttgggcttgcagcagcatctttagggttccttggcgttgcaacgccacctctggcaaccggagtcttttgcgataaagttttcctataccttgacgctgtagaggaaactgaagctgaagaaggatatgccaccgtcctctacataacaaagaatcaaaaaaagaattgaagtatacaattaatgccttaaaaatgaattatgttaagcaatcaataccaatacagaaacatatcactaataatctacaaacatcacattctccttccaacatttatgaacaaaaaagaagcaatacattaccttattctcagacattccaacacctaaaatatgaacaccattgatgacagaaacaagtaaaacaaacaaccattagtgtgaattcacttgtgcttcttcatattaatatgcaaaaaaggtcaaaaatttaaaactttatcacctgtacgcttacccaaagcttgcaatctctcagatacttgattttgccaatttgaaatcttctctcggtacgatctcaccttctccttttcactaccatatcattcaacaaatcatcatcactacaactttatttttcaacataacatatataagtcaaaacaaacttatcaaaacctggaactaatatacgaaggagaaggagtagaagtagcttcattcatgatcctttgagcatttctataatgaagaagagcatcatcatgtaaaccccactcttctgctctaacccctttagcgatttcctctttcgctaaatcgaagtatcctttaagcttatacgcaattcgttcgttagtaaccggaactccatcgataccattcatggactcagaagaagttgatgatgatgaaacactaggatctttcttagattcttcgttgagaatagagctaaacgaatcaattatacctctgaggaaactcatatctaagcaataaacaataaaatcgatcatcacttccgagtttaatcaaacaaaaaacaaaaaaacatcaagaaggcaaaattggtttcacgcaccatgttgtgctcgtatatataactcatgtcgagaagattcgaatcaaaatcgaaatcaaatccagcgaattgaagaaatttgatgaaatcttatgaactgggaaatacgcaaacgatgaacaaaccaaacaacacacggtcaagtctttaaccctctacgtagaaagaaggttctaatgggctttacaaggcctatacatatataatcttaggcccaatgatattttatcggtggcccagttttgttttgttttcgatcatcttcttcgccgttaaatattttattctctacggtaccttttgtctctttgtactttcagatactatcgttgacttcgaagtaagaaaagaaa

SEQ ID NO: 11664 - DNA, 3000 bp, Unknown
  misc_feature (1)..( 3000): cDNA_ID_2707117_gDNA_ID_2214509_Annot_ID_133800 3000 nt of promoter + ATG
tcgtatttagtttaacaattttcaaatgcttgtttaaactaaaattttgtatttgtacgtaaacataattaataattttattacggtttgtcggtttctaataaattcaactgtttttggatacaatcttagtcgaaattacggtttattgacgcttgtaacgagtaaaaactttagagtgttgtcttgaggtgttccaattgttaatcttcaaacataaacgcaaacgtaacaaagacaccaattagagtataatggatcgctgttatgatttgtctcaggatgttgagaaaactgtcagtgactctcatgttctcaccgcagcgtaccgaagccactaaagctctgcggatgaagaaagtgcaagagcttgtaagcttcatgaatgaaagcagcgagagaaaagaagcagttgatatttctcgtgcatcctacaccacagttcttaatatcatatccaacattctgttttcggttgatctcggtagctatgactcgaaaaaatccaacgaatttcaggacacggtgattggtgccatggaagctgctgggaaaccagacgctgctaactactttccatttatggggtttcttgacctacaaggtaataggaaggcaatgaggggtctgacggagaggttgtttagggttttccgtgggttcatggatgctaaaatagcagaaaaatcattagggaattactctaaagatgtttccaacagagatttcttggattcgcttctcatcctcaacgaaggagatgaagcagagctcgacaataacgatattgaacacctactcttggtaagttctaccagcttgcagataatcaagattgtagtcaattttctgttcattcgttttgagatgaaatttcattactcgcaatcttccaacaaatcttgagacggaaatgtcaaaaatatgacttgatcatataaagacatcttgaatacggtttcgcaatgttatgttctttttatcaatgtcttgagatgaaaccacatgaatctttatatacggttccacaatgtcaagctcacttatttatatatgattgtatttcaggatatgtttacagctggcacagatacaagctctagtactctagagtgggcaatggcagagttacttagaaaccctaaaacgatggtaaaagctcaggcagagatggatcgtgtgttaggtcaaaacagtgttgtgcaagagtcagatatctcaggattgccatatttacaagcggttgtgaaggaaacttttaggttacatccggctgctccgctactagtcccacgaaaagcggaatcagatgtggaggttcttgggttcatggtgcctaaagatactcaggttctagtgaatgtgtgggccataggacgagacccaagcgtatgggagaatccgagccagttcgagccagagaggtttatggggaaagatattgatgtgaaaggtagagattatgagcttacaccgtttggaggaggacggagaatatgtccgggattgcctttggctgtgaaaacagtgtctcttatgcttgcttctcttctttattcctttgactggaagcttcctaacggtgtcgtttcagaggacttggatatggacgagacctttggtatcacattacacaggaccaacacgttatatgccattcccgtaaagaaacagaccattaattagccattgtaatactttcctctgtttgtttaaattgctcaaacccttgtgataaaaataaaacaaaatcatctaaaacgctgtgttctctcggttaaaagttttcttcttatgaaatgggtaaggcctgaagaagtcaaggtatccagtatccagatttgtattgggcctatgtatatcttttaggtaaatttaaagcccataagttattacaaattttcaattaaaaaattactatgactagttatcaatctaaattgatggttgtgctaaagaaaaaatagaaagatgatttgttgtttggtttagactttagtgtaaaaaaatattattattaatttttaggttaagaaaatattaatttctttttctttttttcttaaacacttgtgtatggtagacctttgttttttttgcatccttgtctaatgtctaagataaagatttatactgtaaatgaaattgttggaaaaaaaaagatttataaatgaatcactttactgttgggaaaaaattgaagtaaataaatgaatcactttactgagagtagtaaaaagaaataaatttgtgttgacatgaatagcaaaatacttaaaaaggaattaaatgaaaactttagtgttaattgacttttatgtgttgctaaaatcccaaatcagtaaaaaaccacaatctctcttctcttctttctctctctcccgcgcgcccaagtcgcctcctttcgctagtctctctccgatcgtcgtctcacctctctttactttcgtcgtcctctggaatcttacgcattctccgtcttccaagctctcgttgcgccgtcggcggatagagattccgtccagatttgtttgagcttccgattcgcttccattcattggttcatcatctccgaacatttctccggtccgatccgtgcgtactctctcccggcattgatttctataagcattttatcctttcatagttctagatgatacactcggaatgtaattttcttatgattttcaaaatcgatcctctctgagatctgacagagaatcttctaattgattgttttctgaagatttttgagctccttttgcagatttttgatgctgtatatgttaaatttagtagatccaagtgagtatatatatggatcattggttcagatgcatttttgcaggtttatttggttcaatcacagtgtcgactttagttctcatcttcatcagtgtcagatgcatttttctcagaagctcaacttttgctctgtgtaacaggtggagggtgagaaaacgctgtgaatgtctgtactctccataagtttatagaatg

SEQ ID NO: 11665 - DNA, 3000 bp, Unknown
  misc_feature (1)..( 3000): cDNA_ID_2711142_gDNA_ID_2214509_Annot_ID_184203 3000 nt of promoter + ATG
tttcaattcttcttgttacaggttaatatggtgcgttattacataaatcctttttaattaattattagtcgtcctaagtatgtgaaagtggcaccaacaaatgagatatttgttgttgaagaaattaaatataaatatcgtcatatatttgatggaacaaaatgataactctgtcttcatcgttatagctagattcctaaaaatggaaatctacttgtaacagtcggaccattgaaaattccttttattttctctttttaattattaggactcttttcttttcttttttgctttttttacatagagcgcgatgtttcaaattcaaactaactcattttgtttccaaatgttatggctcatgttcttctataactagttattgtacccttttcaagctatcctagcgtgttcttttatttgatgctgcgccagcggcaatagcggactgaaacgacgtgtcatgagaagtagtaggtaagtaaaacgacattaaagcttgaaaataacaatttcggatgagtcgccgatgatagccgatgaattgcaattgcatcaaatgaatcgctgaaattaagcagcgtcacgtcaatcttcatcatcgtacatcttttgcggcagttcttctctaatcaatgtattttttctcgccgcagatctgtttttcttctttgttgtcgctgacgctgcgttcattaaaagaacacgctaaattaaatagaaaatttggttttctaatgcggtgaaggattgatatattatactcgcaaccatgtatcttgattgaaccgtgattcaatatgtttggttaaaatgtctacttgatctaaaatcggacgaagtaaactacgtgcgaaattaatgctgattggttttacaaatttgtgaacttttatttggtcaatgaaaaggggcagaaaattcatcattgttttgaagctctcgcagagctggttaaatatagtaagatgttgggttaggtaaaattgtctttaaaaatgtttacctctgaaaatgattgaaaaatgagatattttcctatatatatatatatatatgtatgtattatttacttacagtttgatacatatatatgtattcattcatatatatatatgcaatcatttacttacagtttaattgctaatatctgaatgattatttttaatcaattttttgatgtttttgtcccttgttgtatctgcatcatttgatatgttgacgattctttcaacgttattcatcaaaacggtaactaattaattttaggttttaaacttggaagttaaataggggacatttcactttttctacaaattttttcgacagttcaatggaaaacgtcaagttaattttcggctaatgagatattgaagctcaatggagttaattaacagatcataaatgaaacacgtgtaagggaatctgctactcttttgtattgtaggccttaactttttttatcgatcagtcggcgtgtcagtgtcttgtggtcttaaggaaaaatatccgaacctcatcatctccacgagttaaatagtatatatccttcttcttcgtacgaggttaagacaactaaaatcttaaaaaataaattaaatacttaaaatcaatgaatcgtttcatatatatacatatatatatatataatatttatgtgcttcgattaattagtacatgtaactattttacgaacgtttagttatcgcccatttgcacataagtttacaaacaaacatagaatcatcacattatatattgtgcaaaattcaaatacaagatgataaatctttacatcttcaactacaaacacgatatatgatatcaagttatcaaccaatcaagagctgtaatctagtagttttttattttttgttaaaaagttgtaatctagtagtttcattttcatctatctttttacattatagaaaaatgaaagtatagaaaaatgaaagcttatcaaaagttagtgggctacatctacattatattaaaaaaatatatatatatatatatatatatatatatatatatatatatatcaataactagatcggacagtgaccaaaccaatctcgttgtgtccaatccaagaaaataacaaaggaaagtcgtacgtttgatgatataaaaacctttttatgtttggacgagtttcatagaacatggtggacaaaattatagtactatatactatttagtatctccttttgaaaaacagtaagccatgtaaatgaatttgtacaattaacagctatttaaaaagcaaaaaaaaaaacagtgaatgtttatttacaaagttccgaagggaagaggttgtggtagtggttaggggcatgccaaatacggaaagggaggcaaagaagatcgggtagtcttcataatttcatacttttcactttgtagtaatctttccttttcttttttaatttcatcaccaatgtttctttgttcaaattcatatccacacactcttttggaaatggcactgcagcttcatgtgaggtgtggggtcattgcgccttatcgtctgaaaatgttaccctcttgacattcaatgaccccattttcttattttccataatttcttttaccattttactataacaagaatgatgcaaaaggaataggcaaaaaacagcatattattttttagtgggatcctagtaggtcacttgaagtctctatgcattgattatggattgctatatttgtctctctttttatttttgaatttcgagttagtgatcttcaatgtgtgtttcaaatatagatattcaaaggttataaaccaagaaaagaaaaagtagaaaaaaaatatatatatttcaaatcttttaaacggaccattggcaacaaaatctataaacgagttaggcccaaattgttgtacaaaaggcccattaggttaaataagtatgggcctaaagcggtccgatcaatctctgtgccattaccttcttcttcgtcgtagtgatttctctcgagagaaaaagagagatg

SEQ ID NO: 11666 - DNA, 3000 bp, Unknown
  misc_feature (1)..( 3000): cDNA_ID_2707091_gDNA_ID_2214509_Annot_ID_184202 3000 nt of promoter + ATG
ccgtcgtcacaaggtcctcagcatcatcagtcattcgctctcgatccagccatcgcagccattggtcctaccgtcaataatccttttcctccgtcgaattggcaatctaacggtcatcgacccagtaatcataaccctccttcttggccactcgccttttcacctcctcataatctttcccccaatttcttagggtttcctcaatttccgcctagccctttcacgacgaaccaattcgacggtaatcaaagagtatctccagaagatgcttatagattagggtttcctggaactacaaatcctgctattcagtccatggtacagcaacagcagcagcagcagctaccgccgccgcaatcagagactcggaagcttgtttttggttctttctcgggagatgctactcaaagccttaatgggttacataacgggaacttgaagtatgattctaatcaacacgaacagctcatgaggcatccccaatctactctctcgaattctaacatggatccaaacttgtctcatcatcggaatcatgatctccatgaacagaggggaggtcacagcggaagaggaaactggggtcatattgggaataacggcaggggtttaaagtctactcctcctcctcctcctcctggattttcgagtaaccaaagaggatgggatatgagtttaggaagtaaggatgacgatagagggatgggtaggaatcatgatcaagcaatgggcgagcattctaaagtttggaatcaaagtgttgatttttctgctgaggctaatagattaaggggattgtctatccagaacgagagcaagttcaatcttagtcaacaaatagatcatcctggaccacctaagggtgcaagtctacattctgtatcagcagctgatgctgcggattccttttcgatgttgaacaaggaagctcgtcgtggaggtgaacgtagagaggaattggggcagctcagtaaggcaaagagggaaggcaatgcaaactctgacgagattgaggattttggagaagatattgttaagtctttattgcttgaagatgaaactggtgagaaggatgccaatgatgggaagaaggatagcaagacttctcgcgagaaggtacgtttcagtttttgtgtaagcttgtgatataggatatacctaatgacttgttgggaacattcagtgatggtgtttagctcgtgtaatcaattcttgaactagaaaggatgtttttttagattggaaagattgtttaaatcagggttttgttatcaggagtcgagagtggacaatcggggtcaacggctgcttggccaaaaggcaagaatggttaaaatgtatatggcatgtcgaaatgacatccacaggtatgatgctacattcattgcaatctacaagtccctgattcccgcagaagaggagctggagaagcagagacaactaatggcacatctagagaatctagttgccaaagaatggcctcatgcaaagttgtatctttacgggtcctgtgctaactcttttggtttcccgaagagcgacatcgacgtttgccttgcaatcgaaggtgatgatatcaacaaatctgagatgttgttaaagctggcagagatcttggaatcagataatctccaaaatgttcaggtaaagtaaatgagtttacttatagaaacacattgctttggtacttgatacgcttttcttgctttgaatctggtgcctatattttctgaaacattgttttttgtgtaggctctaacacgagctagggttccaattgtaaaacttatggatccggttactgggatatcttgtgatatctgcatcaacaatgtattggctgttgtgaacacaaagctcttgcgagattatgctcagatagatgttcgtttaaggcagttggctttcattgtgaaacattgggcaaagtcaagaagggttaatgaaacttatcaaggaacactttccagctacgcgtaagttctcctccacactttgaaatgaagttactttggattgcaaattacaatcattacttatatttgatacttttgcaggtacgttctgatgtgtatccatttcttgcagcagcgtaggccgccaattcttccttgcttacaggtgtgtataatcatatcctcctaaaatagtgtactgattactgaatgctcttcatttattgaagttattacttgatgcaggaaatggagccgacttactcagttcgggtagataatatccggtgcacatactttgataatgttgatagactccgtaacttcggatcaaacaacagggagaccatagctgagctggtctggggattcttcaactactgggcttacgctcatgactatgcgtataatgttgtatccgtccgcaccggttccatacttgggtaaactagaaactcaattatacttactgcaacatctgtgaagcaacaatctcagagatgaaacatgaatatgtgtgtgttgcaggaagcgagagaaggactggacgagaagggtggggaacgataggcacttgatatgcatagaggatccgtttgagacgagccatgatctgggtagggtggtcgacaagtttagtatcagagtgttgagggaggagttcgaaagagctgcaaggattatgcatcaagatcctaacccatgtgccaagcttttggaaccatatattcctgaagataataatggacaaggccacaactgaacttttaaaacatttgaatggcggattcgtgtggcttgtatatatttatgggtagaagattcatgctctgttctttttgcttttttggttgtgatttgaaatcttgcttgtgacccaacaaaaagaaaggtcttagttttgaagatttttgtatgatggtgatgtgggtggatttcttaaacgtgtcgtgttatttgcgtgacttgaaaaaagaagtgagataattttgaaaacaattttttaataataatgcaaaacagatcaatctcgcaagtcgcaacg

SEQ ID NO: 11667 - DNA, 3000 bp, Unknown
  misc_feature (1)..( 3000): cDNA_ID_3022412_gDNA_ID_2214509_Annot_ID_184201 3000 nt of promoter + ATG
aataccttcatccgaatcttcaagccacggaatattccgccggaatccaaacttccgatcctcgtttactttcacggcggtggatttatcctctacagcgccgcttcagctcctttccatgaatcttgcaccaaaatggctgatcgtcttcaaactataatcctctccgtcgaataccgtctagctcccgaacaccgtctcccggcggcgtacgaagacgccgtcgaagctatcttatggctccgtgatcaagctcgtgggccaatcaacggtggtgattgcgacacgtggttaaaagacggtgtcgatttctcgaaatgctacgtcatgggttcaagctctggaggaaatattgtctacaacgtggcgttgcgtgtagttgacacagatctttctcctgttaagatccaagggctgataatgaaccaagctttcttcggtggcgttgagccgtcggattctgagtcacggcttaaagacgataagatctgtccgttaccagctactcacttgttgtggtcactttgtttaccggacggtgtagatcgtgaccacgtgtacagtaatccaattaagagcagtgggcctcaggaaaaagataagatgggacgttttccgtcgactcttatcaacggttacggtggggatcctttagtggatcgtcagagacacgtggcggagatgttaaagggacgtggagttcacgtggagacgaggtttgataaagatgggtttcatgcttgtgagttgtttgatgggaacaaagctaaggccctgtacgaaaccgttgaggcctttatgaagagttgttcatcaactggcccatcgtccaactccaacatgtagtagtctgatctaatcatgttttacgaactatatatatatctagctaataattaaattcctacaactattacgcaatttttgttgttttaagtcacatatgatatgtgtggtgcaatggaaaaatgtataccctttcaataaatatagtggatgcaatttaatctatttactaatactaattttaacgatgtccaaagagaattggatgttctgtgagctacgttttattaacattttaaattatgaattccaccaacaaaaaaagatagattttaataggtgaacatactatcattatcatattatgattagctatttacagaattgttttgaataattcattaagaacattgttagattctttttgtatatatacaacaataaaatgctaataattccatctagtttagtttgtagaacatgattcctcatttagacaaaatataaaaacatttcttaatttggtcaataatcaatatagctaaactgcgtaaaatcatgaccacaaataatccgtatattcatcctaatcacaacttaagctccattaaacgtaaaacagttacacacaacaacaacaacaaaaaagtaagaaaagaaacgaaaaaaatcctaaacatttcttcttaggtcaaagttaacttcctcttaatcacgcaattaatcataaaaccatgtcacgtgactctcctcccgcatttgatccatacaaacacctcaacataacaatcaaccccaacggctcttgcacgcgccatttcgtttggccgagggttgaacccgacccggatccatgccccggcaagctcgccgcttccaaagacgtaaccattaaccacgaaaccggcgtgtccgtacgtattttccgaccaactaatctaccatccaatgataacgccgtggctcgtctcccaatcatcatccatctccacggctccggttggatcctttacccggccaattctgccgcaaatgaccgttgttgctctcaaatggccagtgagttaacagtgattgttgtctccgtacactatcgtttgcctccggagcatagactcccagctcaatacgacgacgcattagatgctctgctttgggtcaaacaacaagtcgttgactcaaccaacggcgagccgtggcttaaggactacgccgatttctcacggtgttacatatgcggttcgagtaacggcgctaacatcgctttccaattggcactgagatcgttagaccacgatttaacgccgttacaaatcgacggttgcgtgttttaccaaccgctttttggcggtaaaacgaggacaaaatcggagcttaagaatttcgccgacccggtaatgccggttcctgcggttgacgccatgtgggaactatctttgccggtaggtgttgatcgggatcataggtactgtaatccattgggttacttgccgcaaaaggagaaagttggacggcttggacggtgtttggtgatcggttacggcggagacacgtcgttggatcgacaacaagatttcgtgaatttgttggttgcagctggagttagggttgaagcaaggtttgacgacgccggtttccatagcatcgagctggtcgatccacgacgagccgtcgctcttcttaatatgattagagattttataagttgattattcttttcaagttttcatctaagcattctataaccgttaattttctcattttctattttgtatacatatgacattttacattgaacgttgttacatagcacaaatgttacttcttttgtgttttttgataaaatgttaacattgttacttcttattgtattcatttttacaattccacaattccgtaatttcacaaatttactaattgaaatccatttcattctcaatcatacttaagtaacctactgtagttgaattttaagtccaacttgtgatcagctttaaaaacaaaagtcataacatcggacggtcaggatatcatgtgtgaggctgtatcctttaaataataaaatagaggacacacacgagatccgttaaaggttaaaccttgaagaaagaaagatctctcggtggtggtcattcaacattgtaagatcttcgacttggcaaaattgtttcactttcgctctaaaaacttcatcttcactttctctcctcctcc

SEQ ID NO: 11668 - DNA, 3000 bp, Unknown
  misc_feature (1)..( 3000): cDNA_ID_3022416_gDNA_ID_2214509_Annot_ID_184197 3000 nt of promoter + ATG
tgcgatccaaaagcgcgtcttgtaaactacgattagccataagttcgtagacgaggataagcttccgaccacgacgatcggaggagaatccaaggagagagacgacatgaggagagccaattaagtgagaagagagagaaagctcgttgtgaaactcacgttcgccttgtaaagaaccagcggaggtatccatgactttgacggcgagtgaatcgccgccactcgggaaatcagctttgtaaacagagccgaatccgccgtgaccgaggtgagtcgactcggagaaagagtttgtagcgcggcggagctgagagtaagagaagcgtcgacattggtagtgttgaggagacttggagttggagataagatctgaaggagccgtacggtttcggtagagtcttcggtaaataagtaaagtgacgaggatgagtaaaactccggttaaagtcagagaaccggctatgataagtggaagagtctggaaacgatgatggccgtcactaaccgtaggcgtcggttgcagcggcggaatatctggcggagagaggcgagatggcattttagtaaatataggaagttacagaagtgtcatttaatccggagtttccattgaagaagaagatggtgagatgttaaaagattttcttcagctacttggaacactcgcgtagtaaaaataaagagatatacttgtgtgacaggcgagcgataatggtaatggtgacgtgtcggagaataaatgggggatggtgactgtgatttgtgacagtcatgtgagcggatattattgctcacgtcgtttagcggaagaccggtgagggatagatttgagtcaccgagtcgtgagattttaatgagggagcgtgatttgcacgcggcgcgttgaggtgagattcacgagggttttgttttgaaaccttcttctccttctgaagaggtccacggtgggacctacgaaatttaactggggaagtgatggtgaagtcaacctcactcgccttttaagaagcgcgtggatgcatgtgtggttcgagcttaaccaatttcttggctagaccatcggttaaacagcaattagtcgtctgattaatttggatttgttcgatcgactagccatgtgcataactggtcggcaatgttatattagatgttcaatcttgttataacattagtagtaattagtaaaatggtgtattgattgtctaggttctaattatatcgtttaagatggttgataatttagttaggcgcacaattttaatatcaaacttaatcattttttagcttcttaaaaagaagcaaaaagcgtacagctatttttgtaaaatcatatgtataatttgtaaaatacaatgtttgtgttaaacacaaaaagatttgtttttgttgtaataatcaaacgtgttagtaacgtcagcgaaaaggaggcatttttcaggtcgctttttcgggtgatgggattttgaccttttcaattttgcccttaatcgctttggtctgactcttattgtggtttttgtttggtttgttttggttttacttttacccaatttttagacgcacgagtaacgtatacttgcaaaacaaaagagtgagatcacgtcactaacgttcaaaatcatttcactcgctggcaccatctcttatttattttaatttattcgagggagaaaaaaaatggttcaaagctaatgacctaatgttatcattatcattagagaactatccaagtgagaaacattcgtgaatccacttgatgttagtgggtgatttgttagttttaatagaacaacaaggtttgtttactttttatttttggctaataaagaagtggttagttgcacttaggggtttgactttggtaacatcgttggaatcttgataagggaatctatggaaaaatatataaacaaagaagtaaagcgtcaaacacaaagccttttgcaggtttaaagcagattcagatgtacttttaatgtattttttccaaaaataaaatggagattggagaagaagaagaagaagaagaagcgacgactactactcaaattgctcatgtgacttccactacttaacctcctttagaaaactacaaaaaatagttatcattaaataatactgtttgctagccggaacgttatagccaacacttgtcgggacccgtgaccgtggtccctaactttccactaccgttacatgaataaaagttctttatgtttcatagtttttatacctaggagattttattagtgttccatgaccatccaagatgtagtaacagttgatagtaagaagataaaatttgagtgttgtcactcgttaattagcaaatatcaagagatgcacattaaaggagcaaaccaggtcgagcaacttaacctaacatcagaacaaatacagctaacagtagataaagagagtaacgtacacctaaacacatggttaagctgcctaatagtataattaatgaaattaatgtgaggtttaacagatgaacagtaatggctacatacaagtttggcaggcggttgtcttgatctcccatgtgtcattatagttttagaatcatatattttttcttgcatgttttgaatccaattaatgacactaatacaactcactattttacatattatgttctcattgtttatataattagtctgtaccaaaaagaaatcccatgtttgtaagaaatttaggcaagtatgtaaggttcaaactttccataagtgggcatgacaaaaacaaatttttagaaactcagatagtttgtaggtgttataagcagcaataaacatatacattatgcaaccgattgacagtttttgagaacttgtttctccattttagataatatctttaaacttgtgaataaattcattagaaaaaaaacttaaattcatggatataaaatgcatgattgagttatattttctaggcactctccaatttcattaaacaaggagagtagaacctaaagaaaaaagtggtcgtccaatg

SEQ ID NO: 11669 - DNA, 3000 bp, Unknown
  misc_feature (1)..( 3000): cDNA_ID_2707105_gDNA_ID_2214509_Annot_ID_184196 3000 nt of promoter + ATG
gtcgagcaacttaacctaacatcagaacaaatacagctaacagtagataaagagagtaacgtacacctaaacacatggttaagctgcctaatagtataattaatgaaattaatgtgaggtttaacagatgaacagtaatggctacatacaagtttggcaggcggttgtcttgatctcccatgtgtcattatagttttagaatcatatattttttcttgcatgttttgaatccaattaatgacactaatacaactcactattttacatattatgttctcattgtttatataattagtctgtaccaaaaagaaatcccatgtttgtaagaaatttaggcaagtatgtaaggttcaaactttccataagtgggcatgacaaaaacaaatttttagaaactcagatagtttgtaggtgttataagcagcaataaacatatacattatgcaaccgattgacagtttttgagaacttgtttctccattttagataatatctttaaacttgtgaataaattcattagaaaaaaaacttaaattcatggatataaaatgcatgattgagttatattttctaggcactctccaatttcattaaacaaggagagtagaacctaaagaaaaaagtggtcgtccaatggacctctcactaattcaaggcatgtctctgcctctctattttctcttaacattattctttttcttctttgctaccgcaaaaacgcggagaagctctagcaccggcacgcttccaccgggtcctccgatactgccattggtcggaaacatattccaactcggattcaatcctcaccgttcacttgctgccttttcgaaaacgtacggacctataatgagtttgaagcttggaaggttaaccgcagtggttatatcttcaccagaagcagctaaagaggcacttagaacacacgaccatgtcatgtccgctcgaacctttaacgacgctcttcgagcctttgatcaccataaacattctattgtctggattcccccctctgctcgttggaggtactaactctatctaagatcaacatttcatttctttttaactctctttgtgttgatatcatccgtgtactaaacttcaatttaaaactttaaatctatacacacgtgaagtgattagctacgtacaactccattaaagttctgtatgtatgcattgtcaggtttctgaagaaaacaataacaaaatatttgttatcaccgcaaaacttagatgctattcaatctttaagaatgagaaaggtggaggaactagtgagtttagtaaatgaatttcgcgagagaggagaagctattgacctggctcgtgcttccttcgtcacatctttcaatatcatctcaaatgctctgttttcagtagatttagcgacgtatgactctaactcctcgtcttacgaatttcacaacacagtggttcacctgacggatatcgccggtatacccaacgtaggagactatttccagtatatgaggtttcttgatttgcaaggtacccggaaaaaagcggtgctctgcatagagaaattgtttagggtttttcaagaattcattgatgctcgattagccaaaagattttctcggacagagaaagagcctaaagaggcttcaagcatcgatatgctagactcccttctggatctcacacagcaaaacgaagcagaattaacaatgaatgatctcaaacacttgcttctcgtaagtctttcacacacaccaatggtaagattaagatattgtttggatgcaaatatcatcagtttacctattttgtgacaggatgtgtttgttgcgggcacagacacaaactctagtacaatggaatgggcaatgacggagttattccgtagcacggagaagatggtcaaagcacagagtgagatacggcaagtgattggtcaaaacggtttcgttcaagaatctgatatcccgagtctgccttacttacaagcaattgtgaaagagactcttcgtttgcatcctgcagctcctttgatccctagaaaatcagaatccgatgttcagattatgggtttccttgttcctaaaaacacccaggtttttctcatacttatctttattacaccaacattcattacttgagatattacaccaataaaaaagtttggtttggttaaaatcttccacctctgtttctcgagattaggttgttgtgaacgtatgggcgataggacgagacgcgagcgtgtgggaaaatccaatgaagttcgagccagagaggttcttgttacgagaaaccgatgtaaaaggcagagatttcgagttgataccgtttggatcaggaagaaggatgtgtccgggaatctcgatggctcttaagacaatgcatatggtgcttgcctctcttctctattcctttgactggaagcttcaaaacggtgtcgtccccggaaacattgacatgagcgagactttcggtcttaccttacacaaggccaaatctctttgtgccgtacccgtcaagaaacctacaatatcgtcttcttattaataatcgtatcaatataaagttcgtgtacggatcaatattaataattgaagagaatgaaattataaaagatactgctttttatgtttcaagtaaaaatgttaatattagaaagtcaagaaagaggaaacacaatgcaatttgataaggtgttttatcgtctccgggattgaattgcgtaggtcaaaaaaagacatttgccatttgatatcgacatataatcactcattcacggatacgtatctcttgtgaatggtcgtcggtcaattacaactttactgctcggctttaactgacaagtggcgcctcctggtttcattcagaccctaccggtaggatgtaatttggaccataagtaagaaatatttgtgaaatatttactacacgaatatctttacgtatttaagttggcttttgaagctttgataattcactcatttgaaagaaaatatcacttgagaaaaaattatg

SEQ ID NO: 11670 - DNA, 3000 bp, Unknown
  misc_feature (1)..( 3000): cDNA_ID_2707109_gDNA_ID_2214509_Annot_ID_184195 3000 nt of promoter + ATG
aatttcatgaccaaaataagaaaaattaaatattattccgctttttcttggttgaacatgttggttcttagtcaaattaaatcccgtgattccaatattcgacatgttagtttgttcatattaattaggcttgttgagtaatggtttgtgttttgttttatttagacttttgagaaaactgtcggcgactcagctcttctcgcctcagcgtatcgaagccacgaaaacgttgagggagaacaaggtgaaggaactcgtgagcttcatgagtgaaagcagcgagagagaagaagctgttgatatatctcgtgctaccttcatcactgctcttaatatcatatcaaacattctgttttctgtcgatctcggtaactacgactcgaataaatccggtgtgtttcaagacacggtgattggtgtcatggaagctgtcgggaatccagacgctgctaacttctttccatttctggggttccttgatctgcaaggtaatagaaagactctgaaggcttgttccgagagattgtttaaggttttccgtgggttcattgatgctaaattagcggaaaaatcattgcgggatactaactctaaagatgtccgggagagagattttgtggatgtgcttctcgatcttaccgaaggagatgaagcagagctcaacactaacgatattgtacaccttctcttggtaagtctacttactatatattttgtaggatattagaatcttatgaattaacttttaaaataaatcaaatatcatcaagactttaaaagatacgtatatatatatcaggacctgtttggagcgggcacagacacaaactctagtaccgtggaatgggcaatggcagagttacttcgaaaccctgaaacaatggtgaaagctcaggctgagatcgactgtgtgattggtcagaaaggtgttgttgaagagtctgatatctcggcacttccctatctacaagcagtggtgaaggaaactttccggttacatccggctgctccgctactagtcccccgaaaagctgaatcagatgtggaggttcttgggttcatggtgcctaaagacactcaggtatttgtgaacgtgtgggccataggaagagacccgaacgtgtgggagaattcgtcccggtttaagccagagaggtttttagggaaagatatcgacctgagaggtagagattatgagcttacaccattcggagccggacgtagaatatgcccgggattgcctttggctgtgaaaacagtgcctcttatgcttgcttctcttctttattcatttgactggaagcttccaaacggtgtcggttcagaggatttggacatggacgagactttcggtctcacattgcacaagaccaacccgttacatgccgtacccgtcaagaaacgtggccgtaattagccatttagtataagttttctttaaagtacaaatatgcttttcttatcggttgacataagatgcaatttcatgctctgattttacgattctattcttcagattctatagttcgtttacctatattctctcttcgatttcatcttcgaatttcatgagttgttgatccatctttggctccaaattgttcgacgttttgatttgttgctttgtcgttgctcttcgacaaattgagcgatggaagttaatgttgactcttcttcgaccaagatgtatcctgagaacgacgacggagatggctagagagagagagagtgacagaataaaaaatatcgattaggttagagacgaactacatgttgccggaatttcaggcctcggagtcatgatgttggagcttctctccgataaggaccagcaatcaattggcgatagagagagagagagagagagattgaggaggtggcttttgcgtttccggtgaagagtgtggcttttgcatttacagagaggtggcgcctggcggcgttggattgatgacatcatcaaagcccttttgcacaacaaagcccaacaaaaggaacagaattttcagcccatacgaactgttaatcctatcccattttattttattttcattcaaaaaattttagcagattttcaaatattatacttaaaatcaaatttgggttttgaagttttttttttttttaatattacggattttaagaaacttgatttttgcaatatgatatgaaattaaccggattttgtatctgcattagtcgttagaaatttcaaatattcaatttgtttttatatcgttatgtagattttagtattcaagtttttaattcaaaattttaaaataggttttttaattttgatatttccatggcatttactaaataaaattcattttattattttaaaaaatcaaattatttgctacgctgggttttgagaaattttggttttgttaattagaaaagagtccaaaccaaatataaaagccatttaatataagttttttttttttaaagtacaaatatcaagagatgcacatgaaaggagcaaaccaggtcgagcaacttaacctaacatcagaacaaatacagctaaacagtaaataaagagagtaacgtacacctatacacatggttaagctgcctaatagtataattaatgaaattaatgtgaggtttaacagatgaacagtaatgtggttttgttaattagaaaagagtccaaaccaaatagtataaaataattagttggttagattttgctattttgttgtatataaaaaaatatcttcatatttgtttgatttcttctgccaaaactaaagtagcgccactggtaggaatttcggaaccgatcactgacattatttattgtatatgccgggggagtcgacaaacaaagtaaatggaccaaatttgtggctactactctcctcaattataaaaatgaaatatttatatatcttccctgaaccaggaagatattttgtttgtcttctacaaatattatatatatgtaatttctttggataattttctaccgcttaagaagcacagatg

SEQ ID NO: 11671 - DNA, 3000 bp, Unknown
  misc_feature (1)..( 3000): cDNA_ID_2707113_gDNA_ID_2214509_Annot_ID_184194 3000 nt of promoter + ATG
tgctattttgttgtatataaaaaaatatcttcatatttgtttgatttcttctgccaaaactaaagtagcgccactggtaggaatttcggaaccgatcactgacattatttattgtatatgccgggggagtcgacaaacaaagtaaatggaccaaatttgtggctactactctcctcaattataaaaatgaaatatttatatatcttccctgaaccaggaagatattttgtttgtcttctacaaatattatatatatgtaatttctttggataattttctaccgcttaagaagcacagatggacataatctcagggcaagctctgttactcctcttttgctttatcttatcatgttttcttatcttcaccaccacaagatctggacgaatctcccgcggggccaccgcgctgcctccaggacctccacggttaccgatcatcggaaatattcacctcgtcggaaaacatccacatcgctcattcgccgagctctcaaaaacttatggaccagtcatgagtcttaagcttggaagtttaaatacagtggttatagcttcaccagaagctgcgagagaggttttacgaacacatgaccagattttgtctgcccgtagtcccactaacgcggtacggtccatcaatcaccaagacgcttcccttgtctggcttccttcgtcgtccgctcgttggaggtataacttcaatatcgactttctattttcctaggattttgtttcttacgagatttgctacaagagcgtttttctttttgttaaaaggcaataaagaccctaaaacagtaatgttcttgatggatcgttgttatgctctgttttaggctgttgagaaggctgtcggtgactcagctcttgtcaccacagcgtatcgaagccacgaaagccttgaggatgaacaaggtgaaggaacttgtgagcttcataagtgaaagcagcgatagggaagaatctgttgatatttctcgtgtagccttcatcacaactcttaatatcatatcgaacattctgttttccgtcgatctcggtagctacaacgcgaaagcttctattaatggggttcaagacacggtgattagtgttatggatgctgccgggactccagacgctgctaattactttccatttctgaggtttcttgatctgcaaggtaatgtgaagacttttaaggtttgcacggagaggctggtaagggttttccgtgggttcattgatgctaagattgcggaaaaatcatcgcagaataaccctaaagatgtttcaaaaaacgatttcgttgacaaccttctcgattacaaaggagatgaatcagaactctccattagcgatattgaacaccttctcttggtaagtctgaccttactgcagataatcatgatttataagataatggaataatcaattttgtggatgaaaatctttaaatttattagtattccaacaaatgttagatgagtgaaaacatgtttcgatcatagaaagacatttttaaaactttaatatcacatcatttttatacaacaggatcatgttgtactcgaatgttatgagttgaaatcgcatgaatatttatatacggaaccgaaatgtcgagctgctcactgacatgtgatttatatgtgtcaggatatgtttacagcaggcacggatacaagctctagtaccctggagtgggcaatgacagagttacttaaaaaccctaaaacgatggcgaaagctcaggccgagatcgattgtgtgataggtcaaaacggtatcgttgaagagtcagatatctccaaactgccgtatttacaagcagtcgtgaaggaaactttccggttacatacgcctgttccgcttcttatcccgcgaaaagccgaatccgatgcggagattcttggtttcatggtgcttaaagatactcaggttctagtgaacgtctgggccataggacgagacccgagcgtgtgggataatccgtcccagtttgagccagagaggtttttggggaaagatatggacgtgagaggtagagattatgagcttacaccattcggagccggacgtagaatttgcccgggaatgcctttggctatgaaaacagtgtctcttatgcttgcttctcttctttattcctttgactggaagcttccgaagggtgtcctttcggaggatttggacatggacgagacctttggtctaactttgcataagaccaacccgttacatgccgtacccgtcaagaaacgcgccaatattaattagtcgtggttttataattaaaaataaacagagaaataatctccaaagctttgtttattaccaaaaactatctgttttcggttctagagtttgtttgtttctctctcttgaggtggctagagcttgaagaagtcaaaagtatccatattgatgcctagcttcggtcctcggtttaggctaggaaggaaacgaagaagtttctgcaaaccgatgcagatcatcaatggaataatgaaatgttaattttatcatttactcatataggtttccgcctcattatcatttacttgatgtttctcctaaatcttgtcatttaattgactaaggaaataacgaagaaattatcatttacttatttatatatgttcattggatacaattatatatatatacgcacttaaaataattgtttagtgtatacaacaaatgagagttgcaaatgtttacaccttcaaaacacaaactcaaattgtttccatttcttaatcgtttggctcatctcactcagcatagcgactgtttaacagaaaaccggatctttgacttttgttactgtttaacacaattctttttgataaaatttggaaaacttacgattgctatgtaagcgaaagttttgatacacaattcttttttatcaacaacatatatggaaatctatgttatgatatatttcagatgacaaaaaaagaagaagatatgtttagatgattttgcttagtcatttgagcaaacacagatg

SEQ ID NO: 11672 - DNA, 3000 bp, Unknown; identical to SEQ ID NO: 11663
  misc_feature (1)..( 3000): cDNA_ID_2707121_gDNA_ID_2214509_Annot_ID_184190 3000 nt of promoter + ATG

SEQ ID NO: 11673 - DNA, 3000 bp, Unknown
  misc_feature (1)..( 3000): cDNA_ID_2996267_gDNA_ID_2214509_Annot_ID_184207 3000 nt of promoter + ATG
gccatcgccatgtcggttaacggaaccttaaaaatcccgacgacgacgaacgctgattctgatatgggtgaaaatctgatgaagaagaaacgtaaacgaccttctaacagtgagtatatagacataagcgacgccgtttcagcttcctccggtttagctccaattgccacgacgacaacgatccaacctccgcaagctctggcatcatccactgtggctcagcaacttctgccgcaaggaatgtatccgatgtgggctattccatcaaacgcaatgattccgacggtcggagctttcttcttgattccacaaatcgctggtccgtcgaatcagcctcagttattagcttttcccgccgccgctgcttcgccgtcgtcttacgtcgccgctgttcaacaggcttccacgatggctagaccacctcctttacaagttgttccaagcagcggctttgtatccgtttcagacgttagcggttcgaatttatcaagagcgacgtcggttatggctccgagctcaagctcaggcgtaacaaccggtagttcatcgtcaattgcaacaacaacgacgcacacgctgagagacttctccctagagatatacgagaaacaagagcttcaccagttcatgagcaccacaacagcacggtcatcgaaccactgaagaaaagaaaggaaacggcggcgtattagtgatcggaaaaaaagcacgtgtgcacatgaagaagtgcacgtgttaagaagtgggcctcgattttaggcagaagtgggtcaacacgcaccaaaaagagagtggagggaggaggagaggggccacacggctcccaccttacgcatagcttccgaggcagccaggttgggtgtggtccccaaatggttagagctacgtggtccgtatgagtaggaccagcttaagcttaagcataattcgaaacgtttcgtttttttggtgggggctcaccactttgtcttgacttttttggtctttgtaattttacaaaataagatttattgaagccctctctaagtcatggtccactcaacaacaattgtgatattgatgttttgattttattaaaatctgtaacaaaataaatatttctatctaaaatgaaaatactaatgttgttttcctaaaattgttgtagcattacttttcaaatgattccattttcttacaagtgttacaaaagctttttgcgaaaaaagtctcgtccgtgttattggcggggcctagtaagcttgattgtaccactaatacggcgttgtttcgtggggcctgaaagcttcccactcaagggacgcctagttgggtcagcaccaccagtttaacgctaaggaaataaaggaacagcctggcgtgggtcatacttgtgtctatctaatctttaccgttcaattccatcgtcttgtcctaaccgttgattctatttcgttcgttgtttaattagtactagtagtagtagatattttcttcttgtctacggtctcaacgccagacaggatttactataagataactttgtttatgtttgatttataattcaagtgtggttggttaaagttaaaccatggttctccgtttcacaccgttgattatatatttttttaagatatgtaggaagtaaaactttaaaaggttaaacacaaggtaaaatgtattattggaggcctaaaccaacttggtggccgtggatggggaaaaaaggtccagaagtgttggctataggattcctcgtggacttagagaaatgacttgtcgttctcttcttttatttcagtggacctcattaatttttatatatagttggcctataaatttataaatgttcctttatttttcttaaaaaacaaaaaggttttaaatcaaacagcgggaaaccagcccaatgcttttttaatttcttgattaagcccaaaaaagggaaaaagttgtatgggcttacataacatttaggactaaggcccattattttgcgaacaacacaaaattgcttacataacaattgctacgattcatgttgcagaagaacaccgtttttgtttttgtttcttagccttaatttaattgtttgtattcaattgtttttatcatttagaattttgcttcgtccttgtcgaaatcctctcttatgttcttgggttcttatgtacttattcttttctttcttgttcgttcttttttcaagttatgtgaagtaatatttgtcaatgatttcaaagtaagttgttaaaggctcaagaaaccaaatcgttatctattatgtcactaataaaattctactaaatatatataattcttctcctttttttacttgccgataattgtatcctatttacaatgaaataacgcaaaagacttggcgtattatcttttgacacacgtttcaagtcaacgatttcgacatctgctttattctattggtatgtcgaccaagatgtcaatgaaggggtggacaacgatttactgttttcaaatatctggattattaacctctggatgttatctatattttagaaaatctggatacctccacaagaacaacatccatgttccgaactaaaaaatggaatcatataatttctgtttttagtaaattaataactttacatagttaagtttttttaaagtatgttatgacaaggccatgccgaatccatgtgcaatcataatccttatacaaattacctgtccgcgttgacgaaacctttatcgtgccctcttgtcatttgtatactctagtaaacagttgttctcgttatgttaattaacttctataatgtttcatattctaacagaataaacaaaactccaacatgtaatgaataataaatactaatactattttattttattttttaacagtaagaaagaaaaagaaaggagattggaaagaaacaaataacattccaccacaagcgtgtaccaatctctcccgctctgtctctctctctctctttcctccatctctctgtgttcttcttacagacaccgagaatg

SEQ ID NO: 11674 - DNA, 3000 bp, Unknown
  misc_feature (1)..( 3000): cDNA_ID_2711138_gDNA_ID_2214509_Annot_ID_184205 3000 nt of promoter + ATG
aaaaaaaacacctaaagaagtgaatataataggcatatacatatgaggaaaatgaaaacaaaaggagcgaaaaatagatttaacctaaaagaggaagtaaagaggttataagaggtaagaaaagtaggaccatataatagctatattgtagaattttattatttggagatatggcaatttttgtgagggtcccatgaagactaaagtgtggagcacgatttatctttgtaattaataaaataataaatatattattattgtctcgggatttttcgattgatgagaaaaagtaagaggtgcgttttcgaattatcattggctaacgtttgtacgtgactgtacggacgacgttgatgtatttctaatattgtactcttttttcccacccttatttctctaattcttgtacattaaccccaaactaattttacaaacacattggtgtttaatcattgtgaaattttgatttatctaaaatacactttatatgttatgattttgcatgagcttatgactggtaaactcatgagatttccatatcaccatgttggaagttactaaccatacatcttttaaatgcaaattcacatcattcctagactgctagacagacatgtacttacttatacaaggtttttctaatctaatggcaacaaagaaacttgtgactaaacgcatacgtatctctcatatagtgtagactagaactctacgtatctctcatatagtcatatttttaaaaaaattatactttgggatctcgaagcgaaaattagattagtttatatgattatgtacaaaaaaaatcggatattactaccacttaaaaataattgtagtggtcaatcatatctaaaattaatcgcagtgaacaaaaacctgaagcatagcctggttctatcttactttcgatgtgacacattactaacacgattgttttaatctataggacgaatcctttaagtaatgtatagttggttcagttacgttagatactttttgttttggatttgtctcaaccagttaagaagtgatcgtatttactagtggtatacgatgatgtttctttaaatctgaattgggtctacaaaatacataactaaacttcaaaccgggtttatactttatacaaacacgaaaatataaagatagagacaattcaccagagaagatgtgtatttatataaaaattatccatacagattttcggacctatctgtttgatatttaatatatataaatacgttaacatatttcaccagagaagatgtgtatttttcgaaataattagtttgtgtggtcctcctcccgatatagataaaagatcattagatatcgattaacaattttatctccaaaaaaggatatttttttggtgccactagctagacaagacgttcgataagctgaattattattggatttctaagttacgttttctttagtaatccgagggaccaaaaatagcaaatgcctctttagacacgtcgctacttaacgccattgccccattgtctctgtactagcctccaaatatttggattaatggtcacttaggtaatgaggaaattgtagtattttgtaatgtggttttgtccaacttataaaaacttacaattgcaagtaattaattattcacatggagatgtaagattatgtcatataactaaaaacacaatttaagaacaacaataagaaacaatggacaaacaagcatagaaaatatacaaatcaaatgaattttatctgttgggatggaaagatattataaaaattgattaaaaccaatatagttgtattactcacaggtaagaaaaaacgatattcttatttttcatatcaattacaagtgggggcatataggtacgagagagtgtttgtgtccacattaaaaacaaaaaaagatttttgttagaagaaatttaataaaaataatttgacaggcatttccatccaactagatatttatgggagggaaaaagatgtgtatgtaaaaatgtccatatgtatcaaaatatgctatttttggtctttcttaaggcttttttccaaaataagtaaaggatgaggtttcaagcgtccatcatatttgcgacacatatgactgactatttagctcctccctctttctttctcttattttattatctttctccaagaaataaaatagaaaagaaaatatatatggtttcacaaacaccattaccataactacaacgagaagaggatcttttttaaggagaaaagcagagagagaagagacgagtgtgtgaagtttttttgtcttttgtttcttttattacacacaaatagatgaaacgaggaaagctacttcttttgctacttccataaaaaggttcttcctttcgcagagaatcaactttgatcatcttcttccttctctttctttcttcttctccctccagtaatgcttatatagtctcctcctatatctctacctatacatacacaaaccctttatcctcgaaagcttcctcctggttaggtttttatcaaacccttttagccaatcggtaagatctcttcgtcatgatcttttcttttttcttttgctttgtactctgatggatctataaacttatatgggtttggtttcatttggttcgatttgatgtgtttggtttctttgtcctaaatctcatgaaaggaggttgcatccttcaattaaaccgataacaaaagtttccattacagacttatagatcagatactttagattgttttgctttttgggtacttaatctttcgttgacttcatcagtcttctcccacccaaacaaaaaagtcatatttcgatcatatcttcatttttttaacctactctctttgattcatatatgaaatgggttgttttatgtgtgtgactaatcttgttattgaggtggttgcaccattgatctaccgttttcttcaatttttgaaaaaataattttattttttttctgtgtgcaagggaaattaactaaagaagaagatatg

SEQ ID NO: 11675 - DNA, 3000 bp, Unknown
  misc_feature (1)..( 3000): cDNA_ID_1807963_gDNA_ID_2214509_Annot_ID_184204 3000 nt of promoter + ATG
cgtttatagattttgttgccaatggtccgtttaaaagatttgaaatatatatattttttttctactttttcttttcttggtttataacctttgaatatctatatttgaaacacacattgaagatcactaactcgaaattcaaaaataaaaagagagacaaatatagcaatccataatcaatgcatagagacttcaagtgacctactaggatcccactaaaaaataatatgctgttttttgcctattccttttgcatcattcttgttatagtaaaatggtaaaagaaattatggaaaataagaaaatggggtcattgaatgtcaagagggtaacattttcagacgataaggcgcaatgaccccacacctcacatgaagctgcagtgccatttccaaaagagtgtgtggatatgaatttgaacaaagaaacattggtgatgaaattaaaaaagaaaaggaaagattactacaaagtgaaaagtatgaaattatgaagactacccgatcttctttgcctccctttccgtatttggcatgcccctaaccactaccacaacctcttcccttcggaactttgtaaataaacattcactgtttttttttttgctttttaaatagctgttaattgtacaaattcatttacatggcttactgtttttcaaaaggagatactaaatagtatatagtactataattttgtccaccatgttctatgaaactcgtccaaacataaaaaggtttttatatcatcaaacgtacgactttcctttgttattttcttggattggacacaacgagattggtttggtcactgtccgatctagttattgatatatatatatatatatatatatatatatatatatatatatatttttttaatataatgtagatgtagcccactaacttttgataagctttcatttttctatactttcatttttctataatgtaaaaagatagatgaaaatgaaactactagattacaactttttaacaaaaaataaaaaactactagattacagctcttgattggttgataacttgatatcatatatcgtgtttgtagttgaagatgtaaagatttatcatcttgtatttgaattttgcacaatatataatgtgatgattctatgtttgtttgtaaacttatgtgcaaatgggcgataactaaacgttcgtaaaatagttacatgtactaattaatcgaagcacataaatattatatatatatatatgtatatatatgaaacgattcattgattttaagtatttaatttattttttaagattttagttgtcttaacctcgtacgaagaagaaggatatatactatttaactcgtggagatgatgaggttcggatatttttccttaagaccacaagacactgacacgccgactgatcgataaaaaaagttaaggcctacaatacaaaagagtagcagattcccttacacgtgtttcatttatgatctgttaattaactccattgagcttcaatatctcattagccgaaaattaacttgacgttttccattgaactgtcgaaaaaatttgtagaaaaagtgaaatgtcccctatttaacttccaagtttaaaacctaaaattaattagttaccgttttgatgaataacgttgaaagaatcgtcaacatatcaaatgatgcagatacaacaagggacaaaaacatcaaaaaattgattaaaaataatcattcagatattagcaattaaactgtaagtaaatgattgcatatatatatatgaatgaatacatatatatgtatcaaactgtaagtaaataatacatacatatatatatatatatataggaaaatatctcatttttcaatcattttcagaggtaaacatttttaaagacaattttacctaacccaacatcttactatatttaaccagctctgcgagagcttcaaaacaatgatgaattttctgccccttttcattgaccaaataaaagttcacaaatttgtaaaaccaatcagcattaatttcgcacgtagtttacttcgtccgattttagatcaagtagacattttaaccaaacatattgaatcacggttcaatcaagatacatggttgcgagtataatatatcaatccttcaccgcattagaaaaccaaattttctatttaatttagcgtgttcttttaatgaacgcagcgtcagcgacaacaaagaagaaaaacagatctgcggcgagaaaaaatacattgattagagaagaactgccgcaaaagatgtacgatgatgaagattgacgtgacgctgcttaatttcagcgattcatttgatgcaattgcaattcatcggctatcatcggcgactcatccgaaattgttattttcaagctttaatgtcgttttacttacctactacttctcatgacacgtcgtttcagtccgctattgccgctggcgcagcatcaaataaaagaacacgctaggatagcttgaaaagggtacaataactagttatagaagaacatgagccataacatttggaaacaaaatgagttagtttgaatttgaaacatcgcgctctatgtaaaaaaagcaaaaaagaaaagaaaagagtcctaataattaaaaagagaaaataaaaggaattttcaatggtccgactgttacaagtagatttccatttttaggaatctagctataacgatgaagacagagttatcattttgttccatcaaatatatgacgatatttatatttaatttcttcaacaacaaatatctcatttgttggtgccactttcacatacttaggacgactaataattaattaaaaaggatttatgtaataacgcaccatattaacctgtaacaagaagaattgaaagtaatacaagtttatatatatagcaacacatttatcgtgtacgatactttattccttttatctattcttgaaaaaaagttaccaattcttgagaagaagaagaaatcagaatcaagagaaggagagagaaag

SEQ ID NO: 11676 - DNA, 3000 bp, Unknown; identical to SEQ ID NO: 11671
  misc_feature (1)..( 3000): cDNA_ID_2707113_gDNA_ID_2214509_Annot_ID_133801 3000 nt of promoter + ATG

SEQ ID NO: 11677 - DNA, 3000 bp, Unknown; identical to SEQ ID NO: 11670
  misc_feature (1)..( 3000): cDNA_ID_2707109_gDNA_ID_2214509_Annot_ID_133802 3000 nt of promoter + ATG

SEQ ID NO: 11678 - DNA, 3000 bp, Unknown; identical to SEQ ID NO: 11669
  misc_feature (1)..( 3000): cDNA_ID_2707105_gDNA_ID_2214509_Annot_ID_133803 3000 nt of promoter + ATG

SEQ ID NO: 11679 - DNA, 3000 bp, Unknown
  misc_feature (1)..( 3000): cDNA_ID_3022416_gDNA_ID_2214509_Annot_ID_133804 3000 nt of promoter + ATG
aactacgattagccataagttcgtagacgaggataagcttccgaccacgacgatcggaggagaatccaaggagagagacgacatgaggagagccaattaagtgagaagagagagaaagctcgttgtgaaactcacgttcgccttgtaaagaaccagcggaggtatccatgactttgacggcgagtgaatcgccgccactcgggaaatcagctttgtaaacagagccgaatccgccgtgaccgaggtgagtcgactcggagaaagagtttgtagcgcggcggagctgagagtaagagaagcgtcgacattggtagtgttgaggagacttggagttggagataagatctgaaggagccgtacggtttcggtagagtcttcggtaaataagtaaagtgacgaggatgagtaaaactccggttaaagtcagagaaccggctatgataagtggaagagtctggaaacgatgatggccgtcactaaccgtaggcgtcggttgcagcggcggaatatctggcggagagaggcgagatggcattttagtaaatataggaagttacagaagtgtcatttaatccggagtttccattgaagaagaagatggtgagatgttaaaagattttcttcagctacttggaacactcgcgtagtaaaaataaagagatatacttgtgtgacaggcgagcgataatggtaatggtgacgtgtcggagaataaatgggggatggtgactgtgatttgtgacagtcatgtgagcggatattattgctcacgtcgtttagcggaagaccggtgagggatagatttgagtcaccgagtcgtgagattttaatgagggagcgtgatttgcacgcggcgcgttgaggtgagattcacgagggttttgttttgaaaccttcttctccttctgaagaggtccacggtgggacctacgaaatttaactggggaagtgatggtgaagtcaacctcactcgccttttaagaagcgcgtggatgcatgtgtggttcgagcttaaccaatttcttggctagaccatcggttaaacagcaattagtcgtctgattaatttggatttgttcgatcgactagccatgtgcataactggtcggcaatgttatattagatgttcaatcttgttataacattagtagtaattagtaaaatggtgtattgattgtctaggttctaattatatcgtttaagatggttgataatttagttaggcgcacaattttaatatcaaacttaatcattttttagcttcttaaaaagaagcaaaaagcgtacagctatttttgtaaaatcatatgtataatttgtaaaatacaatgtttgtgttaaacacaaaaagatttgtttttgttgtaataatcaaacgtgttagtaacgtcagcgaaaaggaggcatttttcaggtcgctttttcgggtgatgggattttgaccttttcaattttgcccttaatcgctttggtctgactcttattgtggtttttgtttggtttgttttggttttacttttacccaatttttagacgcacgagtaacgtatacttgcaaaacaaaagagtgagatcacgtcactaacgttcaaaatcatttcactcgctggcaccatctcttatttattttaatttattcgagggagaaaaaaaatggttcaaagctaatgacctaatgttatcattatcattagagaactatccaagtgagaaacattcgtgaatccacttgatgttagtgggtgatttgttagttttaatagaacaacaaggtttgtttactttttatttttggctaataaagaagtggttagttgcacttaggggtttgactttggtaacatcgttggaatcttgataagggaatctatggaaaaatatataaacaaagaagtaaagcgtcaaacacaaagccttttgcaggtttaaagcagattcagatgtacttttaatgtattttttccaaaaataaaatggagattggagaagaagaagaagaagaagaagcgacgactactactcaaattgctcatgtgacttccactacttaacctcctttagaaaactacaaaaaatagttatcattaaataatactgtttgctagccggaacgttatagccaacacttgtcgggacccgtgaccgtggtccctaactttccactaccgttacatgaataaaagttctttatgtttcatagtttttatacctaggagattttattagtgttccatgaccatccaagatgtagtaacagttgatagtaagaagataaaatttgagtgttgtcactcgttaattagcaaatatcaagagatgcacattaaaggagcaaaccaggtcgagcaacttaacctaacatcagaacaaatacagctaacagtagataaagagagtaacgtacacctaaacacatggttaagctgcctaatagtataattaatgaaattaatgtgaggtttaacagatgaacagtaatggctacatacaagtttggcaggcggttgtcttgatctcccatgtgtcattatagttttagaatcatatattttttcttgcatgttttgaatccaattaatgacactaatacaactcactattttacatattatgttctcattgtttatataattagtctgtaccaaaaagaaatcccatgtttgtaagaaatttaggcaagtatgtaaggttcaaactttccataagtgggcatgacaaaaacaaatttttagaaactcagatagtttgtaggtgttataagcagcaataaacatatacattatgcaaccgattgacagtttttgagaacttgtttctccattttagataatatctttaaacttgtgaataaattcattagaaaaaaaacttaaattcatggatataaaatgcatgattgagttatattttctaggcactctccaatttcattaaacaaggagagtagaacctaaagaaaaaagtggtcgtccaatggacctctcactaattcaaggcatg

SEQ ID NO: 11680 - DNA, 3000 bp, Unknown; identical to SEQ ID NO: 11667
  misc_feature (1)..( 3000): cDNA_ID_2707094_gDNA_ID_2214509_Annot_ID_133808 3000 nt of promoter + ATG

SEQ ID NO: 11681 - DNA, 3000 bp, Unknown; identical to SEQ ID NO: 11666
  misc_feature (1)..( 3000): cDNA_ID_2707091_gDNA_ID_2214509_Annot_ID_133809 3000 nt of promoter + ATG

SEQ ID NO: 11682 - DNA, 3000 bp, Unknown; identical to SEQ ID NO: 11665
  misc_feature (1)..( 3000): cDNA_ID_2711142_gDNA_ID_2214509_Annot_ID_133810 3000 nt of promoter + ATG

SEQ ID NO: 11683 - DNA, 3000 bp, Unknown; identical to SEQ ID NO: 11675
  misc_feature (1)..( 3000): cDNA_ID_1807963_gDNA_ID_2214509_Annot_ID_133811 3000 nt of promoter + ATG

SEQ ID NO: 11684 - DNA, 3000 bp, Unknown; identical to SEQ ID NO: 11674
  misc_feature (1)..( 3000): cDNA_ID_2711138_gDNA_ID_2214509_Annot_ID_133812 3000 nt of promoter + ATG

SEQ ID NO: 11685 - DNA, 3000 bp, Unknown
  misc_feature (1)..( 3000): cDNA_ID_3022468_gDNA_ID_2214510_Annot_ID_133815 3000 nt of promoter + ATG
agtggaatgcttatgagactttgaagattcaaaaggcttacaaatttctctaaccagtaaccatgcatgcacatttcttttttaagcacacatcattaccattcaccttaagtcttctaaatagatccttttgagattttgtctagattttccaatctttttctttaaattgtgatctcatttgttgttgatttgatgctaaagctagatttgaatcttgctttaaacacaaacaaaacgaaaaatttaattagttgaatatatatatttaattatgattaatgtgataacctttgaatgtttgattctatatgaatcaaaatttaaaataaagtaattacttccagtgatgagataaatttatccacactacaatcttgtcaatcaatttttttgtttataacgaatatatgtattccattggattgaagatcaatccttttcaataccatgcagaatcgaatttaagatatcgagaagaatggtaatatattgactaagttgagtcagccaaattttatccaaaaccggttaatattaatacaacacacaaataaaaatcaaatatgtcaaatgaaaatacctttaaatcaaccttaaatatattgtacttattaaagagaactacgaataaatttgtaactttattttaccaaattcacgggttgttaataccaccgactatatatgctttatagatttgttacttgatcttgaagctcccaaagattcttactaaagtttggtcaaaattaattatcaccatgaaatgatgaaagtaatttttttttcattcccatcactggcactggcagtttaaccgtttttttcccgttaatcagtgacaaattttttttgtgaaccaataaccttaaaagtataattaaaaaagttaaagacatgactaaggtttctgaaatccatggtgaacaaacaaaaatatttgggtaaaatgtcattgcaagcagacaacagttaaacagtacctccgggtcttgactgttaatcgcagtctatacagtcatctatgcgttatggaacgaccaaaacaatatggtcttcaacaatcttctcatcatcgtagaagtttctcttcaaaattgttgttttgattggcgaatcaatattatttgtattgcaagacgagaaattaccaaaggatagttaatctagacttcgaaacgaattatgtgaagttcatcaaattgataacaatttatattgcttaagagcctattatgtctcgcgttttatttgttaagattgattttttagctagttcttttttttttgtgcaaccgtttagctagttcaatttgtagtatatacaaggtttattatatgttttgccctactgttttaatgtattggccaatgaaaaaattataaaatatattaataaaaggtaaaacagaaaatttaatagttttcttaatttgtgtggaaaaacattaaacgacatgtaattcaaatggatggagtatataagagaaacaaatatatttgacaaatgatattagagtatcggtaaaattgacttcgtagacgtacataacgacctttaccatacccgaaaagtcaagtgtacagtttaaacaattaatgcaccgaatggagtttcatgctaacttaatattttattttgattcatattatattatttatagttataatgtgattcatatatattaaaaagtgataaatgaatatatacatatatatagtgatattttcatattattacaaacatattcctctctatataactatattttgtaatttgttttcaattttacatacattagataaaaaatagacactaaataaattcgcgatccttcattttttttttgttcacttaaagattaactttcttaaaataagattgcaaaatattgagatgaacgacgtttctggtacatgaagccggcatgacctaattctccggaaattaagttgacgtaaagatatatgaaaacaaagccttaacaaggaaagcaaagaagatgaaatgagagagtcagagaaattcacaagactcacacatgggaacgggtgacatgggagatctagtgataaatgtattttggacgttttgtggatattttcaacccacttttttttttttttttttttttttcttcaatattttcaacccacttaatactacagttttgctacaagccatatctctttttaactatttttaaaatctctggtatattctgtgattactctacagtttttagttacctaatattttttttttgaagtaaaagcagaacccaaaaacaccatcacaaagcacaaatctttgaaaacttctgagatagagacaaaacaaaagttgggtcctataaattttcattcatttttcatctttaaaattcatttatttcttcttttaaattattaattaaaactttaaaagttggaaaattcttcaaaaccgtacaactatatttgtgtggacctgaagccaaatgtctctctccattggccattttaccttctacacattcccactggccaaattcgaagttcattctctctcaaatcactttgcccaaatcttcctttttcccatatttgatttcttctttaaataaagcaaaaaagatttcatctttctatttattctctttataaattggaacctactttgcttcttcttcagtctccacacttatcttatttttgccagtcttctctgtggatgaagcagagtttttagtcaatcaaaagtttgaagctttccttcatgggtttctgatttgtctactaaagttttgatttttttaatttgggtattaataaaaaaagtggggagtgacacaagaagcagtatagtcattagttttccactaagcaaagcacccaaaagttcaccaacaacaaaggcctaatatgtgtctttgtttatgatttgggatcatctgaaacaagatgcgaggagatagcttctcaatgagtattgagaatcttcctgattctccaatg

SEQ ID NO: 11686 - DNA, 3000 bp, Unknown
  misc_feature (1)..( 3000): cDNA_ID_2711149_gDNA_ID_2214510_Annot_ID_133817 3000 nt of promoter + ATG
gcaacaaaatggattctttacacgttcttagatcctttcttcttcttttcattgtttttaatcatcttcctcgcacaactacatcaatgtcagaaccaaaagtcattaccatcgatgtaaaccaagctcagaaacttcttgattctggctacacgtttcttgatgtcaggttaatcttaaaacctttcagattcagtcatgcctttattgttgttcgatattactgtctggtgatttctgaaattttaagagctgttaaacacagaactgttgaagagttcaagaaaggccatgttgattcagaaaatgtcttcaatgttccttactggttatatactccacaaggtcaagagattaaccctaatttcttgaaacatgtttcatctctctgtaaccaaaccgatcatctcatcctggtaataacatagtcttgtcctgatcatgtgaaagtatatttcaattcactagatcttttttttttttatgttcactggatctgaatctagaaactgttgttatgatcttgttttgtagggatgtaaatctggagttagatcattacatgctaccaaatttcttgtttcttccgtaagtaccaaaagattcaagatttgaaaaccctgttttcttctttaatctatgagtttattggtgagatataatgcgattgtttaatcatgtgatagggcttcaagactgtaagaaacatggacggtggttacattgcttgggtcaacaagagattcccagttaaagtggaacacaaggaactcaagtatgatgagctttgattcaaattcttcaaatacaagcatgttaatgtaaatttttgctttaaatatatgttaagaatgtgtaaatgtaatcatattattgcaaatttgcaataacacataaagtataaagttcaaggtttagagagatgaaaaaatgggcagaccgaccaatgaagctccagcatcgacaatgtatgtattcccggagatatatttagacgagtcgtgaacgaggtagcgtaggagagaagtaagccccggatccactgtctgttgtacctttaatgggactgtcctctcgataacggtcttgagccactctttttgcataagaccttgtgtgatctctgactttaaaagccctggtgcgatcgaattcactctgatcttgtaaacacctaactcaagtgccatcatccttgtcatggtgtcaacaccgcctttagaacaagcgtatgcgactccaccaggcacctgaccgcggtggagccaggatactgatgaaatgtttatcaccgagccaccaccacgtttagcatcgcgcattaaaatgcatacgtatttggagactaaccaggttccggttaagttggtcttgaagactttgtcccactcgtcttctgacaaatccaaactcgacttgacattgcctctaaatcccgcattgttgatcaacgcatcgatctttccgaagatttcccaagctttcttaaccgctttttgaacggtggctgcgtctgatgaaacgtctagctcaagagcttcagcttgaattccagctgaatattcgaagcgatttatttcagagcagagagatttgagacgatcgacacgacgagctgctgcgataatcttacagccagctttggctagatcaagacatacctctcttcctataccagaggaagctcctgtcacaagaaccactttgtctttaagttcacactatggctccagttgcttcaatacctgctttgttagagtcatattaaagatgattaaaaagcatatatgataaattttcatataattgagctaacacagtgagatataagagaagaagtatctcacgcacagtttgatgattactcatgttgtttctctttgtgtgttctttggtggagaaggatatgcccataacatataaagacttgtctctaaaccaaaacgacattttaacgtggcaatctaaatctgtaagtctgtaactgatttgtctatcaaccaaactttaaaaccttttagaggcaggggagtctttattgttagttagatactgtctggtgatttctggaatttgagagctattaatacagaactgtttgatgaagttgagaaagggcatgttatcagagaaactctttaatgttcgttactagttttgtgtgtgtgttttttaaaaccttaataaaaacagaggatattggtcttaatgttttttccttgaaccaatctaagttttttaatgagaattaatgggattttgtcttttcttttttttatcatgtaaagagaacttcaagactgctagaacttagaaacatcaaacatgtttggtggttatattgctgattaagattatccaaatataagcatgtttaaaatttattttgttaactaaatctaaaatcgttttttttttttttaatcgttaattattgtatgcaaaacaatttaagttataagttaagcaatgacatgttaatagttcaaactaaatactgttttacaaatgtaatagcatgttatgtagagtaaataattagtaccttttatcagaaaagaaaaaacgttactaccttctttttttttttactcaaaaacaaacaaaagaaactatcatttctttatttcagttaaataatataaagttttagtgatacgcaactgcataataaattatctttaagtacactctttttttgagtttaatgcaatttccgagacgaaaaaagcgaccgaccgacatgagaacaattaaccgtgtaacagcgcgggaaagatgtcgacaaggtgagttataaccgaaccggtttataccgttttacacgcgtcatttacgcgtaacatccacgtcttcccaaatctgacagatacagagatacttaacttggtccctttccttcttcttcttcaaatataaatatctttaatcaattcagaaccaaaccaagtcaatcattcttcattgatcttctccgatttgaaatcgccggcgaaaatg

SEQ ID NO: 11687 - DNA, 3000 bp, Unknown
  misc_feature (1)..( 3000): cDNA_ID_3022468_gDNA_ID_2214510_Annot_ID_184218 3000 nt of promoter + ATG
taaaaagatatatagaattatgatctatacatatccgtaagtatataattaagtggaatgcttatgagactttgaagattcaaaaggcttacaaatttctctaaccagtaaccatgcatgcacatttcttttttaagcacacatcattaccattcaccttaagtcttctaaatagatccttttgagattttgtctagattttccaatctttttctttaaattgtgatctcatttgttgttgatttgatgctaaagctagatttgaatcttgctttaaacacaaacaaaacgaaaaatttaattagttgaatatatatatttaattatgattaatgtgataacctttgaatgtttgattctatatgaatcaaaatttaaaataaagtaattacttccagtgatgagataaatttatccacactacaatcttgtcaatcaatttttttgtttataacgaatatatgtattccattggattgaagatcaatccttttcaataccatgcagaatcgaatttaagatatcgagaagaatggtaatatattgactaagttgagtcagccaaattttatccaaaaccggttaatattaatacaacacacaaataaaaatcaaatatgtcaaatgaaaatacctttaaatcaaccttaaatatattgtacttattaaagagaactacgaataaatttgtaactttattttaccaaattcacgggttgttaataccaccgactatatatgctttatagatttgttacttgatcttgaagctcccaaagattcttactaaagtttggtcaaaattaattatcaccatgaaatgatgaaagtaatttttttttcattcccatcactggcactggcagtttaaccgtttttttcccgttaatcagtgacaaattttttttgtgaaccaataaccttaaaagtataattaaaaaagttaaagacatgactaaggtttctgaaatccatggtgaacaaacaaaaatatttgggtaaaatgtcattgcaagcagacaacagttaaacagtacctccgggtcttgactgttaatcgcagtctatacagtcatctatgcgttatggaacgaccaaaacaatatggtcttcaacaatcttctcatcatcgtagaagtttctcttcaaaattgttgttttgattggcgaatcaatattatttgtattgcaagacgagaaattaccaaaggatagttaatctagacttcgaaacgaattatgtgaagttcatcaaattgataacaatttatattgcttaagagcctattatgtctcgcgttttatttgttaagattgattttttagctagttcttttttttttgtgcaaccgtttagctagttcaatttgtagtatatacaaggtttattatatgttttgccctactgttttaatgtattggccaatgaaaaaattataaaatatattaataaaaggtaaaacagaaaatttaatagttttcttaatttgtgtggaaaaacattaaacgacatgtaattcaaatggatggagtatataagagaaacaaatatatttgacaaatgatattagagtatcggtaaaattgacttcgtagacgtacataacgacctttaccatacccgaaaagtcaagtgtacagtttaaacaattaatgcaccgaatggagtttcatgctaacttaatattttattttgattcatattatattatttatagttataatgtgattcatatatattaaaaagtgataaatgaatatatacatatatatagtgatattttcatattattacaaacatattcctctctatataactatattttgtaatttgttttcaattttacatacattagataaaaaatagacactaaataaattcgcgatccttcattttttttttgttcacttaaagattaactttcttaaaataagattgcaaaatattgagatgaacgacgtttctggtacatgaagccggcatgacctaattctccggaaattaagttgacgtaaagatatatgaaaacaaagccttaacaaggaaagcaaagaagatgaaatgagagagtcagagaaattcacaagactcacacatgggaacgggtgacatgggagatctagtgataaatgtattttggacgttttgtggatattttcaacccacttttttttttttttttttttttttcttcaatattttcaacccacttaatactacagttttgctacaagccatatctctttttaactatttttaaaatctctggtatattctgtgattactctacagtttttagttacctaatattttttttttgaagtaaaagcagaacccaaaaacaccatcacaaagcacaaatctttgaaaacttctgagatagagacaaaacaaaagttgggtcctataaattttcattcatttttcatctttaaaattcatttatttcttcttttaaattattaattaaaactttaaaagttggaaaattcttcaaaaccgtacaactatatttgtgtggacctgaagccaaatgtctctctccattggccattttaccttctacacattcccactggccaaattcgaagttcattctctctcaaatcactttgcccaaatcttcctttttcccatatttgatttcttctttaaataaagcaaaaaagatttcatctttctatttattctctttataaattggaacctactttgcttcttcttcagtctccacacttatcttatttttgccagtcttctctgtggatgaagcagagtttttagtcaatcaaaagtttgaagctttccttcatgggtttctgatttgtctactaaagttttgatttttttaatttgggtattaataaaaaaagtggggagtgacacaagaagcagtatagtcattagttttccactaagcaaagcacccaaaagttcaccaacaacaaaggcctaatatgtgtctttgtttatgatttgggatcatctgaaacaagatg

SEQ ID NO: 11688 - DNA, 3000 bp, Unknown
  misc_feature (1)..( 3000): cDNA_ID_3022460_gDNA_ID_2214510_Annot_ID_184221 3000 nt of promoter + ATG
cttatttatcaaaagacaacaagacgatacaaacaaacaggaccaatgagtctgttttgcttcatcaggcagccttactaggcttttttttgtgaagctgcagatctaatggcggtttttgcaagcgtcgaaggcttgagtacactcttcgggttaatagcctttcttattttgaaagcaacccaggctgtgccaagcgcatatcctgctgcatcgagcccttcgtttgtcgcctcagccgctttaccaccatacctatattcatcaaaccaaaatttacatccttctcttaaaacactttccatatccaaataaccaggagtttcaattccaaatactcgattttacttacttgtgatcaacgagttcggttgtaacagtggaagaggttgacattacattcctcccagctacttcaacagcgtcacagaccttatctatcaaaacaggaatcaacagtttcaatgatcatgattacctaaagatagccgcatgaagtcgagttaagtatattgtagacttactgaatccgtcaagagatgcaaggatgacttctccaggaagaaggctgaagaatttctttcctactttggtgtttgccactgaacttgtgaagaatccagaaactttaaggactccagacagtatgctgtttgctacactctctgtcattttggtcatcctcttcactctgcataggcaacaacacaattagacaccaatacacgtaactatatgtcattttgctagagacgatgaacacatatcgtctcagctctcaaattacactcttcaggacacaccagaacaaatcaagatcatcaatcaaaacttatgtctcacaaaaaggattatcaaagacgttcacacaagtttctgtccagacaatttcctaaaatataaaccatattccaccaatttactgcaaacattccatgacacagctataacaaacacaaagatttcacctttcgagaaacatcacaaacctctaaatcaaaatcaaaatcaaattcattcataccttctgattcttttcaaggtgtcagggtgaacttcactctccttctcagcctttgacaacctccttttcatgaaaccatttccccaaataagcctatccatagtcacatctccacaccaaagaatcccttttatcaaatgtcctgagccagttgcaatcagcttcgccgccttcccgctataatcctccacattcggagccaaagtagtccaataagcagaacattgcctctccacaatctctttcctttccccagtaagctccaccggagacgtctctctcgccaccgtcacatccaaaaccttttcacctgcttccttcgcttcctctgacacctcctgcacagagaaactactataatcctccaagatcttctcaagctccaccagtaaatgctcttgacctttagaagcaattgtaagtccgtagttcaacatctcgttagtgtttttccctccatctccgtcttcttcgtcgcttgaatcatgtgagatctctttggtaggacgaagcgtgaagaagtaatgagactcatcgaccttgacagagttctcatccttagtcaacggccattgaatctcatcggagacactagcgagaacagcgacaacattctctccttgaacaatacggatgatctcaagatcaccgcaagcgagctcgacgctgtaagatttgtcgattaaatgaagaatcgcgccggagattttcaaaattacttcctccgtcgcagcgggaggagctgaaaccggaatagaactcgtctctggttgttcagggaagagattacgagcgagatcattcatatcgagagaaggatagagattgttagtagaagatgatgagctagggtttataggagcttcgggattggatgtgtcaacagtagggtaaagagaagaagtttgcttgtcgccggaggattccattttcgccggcgatttcaaatcggagaagatcaatgaagaatgattgacttggtttggttctgaattgattaaagatatttatatttgaagaagaagaaggaaagggaccaagttaagtatctctgtatctgtcagatttgggaagacgtggatgttacgcgtaaatgacgcgtgtaaaacggtataaaccggttcggttataactcaccttgtcgacatctttcccgcgctgttacacggttaattgttctcatgtcggtcggtcgcttttttcgtctcggaaattgcattaaactcaaaaaaagagtgtacttaaagataatttattatgcagttgcgtatcactaaaactttatattatttaactgaaataaagaaatgatagtttcttttgtttgtttttgagtaaaaaaaaaaagaaggtagtaacgttttttcttttctgataaaaggtactaattatttactctacataacatgctattacatttgtaaaacagtatttagtttgaactattaacatgtcattgcttaacttataacttaaattgttttgcatacaataattaacgattaaaaaaaaaaaaaacgattttagatttagttaacaaaataaattttaaacatgcttatatttggataatcttaatcagcaatataaccaccaaacatgtttgatgtttctaagttctagcagtcttgaagttctctttacatgataaaaaaaagaaaagacaaaatcccattaattctcattaaaaaacttagattggttcaaggaaaaaacattaagaccaatatcctctgtttttattaaggttttaaaaaacacacacacaaaactagtaacgaacattaaagagtttctctgataacatgccctttctcaacttcatcaaacagttctgtattaatagctctcaaattccagaaatcaccagacagtatctaactaacaataaagactcccctgcctctaaaaggttttaaagtttggttgatagacaaatcagttacagacttacagatttagattgccacgttaaa

SEQ ID NO: 11689 - DNA, 3000 bp, Unknown
  misc_feature (1)..( 3000): cDNA_ID_2994339_gDNA_ID_2214510_Annot_ID_184224 3000 nt of promoter + ATG
aagttaatagtgtttcaaataaaaagtttgttaaaattttgttttgtagtcatttgtagctagatgtagacttaaatactagtaagattctgattattatgacgtggaaatgaagaaattcgttattatctatcaatagaaaaacgcattgcattaggcttgtattaaatagttgtgacaagactaaatagcgcgttttatataataggaagttaggataagaggagatagcacacacaaccacgtttatatactatttttggtgtttagaaattttaattattaatagaaaagtgcattacaattatacatttaacaaaagaaacgaagaaattagaattatcaatagaaaagtgcattgcatttggcttgttttattatagtgtggaaagagtgcttttaggtattagggtgagacttgagagagatggtacacgtaaaggcctaaaccatgtttgtatgtactttttttggtgtttagaagtttgaatgatcaagttaggtttaagtggactatcaaaagagagatagccaaatgatagtaaactacattttccgtcttaaaaaaaaaaaaactaaaaacacactaattaatgttacaaagtttagatatttgtttagattttttttgctatgagatatttgtatgttctataatgtatattagtatatacatatgtaaacataaacctatacttaataatatatctctaaaatgcatagaaaagaataagataaatataataagaatatataaatttaaatatatgtatatatagcgctagaaaattaaagttttaaataaaatatctggttttcattatttaacacgatatgaaacaaatttatatatagattttagaccgatgtccctaaattgtaaagtccatatattttagttgatggttgaggggatccttctcccttttgattactaatcagactaattgtttggtggttagtgtaattatttgtaacactaaacttctaaaagctaattatgcaaggcctcttgttgtaacaataaacaacctttaacaataaaaatctcagaagacacaaaagaaaaaaagaagtccatatatttatttagtccatatatttcatacatattgtatcatgattctatagtgtctgtttacattttatgtatctttaaattacactgaatggttaaaaagataccgaatggaaaatgaatgtatctttttggtatcaaaatatgaaacatcgttgtccttttaacttttcatatttttattgatctttccaacagtatgggtgatatttcatattagttaataatagttacaactttagttaataagtaactatccgattgaaacaaagtagatcagtaatacaactatatttaccgatttcttccggatattcgcttagggataacatttaatcgaatgttttaagtttcatgagtaccaaaacaagaaaacaaataataacaatgtgaataataatgttatcaagttttgttatatgataccaaaaatagaaaaatttggtagatgacaataataacttcattgccactctcaagttcgttcgttcgttgaatcttatctcacttctcccattatttacaactgtggataagccttttagtctgactcagctttctcaagatccgaaaacacactgacccaacccggttcgattttgcttaaccggacaagatacattaatctgcctaatcttcaattatttaaaagctaactaaacgttatacgtactaatcacttcttcccctataaataaacctttctaatttctcatctcaaatcacactgcatcacaaaacccaaatcggaacttaaaccaaaagacaaacaaaaacgccgtcgtttcacgatgctttcttcttccccaaccttcttcgctactccatttctctcttcttcttcttcttcttctccgtcgttctcttctacttcaccaccgtcacgcatttcccggatctcgccgtcgctttctacaaccaccgcgtcctacacctgcgccgaagatctaccgagattacgccaaatcccgcagcgattttcagcaaccgcgtctctctacgagatccttgaaattcccgtcggctcgacgagtcaagagatcaaatcagcttaccggcgactagccaggatctgtcatcccgatgtagcgagaaatagtcgggataactcgtcggcggacgatttcatgaagatccacgcagcgtattgcacgctttcggatcccgagaaacgcgccgtttatgatcggaggactcttcttcggagccggccgttaacggctggatacggcagttacggtggacggaattgggaaaccgatcagtgctggtagcgagttgactcgatgtgtcgagttggtccaaaaccattgaattggttgtaattagagcaaacccagagattctgggtggttgtgccacgtaggatcaacacggtttatcgtgccacgtaggatctgtcgcgtttttagcctttgtatccataagtagtaagtagtctgtatttagtatttaccatctaataaagaaaataaaaatttatgtataacttaaagtgttccaacttagcaatcaatagtatgtagccttggagaaacagattttttttgttacaggtaagatttacatactgaaatcatatagcattcttagaaaattttagttgtattatgttgtagtcacctaatttaaaaagctgggagtgttttttttctagtcgcacaatcagccgacatcgacaataaaagaaaagaagatctatgtcaaatagtaacaaaaatacataaatacatatatatgtaaagattttaatactgttgcggtgcggttttgggtgtggtctatgttaccattcatggtcttagtctatcgaaagttcgataacgttgtttgccttggtggcagtgaattttttcctgtcacgcgactgtgaaaagagtaatttttagagacgttacaatcgcatatcgtgaattccgatg

SEQ ID NO: 11690 - DNA, 3000 bp, Unknown; identical to SEQ ID NO: 11686
  misc_feature (1)..( 3000): cDNA_ID_2711149_gDNA_ID_2214510_Annot_ID_184220 3000 nt of promoter + ATG

SEQ ID NO: 11691 - DNA, 3000 bp, Unknown
  misc_feature (1)..( 3000): cDNA_ID_1977311_gDNA_ID_2214510_Annot_ID_133818 3000 nt of promoter + ATG
tgcgtgatcttgtagtgcctatgcctgttcgtcagttcgtggtttctttttctctacttaccgtgatgttttaagaagatgatgaagttaatcccgttagttttttttaacctaattacacttgtgattagctgaatctttcggatataaacatttggatcccacgtgttctgttattggaagtgacttgatctttcttaacatatacaaagacaagcttctaatgtccaacacctcctttatttccgttaatacaaaatcccaccaattccagtacaattaacttactacacaacaccatacatgtctctttcctatcaaagtctttaaactaaataactttttccttaacaaacaaaagagagctttttcctcctctaacctttatctaaatttctagttttgaatttaggaagagatcctcaacaaatagttataaaaaaaaaatgtataattttcgaaaaggataacaagtatactagcttgattcgtaatttccatttcacaagtattaatgagaatattgaaataaaggaaatgatgagtgaacatgtatcggattctgtaatggcaaaactcatatagggaaaattgatattatgaaactttccataacacaaatccccgattctcttatataaacacgatccctaacttctcctgaatcatacaacatcaaacggtaacaatggatttggctaaagtctcttgctttctcttagcgattatgtttttcatcaatggtggttcctccaccacgttcaccatcgttaaccagtgtaactacaccgtctggccgggacttctctccggcgccggcaccgctccattacccaccactggtttctccctcaactcctttgagtcacgactcatctccatacccgccgcttggtccggccgcatatggggacgcacgctctgcaaccaaaacgaaatcaccggaatattcacttgcgtcaccggcgactgcggctcatcccaaatcgaatgctctggcgcaggagcaatccctccagctacactagccgaattcacactcaacggcgccgaaaatctagatttctacgacgttagcctcgtcgatggttacaacatcccaatgacgatcgttccttacggcggagctatcggagtcggtaagtgtaacgcaacgggttgcgcggcggatctcaacggcttatgtccggagcagctgaaagtaacggttgaagcggctggaacgggtgctgtggcgtgcaagagcgcttgtgaggcgtttggaacgccggagttttgttgtaacggcgcgtttggaacgccggacacgtgtcagccgagtgagtactctgttttctttaagaaaacttgtccgacggcttatagttacgcttatgacgacggcacaagcacttttacttgctccggtgctgattacgtcatcactttctgtccttctccttcaaggtaatatttttgctactgaatttactaaataaggaaagtaatattcgaaaaatgttaattttagtgttttttggtaattttaatgaatcttagattattcaaaattcatattttggaagttttgttaactgttttatatatttttgttgttgttgttgtgttttgaattagtgaagactttgagaagagtgtgtctccgcctctgcaaccggaagcagttagcgtctctgacgcgtcaagtagaatctcagttgcgttatcattggtcgttttggctgttgcggtttcttgggtgtggagtggactttggtgatattcaatacggcaccgaccttttttttttctttttcttttgtctttttgttcattctgttttttcaaactaaaattgttaaacagattttccaattaatttatgtgattgattttgttgcgactcaagaaaacgagttttttttgggctgaagtaaacattgactagttaatatcatactccctctgtttctaaatatttgtaatttaaggtttttgtacacaaattaaaaaaacatacaaatttcatttaatttattttttttctataaaatattattaattataactaatgcaaccaataaaaaaatatgatctaaaatataattggtttcttttttttccgacaatctaaaatataattggttaaaaactgttaaatacatttaatatttgcatagaaaaataaaaacaacacttatattgaaaaaaataaaaaaaatttaaactatatataattaaaaacagagggagtaatagattttaaaagattttatataatagtattgtcaaaaataataaagattatataacacacaaaaaaaaacaagagctgaaagcctcaaactacaataagtgacacaatatcactacaaaaacaaagtgtgtggattactatttagaagttcaaatattttcaatagaaaaaaaatttaaaactcaattttagatttttacgataaaataaatagctaaattatatagtaaaaatgaaatgtgtaagattaaaatttaatttaaaataaaaactactaaaagtagtttattaacaaagtgtatagattactatttaaaagtatttagaatttaaatatcagctaaatgtaccttagctaattaattatacattgatataatattaaattagttttcgcattacaagcaaaacaatcggcatttgagttcaatcagcgtaaaaacctaaagtttaaacaaaacaatgaaaaaaataaaatacaacagggtaagcgaatccgacggcggatacgccacgtatacaccactgccgccaaaatgaaaacagagtgctcaaatccaacggcggattaatacgaataaatttggctactactagtctactagtatatatatatatatactagtatatatatatatactgattcttgttcagagactctagaaaactaattcagcaacaaaatggattctttacacgttcttagatcctttcttcttcttttcattgtttttaatcatcttcctcgcacaactacatcaatg

SEQ ID NO: 11692 - DNA, 3000 bp, Unknown
  misc_feature (1)..( 3000): cDNA_ID_2707186_gDNA_ID_2214511_Annot_ID_133833 3000 nt of promoter + ATG
ccgcctcctagaccaccaccgccgcctaaacctccaccaccgcctaaacctccaccgcctcctaggccaccaccgcctcctagaccacctccgccgcctagaccgcctccaccgcccaaacccttaccgaaacctttcttgtaaatgccatgcttgtggaggaatggacgaggtttgtgtaaaaatggacgaggtttgtggaaaaagtgtttgtcgtcgttaacctcaacatttccgaacgaaaattcagcgactagagcgaatacaaagataaacacacacaccttcccggaaattaaacccataattaactggttcgttttatatggtgtatatgaaagagagatcgaagacagtagttgtgtcagtgaagcttagtcttgacctctatatatagacatatcgtccactcgtgagtacgttacatacataaccggttttgcttcttctttttctaggtttcttatcaattccggtttagtttagtttgttgatttgttcatatatactcaaattattctatttcagaggttgaaatgcttggttaaggcgtaaccgtgaggaaaagtgggaaaccggaattgattaaaccggacgtattaacttgtaagaaggcgaaaaaaataaattggttgagtaaactaaattaaatgaggttcacctgtcataggacaatttatttatgtctgccaactgcccagttgatctcatccaacataacaataaaaatgaaatcaatgtacatttgatgaattcaataaataaataatatcgatgtatatatatatgcacatgaaatgaaatgtatatcttatttccgattaagaaaatgagcaaacgattctagtgggcgccgatggtgaaaaaacctgaaattgatgaaaatatatactacaattggttcatgtactttgtcaaataataataattggttcatgttctaaaaaccagactgatcatattcgtagaatgcaatcatcagttcaccatatgtatatgattcctcataaatcaaccttccatggatttatagcaaaaagaacagtgtgtttctcttttagtgtattttcataaaagacgtaccataaatgaataaattgtgtcgttatcaaaaaaacaaaagtttataatcgtggctgttttatttttccttttatagttgaaggacatgtctactacaaagccattaataatatgagggctcttttgcattattcaagccctaaatgtgatctcatttagtgaaaaaaaagtgatctcatttattatgtcattaatggctcaaaccaaacacatattaaacctttcattttccaaactaacaaataaagaaaaacagataggcttatacattatacatgcatcacccacatagatttagattattaaaaatttgaggttgactggtttgagctgtgaatgtaatcttttatttaatttggactgtttgttgttagaataatggttgggacttaaattttaaagtcaactagtgatttgaaaaaaaaacgaggcttaacaagaatatttaactagttaatctagggctaacttgttagtaagaaatttaagaaatacgtttaatacttcataacactacaagtgtggattgttcatttcacatcataaagtactaaaacttcaaattaagtgccaaatgaatatcctatgcattttttttttgtaaaaaaattagattggttctattgagaatatgcatgcaatcttttggttacagacctctagttaaaggattttaattagttcttattttctatttagaatttgaattagtttcataaaacatatgcagtgatcagtttataaggtcaaatctcaccctcaaaatacaaacatatttcacgagtttgcccaaaaagaaagaactagtatttgacgcaagttttcattttgaaccattcgtaagctataactagaagattaaatacggtagaataatgaatgtattatgggaaaaatgttaaaaaaatcgccaacttttaaaaatgggacaaaaaaatcgccaactcctgaaatgtcatttaaatcatatacttttggttgacttttccagaaagataataaagcaaagattcgtaatcaacaaaactttgctctgttatctttctaaagaactcaatcaaaagtatgtgattaaaacgacatttcaggagttggtgatttttcatcccatttttcaaagttggcaatttttttgacattttttccaatgtattattgagtgtagctacatgaagtatgaaccatttatcttgacatagcattgcgtactttgaaaataatttctttactaataaaaaaacctacacttttttttataataaattttttcactctgtttagaaaccatgaattggctgctctaacgattcaagagaaatttcggcctaccttcgagttgactttagattaaaagtcaatcacaggcccaaaagtaagcccataactaggtccaaatatcgaagcccatgaataaactttttcatcgaatcctaaagctaagcatcaaaccaaacatccgatgatctctccaaactcatcaatctgatctatctctctcttccagctgtttcatgatcgatttactcttaacttacagctgattacaattcactgtaatctctcaagaaccctagattcttttttttccttttcaattgtgatccgtcaggtatgtgaattcgattactttctatatcaattcaacgaattccaaaagtcatgttcgcgtataagcaatttaaccttgtcgatttctttatattttctctgtatgtgtagcagcaatgcttgatctttaaatttactgatatctgaagatcgaattagggttctgatctacttgatatttatttgtttgggcttttattcaggttagtgtctgtttattaaaacaatcgaattattctgagttcatatcatttctttggattgaagatttgaattccttttatagcagctcgatcttgggctgaagct

SEQ ID NO: 11693 - DNA, 3000 bp, Unknown
  misc_feature (1)..( 3000): cDNA_ID_1832112_gDNA_ID_2214511_Annot_ID_133836 3000 nt of promoter + ATG
cgtagtactgctccatcatttctcttgcactctcgctgtgacccacgtcctcaaaatcatccgttgcatccttacctgaaaagagaataagaatcaaaaaccgatggattgatctccactaagccgggagcatggtgatagttgtgtttatacagacctgttgaagacaagagaacatcgtccccacctggatggtcttcaagaaacttggtcacattgtacacctgcatttttttgcaaatgtgtgaagttaggagaggcaaatgaaacccaattacagaacttctgaactttgaagatttcttgtcaaatcaagaagtttaaaacatgggaagatccacttctgaggcttatgattaaaatgtaagaaacaatggagcaacaaaaagaaaagttcttaggttatcgctttctttggactaaacaagatatggtgcatataactctaaaaatcaaacaataggaatagaaagatgaatacttgaaacaaattactgtaccaacaaccaagtccagagatacatttgggatcttctgaacttgataaaaaggattgttctgtgtacatagcaaacttgttgcacagaggtaaactcccaaaaaaaatgaacttaagtgacaatattaataagaaacataaactactgatggaacaacagaccaaaacatttaatgtttcctactttcttgtgataatctactgatttcacaaaccaatcaatgaagaaaacaaaaatcaagttcactatgaagggaggctcaaggatgtatctacagattccttcacaagttaataatcacaatacaaaaacgatcgatcttcagggcaaacaactaatcgacaagtgtcagtagtccatcccaagaaaggttgatgtcgatcaaacaaactctaaagacaataagaactatttctacatttctccatcttcaatcaaaattagaaaattttcagctgataaatagatcaaaagagctaaatcttcagcataagcttaataactacaccattttctactctctctacccatctaaagatttgatctgataattttagacttagaaatctgagacttcaaaagcttaatctcatgcaaacaccaaaaggggaaactttgaagcacgagatctctaatttcagaggtgagaataaggagaaagaagaatgaaacctttccattgatgacaatccaacagtcatgagcttgattatgctctgaaacttctgaaagagtgaagatctttgcttcgtctcccattgtttgtttgattcttgtctaccagaattaacccaccaaaacctgactctgagacttaaagctcaaaactttatacaagagtgtgagagagagttgttgagttaaagaccatttgacgaatcagttaaattccggtttaatttggttcgttctcaaagtaatcggttggtgagttttggaagctttgaaaaccggtttaatgaaaattgattttgagtttgttctcacatagtctgtacctaattgctgctctactgttttggccttatggtattcatctgtacgattttgaaaacatatgtgccaatgttgaaccgatgggttaagtggtttggtagtagttgttatttccggttgagtggatggggtaggtaggtaggcagtgcaaatgttgcggttgtgcgctctaattctgcctttttcattcaagatcggtaggtgaatgatgtgcaataaattttattatggtacatatgaattcttttctcataagtaatatttatgtagttttatattagtagatacaactacataagaaaaataaattgccgctgcttcataccaactgaccttatttattagggacacaaatctttttctttctaaagcttatataaaatgtacatattattcaaaatcaatagattgaccggtgaatttctgaccttgtaaacgaaaagaggtctgagaagtttcaaatttgaaccatcgacaatgaaaaaaatacattagccatgttctctagagaaaaacaagcaggttaaccaaaagattagaaccatcattttctttatgttttttagtaccaaataatgttattaaaagaaaaagttatacttttaggaccaccaaatctttttcaatactaaaaattgttgctttgaaaatattaaatacaatttacacattaaaaaaaactaatatatatataattttaaaatgaacaataaatataaataactaaaatcgtgtttgtttgttcatacactattttcattgaacttctgatacgataaacagataactaaaaaaaaaattgaatgcatatgtttttgaattacatcttgaaatgatttataagctaaataactagatgactttgttacataatcgagctaatggtcgaccacaccatcatcatagtttacgcttaccatttcgtgtaatgagctgaatcgatttatgataattttgtttataaaatttgattaaccgactgtaagtttattaatttctctatgatgccttgcatatctctataaagctttgtattatgttctgaattgcaacacattttattgatatgatatgatgataatttagcaattagggtatcctaaaagctcctaaaacttaaaattgtatgaccaaccaattttgtaaaagcaataaggagtttttgtaaatcttcaaaatatattggatccataactcaataacacaaaacttgagactaaaatcataataaagctatacattcggggcagtttttaatatcctgacttgttgggtaagtctctaaatattcgtagtttgcatccaagtccctgacttactatcttctcccaaatctccttttatttttactttcgtcctataaactaaaataaataaggaaaacactcttcttcaaatccagtagagagattcaagacgagtctcatcgaaagttcgaatctttcgtcatctgattagctttctcttagggtttatttcgatttcgatttagtgttctccatca

SEQ ID NO: 11694 - DNA, 3000 bp, Unknown
  misc_feature (1)..( 3000): cDNA_ID_2707198_gDNA_ID_2214511_Annot_ID_133839 3000 nt of promoter + ATG
tgatgaaaccagttccaaagctttgggttgtcatctcaagtgcctttgtgttctgtcttttagttctgtttcaaatcaataaatcagatttgatcgaagcaaatctccaaatcactcatcaagttaacaacttcctcatctccttcgttgcttcttcaaataatcaaatcctaaatcacaccaaacatgcgaatgagagtgatggaatcagagcgaaacagcttgaggaagaagaaacggatacttgcgccggaagatacatctacatgtacaatcttccaagcacattcaacgacgacatcatcaaagaatgtcgtccactcatcaaatggttcgatatgtgtccattcatggtcaattccgggctcggtccacagattttggtctccgataaaaccacagctcgagtcttaaccgtgaaaaccggttcttggtactcaacgaaccaattcttgctttcggttatcttccgagagaggatgaaacactacgagtgtttgaccaacaactcttctctagcctcagcgatctatgtcccatactacgcaggatttgatgtgagccgtcacctctggggatacaacgtgacggttagagacgaattggcgataaagctggcacaatggctgagagagagacctgaatgggggaagatgtacggccgagatcacttctttgtgaccggacggattggttgggatttcaggaggtttcacgatgaagattcagattggggaagcaaactgatgctattacctgaattctcgaatctgacaatgttaggtatcgaaacgactgcttgggctaacgaatttgcgattccttatcctacttatttccatccaaagagcttaacagagatttggagatggcagaagaaagtgaagagtgtgaagaggaagtatttgttttcgtttgttggaggtccaagacctaaattggatggatctattaggggagagattataaagcagtgccttgcatctcacggtaaatgcaactttcttaactgctttgttaatgactgcgataatccggttaagataatgaaggtgtttgaaaattctgtcttctgtttacaaccttcgggagattcgtacactcggagatcgatattcgattcgattctggcgggttgtataccggttttcttcagcccaggttcgggttacaaccaatatatttggtattttccaaaggattataccaagtactcggtttacataccagagaatgaaatgagaaatggaacggttagtctcaagaatattttgggtatgatcgctaaggagaggattttgaggatgagaaaagaggttgtgaagattataccaaaaatcatatataataaaccagggtttggaccggagaagattgaagatgcgtttgacattgcagtggataggatgcttgagagggtagcaatggttaagaggatgatggaagaagggaaagatgttcaaagtcagtattattcacagacaaaggatttgaaaaaacttgagattatacatgaaaaaactgcttaagccttaagacattgttaatgaatgcacattcagtatttatagcatgttgaatcacatttcagatacattttggaattgtaagtaaatcaatcgattttgttttacaaggatgcataaattacaaatttctctctttctcgttccttaagatgtggagcaaccaaaaactatatgaatatgatctctcgaaagaaacttaatttcgaatactatataataaatggattttgatgtatgaatgagaatgttttgaaactatgacaagagaatttgacttttcgttagcaagaatttggatggctaaattagatatggaagttaacatacacataaaaagttagctgaatgttaaactgtagtctattcgaaatatgaagtttaaagtagaatgtgaatggtaaatgttaaagttaaattaagatacataataattggttcaaacttgagataaccaggacgaaataattggtttggtacaaagtacaaaacaactttggttaaaggaatcatactttccacgaggaatcgccagttcgccaccagttggccggatcgaacggtgcctactgcttaacccggtctttagataatacccacctgttaagtcattcgggtcatctctgacccggaagtttctaatctctctctctttcctaaagtaacaaactttaaattttctgcaaaatcgaacaacgaatcatcagcccgagaagcttcttcaatcctgtaaatttttcattctacgtaccaatctctcatttcccagattcgtttcttgcttccattgctcttcctttgtaccaatcatcatctccaggtgatcggtttattaaaaattagggtttttgattgttctaatccgatctctcggttcctttaagattgatgatgaatttcgaagcgtgatatgaaaagatctgaagacttgatgtcagaacttgcgttgcgtgggttccgagataattgttgatggaaagagtatcagagcgaagtttgtcagaaaatttgagaagaagcgatcgagaagatgggaagattatagaatgggaagaattcgaccatgagcttacgaggttatggagtctttcttctgctatgaaattagccacagagaggaaacaaatcctgcaaccgaaacttgagtctcttattcaggtttttctcttactcatgtgttttcttttgggcatgtctgaatttgattcatttctgagtgtaaagcatagatttttattagtggcattgtcttaagggtggatgaagatagctagaagaagaaactctattcaaagaaaatttatgctttcttattgtgttggttaggaatgtgttgtttagtcttattattcttgcttatctcttactttatctactcgatgagctttaattgattagcccgcggattagcgggcggcaaaatttcgggcaggttagtactgaatcattgagacgcactaatgaacttgaagaa

SEQ ID NO: 11695 - DNA, 330 bp, Unknown
  misc_feature (1)..( 330): cDNA_ID_3022482_gDNA_ID_2214511_Annot_ID_184259 3000 nt of promoter + ATG
tagagaaaaggaaatagaaggaagtttacttttgagccaaggaaactttatccaaaacaaaatcataatctgaccaggatattgcaataaggatacacacatagatcttgttgttgcttcattaattgcgttattctcaagttacagctgtgaaattaatttattatttgctgttgttaagtttaattttatttttgggctatgttgcacttttataaacgtttggggatattttaacatttagtagaaatagatatgggtatcgtcttcgagttcgagatacacgctaaaaggaaaatctgtggactttgatgagcttttacttcaatg

SEQ ID NO: 11696 - DNA, 3000 bp, Unknown; identical to SEQ ID NO: 11693
  misc_feature (1)..( 3000): cDNA_ID_1832112_gDNA_ID_2214511_Annot_ID_184248 3000 nt of promoter + ATG

SEQ ID NO: 11697 - DNA, 3000 bp, Unknown
  misc_feature (1)..( 3000): cDNA_ID_1013306_gDNA_ID_2214511_Annot_ID_184246 3000 nt of promoter + ATG
cttgtgatatttccaatctttgtctaatgatcctacttctttacttcgttgttttgatctctagtgtttagagtgaaagagagatgtaagtaatttctctagaccaactacattgttgaataataatttcttataatcagccaaacgcttgtttttaaggtctctttacgaatatcttataatgacactgcatacattaagttggtttaagatgaatacaaaactctaagcatgcacattgaaagtactcgtacgttaaaacttaggattaaggatgagtttattatctgcttaggcttaaattgtctttgttctgggttacttattgaacttctaatataaccgcatctttcttgaatgactctgcctctctttcaaaattatttgtttcagcatcactgtaacatttattgtaaaaatagtttttttgggtttgaataaatttaactttcaactcaaaaaaaaagaaaaactcgatattatatatagaaaacggaaatgtgaaacataaggagaagtaaaaagcacggttacgtttgtgtttgtttacaatttacaaacacgtctaacttggaaaaactaaaataaatgtacttttttttttttggtctaaaataaatgtacttttttcttaaacatgaacttattttttgtaacagttgagtggttgaatgaatcattaatttaagttatctttagtttctcaatcgataatatatacctactcaaacctttatacaatactataagatataaaatactcctactccttcccaattctcaaaactgcttaaactttcataatcatctaactcttgtaatttatataatctagtcattagattcatcagtatattctcaatattacaaaggctaaatatcttatgctacattatccaagcaattcgcagaaaacaataaaaataaaattgtcaaacatcataagcctagtagagaagtagaagttgacattccaaattcgtccaatctctacctcaactagatttaaaactttttatcctaaggtaagtaaaatacacaaaagtagagcaaaatacgatccttgaattaattcaggttgtgtaaccgttcaatcttttctaacgctgtgacacatatttgaacccaactaactcaaatttttttattttaaatataatttataaatgtggaaaaaaataataaatttataaataaaaatatatgtcatcatttctatttataaatatcgaaattattacactcaagttctaaaatattttttttttttaaaaactaaagtgaaaaaatagcaaagtacattactcacagtagtgaagaagcagccacctgaaaaaaaaaataacacacacaaaaaaagagagagagagagagagagagagagagagagagagagaccccacaaagagcactaatcttcacaaccctaactccgatttttctcacacctcccaatctctctttctttctctctgatgaaaagctaacggaaaatggggaaatacataagaaagagcaaaatcgacggagctggagctggagctggtggtggaggtggaggcggaggtggaggtgaatcctctattgctttaatggatgttgtttcaccttcttcctcttcttcacttggtgttttaactcgagctaaatctctagctcttcaacaacaacaacaacgctgtcttcttcaaaaaccctcttctccttcttcgttaccaccgacttctgcttctcctaatccaccgtcaaagcagaagatgaagaagaagcagcagcagatgaacgattgtggttcgtatcttcagctacggagtcgtcggcttcagaagaaaccaccaattgttgtgattcgttctactaaacggaggaaacagcaacggaggaatgagacatgcggaagaaaccctaaccctaggagtaatttggattcgattcgtggtgatgggtctaggtctgattctgtttctgaaagtgttgtctttggtaaagacaaggatttgatttctgaaatcaataaagatccaacctttggccaaaatttcttcgaccttgaagaagaacacactcaaaggtatcatctttcttcatcaatttcaacctaattttttgggggatttcttatttttatgaatctgtgtgaatttgttctgtttcttgagaaaactttggtattggatttgaaaatttccgttgttaatttgaaaaaaggatcaattttttgtcttgtatttggttaaaattgaaactggcgttttcgattttgaaatttaatgatatttttaccatgtgtatgatatgatgccatcttttctttatctgacaacaccagactcttctctctgtttccgggaaagaaaatatatataattaatcaaaaatgtgtttcttttttcttgagaaagtttttattttttcttcaattactttgaagaaggtgatagtgactattgttttttcttcagactttttatctgctttcatgtaaagaatgttggatttgtgtttgaaatgtctctgtaagtaactctttaaagtttggttcgtttttgggattctgcaaagtatatgatgtgtctctgtaacatcttaagttctagtttctctgtcttttaatttttcttgctgtttggttgttttttgatgttatgatttcagtctaaagtcgtgatcttgttgaacattgtatgagtcattaacttttcaagcattgctgaagtaatcttcattggaagtttcttctttggttttatgctttgtgaactttgaaccacaaatcaacaaggagtttctccttgtccttttttcagttaaacatgacttgcttagttttagttatctatatgcaataaagtttgcttgcttttgctgctaattaaggaaacacggttatgtgctttttccttgagagcattgtatgaaagtaacatattacttactctcagcttcaacaggaccacaagggaatccacaccatgcagtttgataagaaggcctgaaatc

SEQ ID NO: 11698 - DNA, 3000 bp, Unknown; identical to SEQ ID NO: 11692
  misc_feature (1)..( 3000): cDNA_ID_3022512_gDNA_ID_2214511_Annot_ID_184244 3000 nt of promoter + ATG

SEQ ID NO: 11699 - DNA, 330 bp, Unknown; identical to SEQ ID NO: 11695
  misc_feature (1)..( 330): cDNA_ID_2707214_gDNA_ID_2214511_Annot_ID_133844 3000 nt of promoter + ATG

SEQ ID NO: 11700 - DNA, 3000 bp, Unknown
  misc_feature (1)..( 3000): cDNA_ID_2711220_gDNA_ID_2214512_Annot_ID_133845 3000 nt of promoter + ATG
atttattatttaatccaattttgttcaggcctaaaaaaaattacgatcatgcatgcatgtttggatgagccatccacatatgtaagattttacgaccaaagtttcattgtcaaatcagaatttttatcaaatcattctgaagtatgttatttaaatattcaaaagatgacaaagaagattatggaacaagtataaatggaaaataatatttggatgattggagcaacatggttacggaacgtgacaattggagaagaatacggatcgaaattggaacaatgatcacaccgaaaggttctttaaatttctccaaaattaaatttctttcgtatacttgaatgttttcttaagtcaaacatttgattactcacatttttcaagttcatgcatttaaattaacgtgctaatggcgagactaagaaagataagatttttaactactcgaatatacttttccggtaattacttaattaatattcaaggtcaattggaggatcatgatgccgaatgagtactaattgcattcatgttcaagggatcgaagttgatttgtgactcaaccctttgcttaaacctagaagagtggtgctatatgaaaatttgagtatgtgctataggataagcttttagcccaagttatgtatgtttttaaaaaacatttcgttgctttctttaactagaaaatatatgtatattataatatatctagtataccaaccaatcccaagtaaagtaaagcttattgaaactaaaccaaatcaacttatgaatcaacatatttttttctaatataatgtaacttcaaacgaaacaaaaaacaatcagaatttattttaaattaattgtttagataaaaatacaatgaaaagagtattatttaattgttcggatagtaataatactagtgattattcatttctcggcttagttttgaaaactgatcaaaaccaaaccagaaaaaaactataaaaccgtatgaaatactgaaaatcccaataggtatgtacataatgatgtatgatatatctgatcaagtataaggattcgagtatgcgaccatatagtcatataccaatcatcaaactatatatagattttcaaatattatttattttacagactcataattatgttgtctatggctgatcacatgcattgcaagatctcaaaaatatcatgtataaattcacgtaacacatttattacgcatgcatatatgctttgccgcatttatgtagaaggacatcatgttgagttcatgtttctctttgattgttacgtattttgtctaaatactgaccaaatattagttgtttcgttacgtaattatgttagttgaggttggagactgattttcagaagcaatttacaccttaattagtaaatatcattaaccgcagtaacatactgatatttactggcactggtccttcaatcttctaattatagttaaactaaatttgaaaatttgatcatgtcataagagcaagaaaaaaaattcgtgaataattctttcatttttatgggcttttagtattttagaagatagagtgaccattttatttaatgtagtcgttgacatttacacactatattaaaactcgatatagccatgtgatcatgatggatataaactcaaatcgatttgttaattgagaagccaatctaatttaattattcaacataaaaaataaacagtctatttttgtgtcttcagatggcaattgttattagttttcatcgaattgatccagccatctacatacataacataaaggcgcggggaaattaaacatacatcatatttgtagacttgtagttgtgaattttgaaaaagtaatacaaagtatgtaatggaaaaaatgtatcgtttctagacttggaaaacgttgggctttgaaccagaagaaggaaacatattgggtttctgaaaggtaaacgagacctacaaatacagtccttcataaataatgggcccataacatccatacttgtgtgagacagacgtttgttatgtcttcaatcatgaacatataattcctttttttcatttttttcagcaagaacaaataattcttaatcaacttacaactttaaattttttatgcttgttatatgatattatgttaaggcatggctcaatgtttttagattttcaaccaaggcctatattgagaatttgagagcttataactttttcttttcttttcaactgtacgataaattaaaataatgtatagagaggtttgcaggagccatgccttgcatatattcccgcccaattatcctgcagaattttctccacgtgacattacagtaaattccaacagtgcatgatagataatttttgtttctaagtttcttctccacttgattgatatattctgctgttttatttaccgcattatacatcagattcaccttctttaccgaagtttgattacaaatttacaaagtatcgtgaaatcgtcatgggtaataaaatcatgacaccaacatactaaacttgaaatcttaaaaagcataaacagaaaaaataatattattatctgaatcaattgattaagttcaaaagaatatcaaactgtttatgtaaagagacaaaaaaaatattttctgattcagtgaattaagttgataaggaaactgatcaataagcatttgcatatagataacgtggaaactgagagtacaactttgttttgcaataattcatgcatgcgtcgctttatcgactaatattcgtacataacaagttgtactcacacaagtcataagtacattatcattaaataacatagactatggaatcaagtaacatttaggtcacttatattttaatgcaccgcatctaacgcgattagtcattaatacacggatcgtccgatctaaaataaaatttgtttttattttatatatacagtatataacctttctcattatttcttcttaaatcattacaatcatcacaaagccatcgcaaattagaagagatttaag

SEQ ID NO: 11701 - DNA, 3000 bp, Unknown
  misc_feature (1)..( 3000): cDNA_ID_2707257_gDNA_ID_2214512_Annot_ID_133847 3000 nt of promoter + ATG
accattaacggggatttaggtttttggtccatatatataaacagagctcgtgattatgtatagcgccttgtcacactaaccaaaatcaagtgctttccgatcattaaagttatattttgttaagtttaacgaatcttctacttaaaattaagattgactcatatatcactaatgtgattttaatcatctatggacccaaaaattctgaaaattttaaattttggaagctaaacaaaaggaaaattaaataagaaatgtaactaaataaaattataaacaggtggatgggaaaaatgttgggaagaagagataacaccatgggaccaagggagagccacacctctcattgttcatcttgtcgacacttcctcactcccacttggccgtgctctggtccccggctgtggtggagtcagtcttcttctagcttacctctctctctatctttccatttggttatatatatatggtttgaattctatttttaaaatgaaaattttaatatagaaaaatatattcttaacaatttcagatttttgtgataaaaaccgaatctagtttgaattagtatgatacggttttggactcaacatcttttttttttatgaagacgcaatataacttcatttacatttcttaaaggaagtttaattttggtgtagtttttcttcatttattttggttgctcttcagttttgttattggttttttaagatgtgaatgtaaaaatattatttgtaattagaaaaaaaaaactatttaaactgaattaaaatcatccagttggccttttatgaatttcactacttaattaagattgaaccaattttacttaattaagattgaaccaatattatttggttagcctccctagtgaaacattttcataatgaaatgattgttacttaacattgtgaataaatatgttatgaatgtgagtagggacacgacgtcgttgcgatggcaagtcctgaacgcttcgttgttggattggatatttccgaaagcgcactcgcgaaagctaatgaggttaattggttaatcatctcactttcttacgtattcgtctttagatactgaaaattaataatattttatgttgactacatatagacttacggctcctcaccaaaggcagagtacttttcgttcgtgaaggaagatgttttcacgtggcgtcctactgaattattcgacctcatcttcgattatgtgtgagtttattaacttataattgaaaacataattaaggtttgcattacgtaactaaacaaaaaatttggttagaaacattaatgtgaaggaccaggctaaggtgttttatttattaaaaaggtaacgaaaattcaattaactagtaattattaacaggttcttctgtgccattgaaccggagatgagacctgcatgggctaaatctatgtatgaactcttaaaacctgacggcgaactcataactctcatgtatccggtaataattttaatttttgggtaaatattccataatttagctatatataatcaaagactaagtggattaatacttttgcctttatattaattagattaccgaccacgttggtggacctccctacaaagtagatgtctctacgtatgtaatcaatccctcagtttctcttatacataattatagacttatatatatgaataattggatatagctaaacttaaatgttaattattgtgtgttttatgtggatcagcttcgaagaggtgttggtgcctataggatttaaggcagtgtctgtcgaggagaatcctcacgccattccaactcgtaaggtacaatagaagtatactcacatcgtgcgatattatacttatattcaacgtactagacattctttcatttttagataattttatacattcaattaatatactacttaattaattaaaccgtttaaccaaaaaaattctttcagttttttttataataaatttatttgtttattaataggttttctaaactgaattgtgtcataaatattgacttttttggggctacatgaaacactaaaaagaaatggacatggcaaataggtatctctgtgtagttgtgctatcttatgtggatctgataaataaaaaccaaatggacagggcaaagagaagctgggaaggtggaagaagatcaattgatccctaagaaagagatcttactgtttggtaagagtgttatatgtgtgatctacaaagagtaaaatgattatcttcctttatttgctctatgtatgtttcaatgttgatgattattatgagtaacaataatgtttattatcaaacaatctcttttatcatacttaaaactaaaataatacaaacaaaaaacataataaacggagttataggtgaatgtatagtagatatgcaagcaaaatgatataaacccacaaaaaaagtgctccttaacgttgcaatttaagttatttaacccaaagcatgtagaaccaaaatgaacagagtcattatccgttgcatgactaacaaggaagaagcaaaacatcaaccaaaaccgtaagactcaaggggtcactggcttcttgcttcgacgtgacgttagacatctttggaaccctaaattccacaagaaggaacacacactgattacaggggcagcggaatcaacgtccgacaatattattgggccttttctcaactcaaaagcccaatacattggtagcccatatgattaaaatgaatctcttttgttattacattcacacttagacataaacactcaaataatacaaaaacgaaagaagaagatgataaattaaggcaaagagagatggagcgtattgcagagaaatcttccatgaaaaatggagaagaagctagagaagcaacaaactctcttcttctcgccatgtttctcccgaacacttcgctccatctctctctttcttctcttacattttcttctccccatttctctcattctctcttcctcttctctttcctcaatctttcgccatg

SEQ ID NO: 11702 - DNA, 3000 bp, Unknown
  misc_feature (1)..( 3000): cDNA_ID_1448051_gDNA_ID_2214512_Annot_ID_133848 3000 nt of promoter + ATG
ttgaaccggagatgagacctgcatggggtaaatccatgcatgaactcctcaaacctgacggagaacttataactcttatgtatccggtaattatttcatatttttgtcgtgagaatgttccatatacaaattcaatgatatataaatatatgaattaatactttgcctttctattaattagatgaccgaccacgagggtggagctccctacaaagtagctttgtcttcgtacgtagttaacccctcaatatgtcatatatatacaaaatcatttaagattattaatgactaattaaaatccataattgtactatactttcttaactaaatgtgtgtgtgtgtgtgttttcttttgagagtttagctacgaagatgtgttggttccggtaggatttaaagcggtgtccgttgaggagaacccagactccattcccactcgtaaggtactgtgcgagatgacatatatgttatatcaaaatataagtcgatattttattttggtatataaacatgcttgtgagttgtgttttattattagttgcatgttcaaatcgcattataatgataattccttcggatgtattataacagggcaaagagaagcttgcgaggtggaagaagattaactgattcaagggagagtcagagagatcatatcttactgtttagtaagatcagtgttatatatgtgtgtaaaatcctaatctattaagaataaactgagtatcatatactctatgtaagatatatgtgtttaaaggtgaatgcttatcaggccgtgaccagcgtctacgtacgccacgacggtggcgatctctccccttgttgttatgtcacatgttccttatctgtatctgtgttatattgtgtttcagtttaataaagtttctcctttccaattagagttttttactctattgattggtgtggagttttgtttctaaagaattgtctttgccagctttcgagtttcttttccttatccacgtgatatggctacaattctgatcattctcgcagcttcttcaatgacttttataaagaaacataaaataatatgccctggtggagagcttatcataacatgcattgatatgatgcttcctgtaagaaaaaacataaaaacatgtctctcatcagaacaaatatcttgggactctgaaatgtatctttattattttatgttatgcagttcgatgatcgcttggaacctccataccaagtatcagtttcatcttctcttaatcttttcacgactctataactctcttaacgtctctcagttttggttaaatatcaaacttgtttaactgttttgtagctatgaagagcttttgattccctcaggatatttgaggtcatctctattgtggataacgaacttgctccagatacaagaccgggaaaaaaataatttccacttcagatcactttatattcatagcgaaacaagcaagataaaaaaaaaaagaaggacgtttaattaaagtttgaagttcacttttagggaatgtaaaaagttggccgatggaagaagaagaagaagtcaatgtgataatacctcattaccatcacatcacactctcatggctctaaagtattgtaataaaatttacattgttggttctcctaatagagtcataacctacacgtctaaatacataaatatatcaaaagtttcaatttgtaataaataaagtgtctattgaatgagacgcaatgtctaattttctcatccacaatattccttgttggttaaatcggtacaccttacagagaaagagatatgttacacacagtcagatttggaaacagttgtcgttttgtgttttaaaaacgatgccgtgcttactttcaatccagtgtaaatgggagttaggtcgtatcttggattattgcttctattaaattttgaggtggtcccttgtaatcactctcactcgtgcgtgagtccgtgatctcagaaagagtcgtttttggaggtaagaccattttcaatgtacaattctatttttcttctaaaattttttattttttatttttagaaataagtttattttaaaagaaagaaagttgattttgttcaaatgtatgactttaaaataaaattatctctaaaatagagaaaaaaatatagtagttttactttttactctatatactgagttatccctatttttttctctgttttataggtaactctatttgagagtcaatacattagagtaaaatcaattttatttcctattaaataaaattatttttaaaataggaaaataaaataaaaataggcattagaaatgatctaaatcatccaactatttattggaaattggtgaataattgagtgaaactagggccactatttccacttgcttctgattttcataccatggataagatgcgtcataagtcatggtcttttttatatattataataatggaatcaaattgatactatagagtatatatagtcttctgaattctgatgaaatgtaaaacgggaatattaaaataatgtttcgtactaaaaattattttataaatacatcaatatacttaattttaaattttcgaatgtcagatatattaaaaatgctataatgatcattttaattgttttttctctatatgaaacaccaaaggtataagtctaccaaaatgctataatgtatgtagttaaattgtccaatatatgattggggactaaaattctaacgtagctacgtgttccaatgagagaacacacaaaatgagcacaaagtatagaggttgaaacacacaataatatagctttatacaaagtcactttattcaattattgtattttaattcacaattcaattattgttttataaattgaatatagtaattcaatttgctatcctctatatagatagatatcatgtgcttatagctttccacaacttcaagacccccaaaaaatatcaaagtgtcattaatagaaagacgagaaagaaagaccaaccctgaaacatg

SEQ ID NO: 11703 - DNA, 3000 bp, Unknown
  misc_feature (1)..( 3000): cDNA_ID_2711210_gDNA_ID_2214512_Annot_ID_133851 3000 nt of promoter + ATG
tttattcgatttttcactattgtatagtatagtttcacattcttgaacaaaaaaatcgtgctaaccataactaattaaacgaaaaaattgaggaatatttacctaagtaacgttaataaaatgctttcatagcaaaataaagtaataaacgatccctaatttactgaattttagaataaacgaaatgtaaagaattaaaagaaaataaagagagacaagtgatgttatcaaaaagtaagaaaaacaagaaccgtccgtttcatacttgtgtcttgttgtacttgttaaacttgaatcccgtgttcgcgactttgcgatagattctctcaaatccaattccaatggcggatccatcttctcaaaaccctaacctcgccactccccctcctccttcttctccttcaccaacccatcaaattcaatctggaacctcggaattatcgccaccgtctcgaccgccttgctctaccttgtcctttctcaagactgctaaccgaccaaaactccgtgtgacatctgaattcgacagcgatagtctccttttcttaaacaaagtgtcttgtaagctcttcgataaccttgccaagcttaaactctcgtttcagaacaattcccagcgcgagatttcacagcctcaggtctcttttacttccaaacacgtttctgttctctatgatgtcgaagagaagaatactttcattaagagcactctcgatgttcacccgcgtcttcagctccgagctcttcataatgttaaggtacatatctctacttcttcctaattatcaccgtttgttacaataaaggattgattttttcctggaacactttgtcaatttgatgaactgtgcgcagagaaaccttcttgtcaactaaatgatcaaattgggcgtaatttgtcatctatggaacagaacaatttatgtgattgattgttgaatggtggtcatattgataggatttgtggtaccttatatcattggttttggtttccttttctgttgagcatctcacaatgatagaatctgattgtttctgagtgggacattgctgtgcaactaactaccactagctattgaaacttaacattttcttttatagttttggatttcggttgtatgctagtgattatgttgggttttttctaatgtatttatcggtttaactgtgtgttgttacaggcacaacaaggagaagttgctatggaggcaaatctgactgaacctggctactctctggagctttcatcacctgtgcctattggttacgtgagtggccatctcttacattgtctatttggttttgcaactgcagtagtatcaattaccggtaaattgttttcttgcttggttgggagttttctttaaatgctaattataatcccatatggtttactcttcctgcagccaagagcaactcttaaattcccacttggcgaaatttcgttacaagaaaaagatgaggaggaggaggagaagcagaaaagaactttatctgttaatgggatcctcaaacgtcaagttatgaatggtgtttgtaccgctctatacacagatgaagagttgaggctgagatatgcttataaggttcctgacttttacaaaatcccttctctgctttttatgtgttactacaattcaataacttatacaaggttgcacatgcatgaacatatccttcgtcccccaacttctggttctgacatcaaaatattttcctttctcatacaggatgatgcattgtctttcatcccaagtatttcccttccttccaatgctgcatcatttgcattcaaacggcggtttagcccttcagataagttgaggttagtggcctcattgtgttctctcttactctctctctcttctggtagaaacatctcatctgctacaatcagtttcatataatattatgatgattactatatatgcagctattggtacaactttgattcaaacatgtggagtgctgtgtacaaacgcacatatggtaaagactacaaattaaaagctggctatgattctgatgttcgccttggctgggcatctctctgggtaaatcatcaacctttagttttcttttctctcttctctcatcagcgtaatctttttactcgcttaagcccgaatccgagtcatacgagtaagatgctatagcatatagaacattcattcaccacacaattgtacctaatgatgcatctaccatctaataatatctaagggacaccatcactcttgagcaagcttttgtttgagtgagttgtgaccatgcatgagtctcattttttaaccgtggcaggttggtgatgaagctggaaaagtgaaaacgacaccaatgaagatgaaagtccagttcatgcttcaagttccacaagatgacatcaaatcatcagtcttgatgttccgagtcaagaaaagatgggacatttgatgaaatctttgaataaatcatctcttagtttcactttctttaatctctctataaaacccataaaagttgtttgtttctccttatatatcaaatcttttgcaaagtagatacaaaagcttagagtgaataattgcaattgtatttctgtagcttttttttaaatgatctttttcacacgtgtgagactagtataaatgttgctaattttcgtttccagtataaaaaggtacattgcttttaccttcactttttaacccaaatcaattttaaccactaatattaaaattatgctaaaatagaatatttttctcacaacgaaaaattaataaaaaagtattgttggcttatttcctccgttattgtttttgtatgcatttggtctgtgtgttgtgttgtttatcttcttcttcttcaacccgaccaaatacacatccgacggggaaaaagagttccgacaagaatcgagaactgaaagatttgtcatttgtctctcaaatatctgtggagagaagagaaattggaataaagaagacagtgttgtgagagagagagagagagagagagatg

SEQ ID NO: 11704 - DNA, 3000 bp, Unknown
  misc_feature (1)..( 3000): cDNA_ID_2711203_gDNA_ID_2214512_Annot_ID_133854 3000 nt of promoter + ATG
gcctttagagacgtctcttacgagtgttacctttggtgatactctcaaagcatggtatagtgacggtagtattctgtatgttgcttcaagcagaaaggaagagatactgcgtgaacttagtcccagtcagctagttgttttactcggttagtgatgaagataatctctagtcctataagagataacttattcaataattccagcttctgcatttattgtctaaatagtttgctctttgaatgtttaaacatgcttcctgattcgaattatggatcttttcgatttatgaactctcactaataggaaaaagataggcattaaagtttgctacattaaagttctgagtttccttttgtactgataacttttatgaggcacctaactttgttggattttttgggtttctagatgttgaaggcgattcacttgaggatcctaacataattcatatccatagtcttgaggagctgccaatgactatttgctgcataaacaaaaaggtatgtcatgactgcagttctggcttatactagaatacgctcatagttgagaaataagctggtctgtttgaagaaagtactaattgtaggccagaactaaacagtgtaaaaatgtagttcgagatgcttgatattacaccttcattaccattttttggtttgtatatcttgccgattagtattttgaccacccttttgatatcgcctcccaaaacaggcaatgggtgatggtgctgcaatagttgcttacatcatgaagccatctcgggtagaggactttgccaaggttagatccttatttgcaatctgactctgaagtattatatatatggtgatcattgcttagtttttggctctctgtgtgctggtcgtatatatgctttaccctctaggtcattactgattcatgaaagtaatatggatatatatgtaatgttcaccgatgttaaattttctgattttcttagaggggtgctttacccatgtatcctacttcatgtgggttgatatttctgcccctcatgtttgagttccctcttgcatctcaactcaaacacgctgatatcattttccacaaagcaactgatgaaatcttgtccattgaactgaactgctccgactcaaaatcatctgttgcagttacattctctaccggcatggagaaactgaaaaagtaagcttctcaattctttgttttcaatctagcactcagttatatctgcaagtggcgtatagataccatcatacacaaatatgagaaaccttgttaaaaattctccattcaggtttgcataatgatataaggtatttgcaggtatatggaagatcaaaatgcttgtgccatagtcgaccctattcgaaatatatatccagtcgtagaccgactcaagatgcaacatattcttcttggattagagggccttggtgcagcaggacgaaagataagaggtgcctgctttctcaaggtcgtaaaagtcctctcattttgatcaactcgtcaatcttctttatgcttataatcttacatagttatctcttgagacctttagtctggcctcttaacttctccagtttcgcattgatgcttttcttttttactttagcaaattaatatcagagttccttatctgcagattgacagctatgatgaaccagatctggctcagaacttgtcaagagctggactctctcttccatgtattgtgaaaccacaggttgcctgtggtgttgctgatgctcacagcatggtgaatatctcatactttccatctagatttgatatctcgcaatatctgttgctcttttcacagcagaacaaaaaaattcctcgttttcatgtgtttctcacaggccattgtcttccgagtcgaggattttaagaatctgaacactcctgttcctgccattatccaagtaagtcataatgtaatatggatacccaaatctaggggcacactcctaaatcaagatgtcaagcatagaaaaacttctcaaccgatgttttgcaggagtatgtggaccattcatctaggatttttaagttttacgtcttgggggaaacgatctttcacgcggtcaagaaatcgatccctagttcttctagtctgaggaaatcagcggaggaaaatggtctcaaaccaattctctttgacaggcaagatttcataacagttccatgaacacatagccttcagttactaaaaagattgtaactttggtagttccattacctccacagcttaaaatcgttacctgttgattccgcaaaccagaacccggtaagcgagattgatctagagctagttacagaagcagctacctggctaagaaagaagcttgatctcacaatcttcggctttgacgtagttgtaagtatcatcctcatcacacaagaccctttatatataactcatttacttacacattgtctctttattaatctccacagattcaagaaggaacaggagatcacgtgatagtagacttgaactacttaccatcctttaaagaagttccggataacatcgcagttcctgcattctgggaagccatcagaaacagattcgaccaacatgtccaagagaagcattgaatccaacattgtgggaagcgaaactcttctgtctgtttattttaggaatgacctgaagctgctttatgcttcatactctgagactaataataattgagaaacatcttttatggaattttgtaattttaagaccaaacaagtgaagttttttttcttttgtcgataagaacaaaagtcacattctataaatatacgacaagagacgacctttgagactcgagaagctctctccaaaaacaaacgaaaagaagcgacttttgcctcttttggtctctccccttctccggagagatctgctctctctatctatctctcaatctgtaagaagaagattcccacttcagtaaaagccctaactttacttgggaaagttcttcatctatcatccttcaatcgtcatcatccatg

SEQ ID NO: 11705 - DNA, 3000 bp, Unknown
  misc_feature (1)..( 3000): cDNA_ID_1808045_gDNA_ID_2214512_Annot_ID_133855 3000 nt of promoter + ATG
taacttttcagtattgtcaagaggaacttagatgataacaaaaagatatatactcagcaaagccaaatcccaacagaaaaagctgagaatatgtggaaagtagaaagtatgaatgggttcttgatcaacattacattaaaagatgatgagtgttttacgaaataagtaagagatgcttaaaagaaccctttttagctttgtttctccttttgtatactttgcttttttccaagacctggaacaaaggaaaggtatcatgaagcatcaaacttttattggaagatactgagaaacaacaatgtcctttgcaagaagaaaccaaaatacaagaatatagcgatccgataatcgtgtgaatccttctctagtattttgaaggctgaacaataaaatagtatagctatttaccgaaaggctgtatagagactaaaactgaagcaaagggaaggtatcagaaaaagtttagtagcaaactttcattgaaagatgctgaagtaactgagtgatcctgataatctcattctcttgtactgtatgaattgagcagagaagtcaatggttaaagaatctcaaatattctgatgcgctcataaaaaaatgctgtttacagtggaaatgtggagacaacaagagataaaacacaataacagaaggaaaattctttaggtatcttgctaacgtggacctacttacaaagaaacagaagctaaaactattctttctaggaagttaattcttgtaacatgccatccaatttgaatcctcagaacaaatcagaccacctccatcagtgcttattgactctgcagcagagcatggaagcaattctcttccttttcccagagaagcagcactttctttgtgattttgaatatcaaattcagtatctgtaatctgttgggatttcatttcaggcatgtggctatttgtttgctctactctcaaatgtgtccttgacactttatccagtgttacatgaggatgacaagaactcctgtcaactaaacctctctgaaactgtgagagatcaatagaatcagaagatgtggccaaatagtcgaagttgaaacttgaacggctcggctcccatgatgaagcctggatccttggtgacaaaccggctgactgaaacttcattgtcagtgattccaaatctgaaccaacatcatgtttcttttggatttcagcttgagaacatgagagtccaaaataattgtcgaagcttgagttggattcaggtgtttgaataacattctcacttcccagcgtatcaacagataagggagacgatttgtctcctttcaaatgctcagaaggatctagctcacatgtaggggaagtgtcgaatgctgaagcttcaccatcacatgatgaaaggtgaatgaatcttctgaaccgaaaaagttcatttggagaaagagaagaactgatccttctcgttgtctctttatatatatccatgggcgaaagacttctaccactactaatgttgcatagatccgaagaagcactacgatctgatagtggcgaaggagtctcatggccaacacactcaacaatttgctgaaactgagagaaaccatcatcagatatttccttctcatgttctttctcctcatcacaaggagataaaagccagtgcactgacgcatccgcaggcaaaggcataacagaaatatcatcataactcccgtcattaccaaaatctccttcatcaaattcatcagaatcattcagtatcttgcctttaccaacctcaaaaccattttcacccacagtgagtatccccttaggcttgcatttcctcttatcactaacacctgagagtaaatgtccagcagcataacaagcttgtgattgagctgatgcagacagattcatagacgatccacactgtatctctggagacaccgaagcttgaacaggtggtgtcctatcttgataactactactgttgctacttagtctaccatcatcagtagcttcactcttccttctataaatcaaatcagatccagtttctaatttagaaacaggagtactctgagcaatactgtcatctactctaatcgtagtttggctatctttaagcttaacatttctagaaacagaagattgtttcttcaaaaccgaaactttctccggtttcatggtaatcttacaagttggtctctttccagatacaggatttgtcttgcatctctgagacttcagcaaattaggtttctcagtaagagtagatttcaacttaacctcctcaagagagcttggtttctttctaattaagggtttactaactaccggagcagatttggggtttttagctactgatctcactggtctacgaggaaaaactcccaacgaagaagaagatgatgaagaagacgatgagaaagaatgagagagcaagaacctgtgacaaccgttggatgcttcaccggaagttgaaccagaagcactcacattgctacaactgctgcttccagagcttcttgtactgaaatctctcaaagggttcaccggaaatctctcccttttcagttttttctcatttttctccggcggctgtggctgagactgaggaaatttcttcgtttgcgcatttgaagaagaagttattcgattcatcctatgagcattcgaccaaaaagcctaaagtatctctctttcttcgtgtctcagtgttctctcactgtttccgatctgcttgatctgatatttcaaaacgactttttttttttggcggaggcgcagagacgaacaacaacaaacattaaaatgagaaaaagatcgaaactttgacggagaggcttttgcttttgtctttttctctttaattaccgacttaaccctcaacttttatttcgtgctccaacaaaaacaagggtacatcggtcatttaccgaaagaacaacactttttccgatgtttaacggctaaatcgccaccgtgtattgatttattcttttgttcctcagctgagagagaagaagaacgatg

SEQ ID NO: 11706 - DNA, 3000 bp, Unknown
  misc_feature (1)..( 3000): cDNA_ID_2711183_gDNA_ID_2214512_Annot_ID_133866 3000 nt of promoter + ATG
cggtcacagccattaccttgttggttaggtaagaaggatcgcagacaactttcttgcatttggcagtctctccctcagatgtaacaccagaaaccttaccctcctcgtcaaactctacctgttataaaagcaatattaggttatcagatctagcatccatatagttaacgacagaaaaagttgcagaaacgaccgaaacaaaaaagccacaaagataaggaagtcaaagacgcaccttgcactcaggtttgttcaacatatacgtcccaccatagacagcactaagtcgtgcaaatgcctgagccaaggaagataagagagaatttagaaactatagtccaaaacgccagaatagttgcaccaaccaaataaagcaatgtacaaaagaagaaaaaaacctgaggcaattctcccaacccatagagaggatagatatatggtgaacctccttgaaaacgtgcaagggactctgcgtagagctgataaaacatttaaagcaacagagtcaaacatgaaatactgagagcaaaaaagaagacttcgaaaacaaggggatccacactttaaagtcccatgagagcaattcaccttcattctcattacagtatcataggcaggttgatggagatgattgtcattacagtgaagtgccactgcatgaccaataaagtcaatagtatcttctttaagaccgaatttcctgccaaagtgttaaattgatagttagcagcagatagtctaaaacaaatattgacaacaccataatgcaaaagacaagagaacatcagcttacgcaatcaaatccttagttgtaactctcctcaaatccattccatcatgtgtttttgggtccttctcgtcgtattcttgaacatagctgaaaaactttccagctcgacgtttctcaaaaatacccataagaggagatttgagggcctccatgggagttgctggcactttttggacctgtagcatataaacagttaatataactagaaaaaaattacttaagctgcaaagctagaatgatcagtgaaaagcttttgaccaagatcaaacatgggagaaaaaaagatgcacaaacagacttgaaatctatggaaaaaaaagagaatgaggcacaagataaaaatgaaaatgagtaatcaatgtaccttgccttggacaaaaacatagcttccatcaacagctttaaaagacaagtacttggtcacatccgtatgaataaggacacgaacaagctttccgttagccatcataaactggtgcgccacattgacagagaacagttagtaattcatattggtaacaaggaagctagataagctggaaagtagctaatattgataacctttggcatcatgtcaacattgtagtctctgctagaacctaaatgagcaggagccttctcttctcccctgaacttcttccacagctgtttaaaacaaagcaacattcaataactctcgctgattataacttaccacaaaaagtcttcatatatatttaacaaaaatattgacctgattgagattaagagaagttgactctccaccgtagtagtcattcctgtccatgtgaagtacctaattggaatatagatgaaattagtagaccattagattacttataaaaagaagtaaacttggcgacaaagtcagctaatcaatcacatagaagatataggagtggagatgatgaaaatttagtctttttacgcaatctcaataactaactaaatgcattaaattcagatcattgtcaaaatcgcgaagccaattgattctcatgttgaagctcacaaagcaaccagctttaaatcacacaatcggagataataatctcaactagatccgttgttcatcatgtaagtaacgaattaagagtattgaaaatctccagatcaagcatggattcaaaaagagagagagagaccttaagaccatcgacggagagaagaccactaaggatgcactccttgagaccagtacccagaactatgacttcgtactcttcatccatagttgctgatcctccaaagagaagaaagaaatggacttttgatatgcgaccgtcgagagactcgagagagagagagagagaatcggcggtgattgcgtctatagagaaaatcagacaagtccaaagatgctttctttcttatatgctttttctcttttttttttcttatttggctattgaaatttggataaatctaaatattattaccaagtaaaacttaaaagtaattttgtgtgtgtaataaatagatttacaataatgtttttgctgtctgaagcaatctaataattcaattagcattttctaaaacaattccgtttttttttagggtaataaataaataaccagtcgattaaaccaaaaagacaaatatgaaaatagagaaaatgtcatcttctgttctgttctgtgagtgcaaagcaaatttatttaattaattttgtcaattattatttttacaataaaaaaataaaaaaaaattctctcattgttctcttgacctctcaatgaaaatctcgtccaggttcgctcatcttcccatctcctctacgaatgttcttctttggtaatttgcaaattcacatctttcttcttctttccgatgcaattttcatggccgaattcacaattgctgtgctcggccatggattctgattgggatcagtttctgtttttattttattttaaggtttggatgcttctgttgactacgttttgctaaaattcagacccttttcgctctcgtgaatcgattctaccgcattttctgaacgaaatctctagtctcttttttcttttcttcctgggtttgatttcttggagtggttgattgcgcaagtctggattttgattttggtacaagacatttgcttgtacaaggaggaagggatttgttggtatacagtattgttattgcaaaggtttttcgaatgtcaaaacaagtttttggattattgattttggaaatctgagtggatg

SEQ ID NO: 11707 - DNA, 3000 bp, Unknown
  misc_feature (1)..( 3000): cDNA_ID_2707226_gDNA_ID_2214512_Annot_ID_184308 3000 nt of promoter + ATG
atacaaatatttgagcacaagacttaaaaagccttccaaaactattatacaaactcaagaagaacaactgcttcaagttctgtgaaaatcactatttcaataatcgtctcctttggaaataatctctttgcaagttggtcgcaacaggattgtatgctcaaactgagaaatatagcttcctttgacatcacacactggaggacatggctacaaaagttaacccaaagaaacttactttcatcaaaatgttcttgaacataagtcatcagagtatatatatagttttaaggagtttacctcaattatgccagaatcacaaagattctttaaagccatcaagtattttgtttcaccaaggcggtccaaataacgtctgcagaaggctagcgtggagaagttcttgttaatagtggcaaggagttgttttgcccttggtaacctcaaaggtacatgacccacatcatagtttttcatgtaatggctacattctaagtcttctcttacatatcctttccctgcaaaatgacacaagtgaaaaaccaattttactctgaattcgtaaaaatccacatttcttgtatagtttcatgtgagaaatgttgttgttacctgttgatccaaaagtttcaatggcatataattcaccctcttccattttcgtctgctcgcctcctctaacattaggaactgatttttcagcgtgtatctgatagcgtccaatgctgtgcccattcaggtttctgatacttttgactgcccccaaaagacacaacattgttttagttttctaataatccaaatagaaaccaccaaaaaatgctgccacaaacgtaatcaattaccttggtagacttttccattgatttcaacctcataagactccatgacctcctgaactgcagcaccaacatcacagagccggacatctaccccggcttcctaaaccaacaaaattaataacacaatggacttattcagttggattgaacgataaagatccaaaaaagaagctcaatatggttataagaaaacaatgcaaacttcaaagaagaagtcactacagaatgaatggctgcattcaccatatccaagaacagaagaatcccacaagtagcaacagaaacagaatgagcaccttgataccagtatatgttgcgtcacgcgaggctgctaaaagaggatcaaacataggattgaacgcaactgtaaaagcagaatcaacaatgtgccctgccaaaacaacataataattgttcttatgagacatctacgttgagaaaatacaacaaacagatgataagtttttgtttttaccataccatcaatatgtgttccaaaatccagcttcatcacatcatcatactgaaggacagtcttatctccagagtttggtgtccaatgagcagcaacactgaaggttcaagtaaatttgagacgcattgatagagccaaagatcaaagaaatgcagaaagaatgaaaaaggttgaactaacttattcagtgaacatcctgtaggaaaggcgataccagcttgaagaccattctctgatatcaacttacgaacagtgttctctaaagtctcacagagatcaatcatcaacattccaggcttcaatatacttctcatatacttcctaacttgacgatgaacttccgctgcttggcgaagagagttatatatcggcttttgcagcctctccatctctctcttctcttcagatgttgttctccacaaattactacatcacaacatagacttagctagcaaaacaaaatgtccttatagaaaatctagtctagacttactcatcattgtactgttggatttcaccttgaggaaaatctccagaagggaagagctcaagaacaggaattgaaggaggatcagtctgttgaagagaactcttcttcttcctaaaaacaatcatcagatttttgagcaagatcatcaaagcaaacactgaagattaacagaaaaaagaaacaacttctcacttgcttttacttttcttcttcttcttcttcgttgaagcctcagctaaaatgaaaagactaaaagtctcaacaacaataaagctagagaaactctaaaccaacttcacatacactagttcctagaaagttacaatctctgatgacataaccagattgattaatctaaactagtaataaacaagaacacacgaaagagaccaaagttccatctttttcccgtcataattacatacttcaactacaagatctatcaaaaacacgaaatgatttacctttcagtccatcttcttcttcttggttattatccttttcgtcttccttcacttcagccagatcaagactcttcgttaagtcagaacttaactgagactcgtttccattagaggactcggcttcagtgttctccttccccatagttgctacttctgggtttcctatcgccatctcaaattattttaacaaggaggcttaatgagaagaagtgcagaagaaagttcatcagaagaagtcaaagtctcctcttttcacctctttttcactcccaacttttttcttcagtctatccaggaaaatgtcggaaggttaaaacaattgcaaaatgatccaacaaaactttcatttatacatttataacccattactttaaagaacacaaacgctccttattgggcccaatattaataggcccaccaacattaatcctgcttatcttttttttcaaaacattaatcttgcttatcttatctgattaatttaatttaatcgagaaagcaagacaaaaaaaaaacctatcgtttcacggacaagaagagaaccgttgcgctttgtgaagcatttactcaacggctagtttccttcttcttccccttttctcttcctcttcgcctagggtttcgaaaatttcaatccgatttgaataatttctgttttcttatcggaacaaaaaaatctccggcatctggaatctccggtgattttgtcaatttcgaagaaatttgattgaa

SEQ ID NO: 11708 - DNA, 3000 bp, Unknown
  misc_feature (1)..( 3000): cDNA_ID_1975979_gDNA_ID_2214512_Annot_ID_184307 3000 nt of promoter + ATG
ttcctcctcttcgttcaaaaactcgtcaagggtttttataataagaaagtttcaccttcttataatctcagcgccgccttaatggacatctgggcttaataatggccattaacgggcctgttttggatatctcgcggtagagtcccggtttactttggtttaacccagtgaagtggtcgatgaattcaacatccaacacttgaaaaggagtcttctttgttctcttactaaaagatacggtaatacaatgctcagacaaaagctaatggatcattgaatagactcagatattacaagacaactgatagtatttacaaattcttttgttatttgaggtatgtaagaagatagattatgccaaaccgaagagcttcagtgttgctgcactagcgagtatgccatgtatggctggctgtttttactgtgtggtaaagtaaccttaaaaaatcatcaaacagaagttgtgcactcttgctgatggcacttcttctggtgttgaataagctgacttctaagatagcattcttccatctgcagaatagaagaaaaaacactttaggatttcagaaactgaaaagaaacaaatggttatgtcccccaaacagtacaagttttaatacctgtgatgaatgtgtcttaagcagtgcaactctgcaatcttctactgatgctttctctatgccgcttactctagctaattccgacatcaaagtctccatctcttgtgtctgcaaaaggaaccaaggaagatgtttcagtttcaacataggcgtgtgtaggaactttgtttttgttcatgtttaatgtgaagcacattgactgtattttgctaaccttaggcacaagatttccaatgttttgcacaatgccttccatagattttgaagcgacaacaagtgcttctgctaactctttagtctcaacctggttttgagaagcaaaatctaaatgttttagtacaaaaggtataaaggagcagaatttttcctagttgattcgaccaacacaacatataccttgatttttgaatcgagaggcaaccgcaatgaagcattcaacaaagcttcagttgtttccaatagtgaagttgagaattcatcttcaagaacagcccattgctccaaagaaggagtctgcatagagttaaaagtagtttaacaccaatttttacaaggaaactacacaattgctctaaacgttcataaatgtaaaaatagtgtgaaatctacgatatttaagatctttacttacttgtgactctacaatctccgtaacagctttaactctctgtaaatgttggagttctatgcgtttcctctgtacagaatcagacaactccgacattttcaaaccaagtgaataaaacattctctgcaagaaaaacaatttacagcatccataagatcaccatcatcaaacagaatctaacctaaacaacattcatcactaatactgaagttatgtgtcaaacattgatctatatgtaaaagctatcaaatttctgattctcagagctatagaaactgacctcagcttgtgctttctgagattgtgttttgacctcagcatttgcatttgcaaatcgccattgcaagtaacggttatggagcagtttcagagaatgcacatccgcttgttgtcctaaagctttcttctgcttctttgtatcggcttgaatcttcgaattaggagccaccggaggcaatgacaaaccaacaccatttttaagcgacaatgaagctctaacatctcgaaacatcgacgcatcatcggaactcagggatcgagaaagtggtgaggcggtgggagtgttaaaggcctttgcttgggttctaattgttggcaacagatctgggccgttggatttgaaaatctctctattgttgttatcttcttcaccgtctgtagaagatgataacgagatcccgcttgatcggagaagcctagtcgcagcggaggcagtgagtaaacgctgttggttcagccgcgatctagacggtggcggcaacatagccgtcgttggtgtgtcgagacggtgaccgttctctttcaacggcttagatcgaatatgctgcttagggtttttacctccgtcgacttgttgaagaggaaaaggcgagtctaagctacgcgccgtctcggaaggacgattctcgtctccctcttgcattttcaattgccgtctcatcctctgagccgaagtcgatctctgattctgatgttggtgatgatgtctaggagaatttgaagtcaattgatggagatctccggcggaagaagaggaagacgacgatgacgaagaagaaatgggagacatgaatctcgagctcacttctcttactctcggccgcctcgtagaaggaggaggaaccggcgccggagcattaatcgcaggtgtagatgggtgttccatggatcggccgattctcgcctccatttcaatcaaatttcttcgaaattgacaaaatcaccggagattccagatgccggagatttttttgttccgataagaaaacagaaattattcaaatcggattgaaattttcgaaaccctaggcgaagaggaagagaaaaggggaagaagaaggaaactagccgttgagtaaatgcttcacaaagcgcaacggttctcttcttgtccgtgaaacgataggttttttttttgtcttgctttctcgattaaattaaattaatcagataagataagcaagattaatgttttgaaaaaaaagataagcaggattaatgttggtgggcctattaatattgggcccaataaggagcgtttgtgttctttaaagtaatgggttataaatgtataaatgaaagttttgttggatcattttgcaattgttttaaccttccgacattttcctggatagactgaagaaaaaagttgggagtgaaaaagaggtgaaaagaggagactttgacttcttctgatgaactttcttctgcacttcttctcattaagcctccttgttaaaataatttgagatg

SEQ ID NO: 11709 - DNA, 3000 bp, Unknown
  misc_feature (1)..( 3000): cDNA_ID_3022587_gDNA_ID_2214512_Annot_ID_184303 3000 nt of promoter + ATG
atgcctctgtttttatttcacttttcttgatctatctatttcagcatttcattgatataagaccataattatctgcttgtttaagtacattgaactggaaaaaaccttatcttttgtgttaggatgctattctcaagctgttcctcaagttgcaagtgtgggagtgagtgtaacaataagccgttccaacaacgacatgtcaagaagatgaagttaattcaggtaatgtgtgattggttttggttggatagagtggatttttgttgttgtcggtttgttattttagttgtgtcttgtagacagaaaaatgcggatcagggattgtggcagaagaagaaatcgaagctggagagtttatcattgaatatgttggagaaggtgatgtgactatttgatattttgtctccctactgaatatactgcgaccatggtctaatttgttttcttttttcgtacctttgctcaatgtagttattgatgataagacttgtgaagagaggctttggaagatgaaacaccgtggcgagacaaacttttatttatgtgagataaccagagatatggttattgatgctactcataagggaaacaaatcaagatatattaatcatagctgcaaccctaatacgcagatgcagaaatggtttgttgttaactgtcaacccttagtgcttgtttcctagtttagaatacttgagagagaaaagtcatcatttggtttacttttgcttgcaattaggataattgacggcgagaccagaatcggcattttcgccacccgtggtatcaaaaagggagagcatttgacctatgattatcagtaagtttatatcctccttctccagtttactttgtaacatatctgtttttatgttgagttgtgacactaagaaatagagcaggtttgttcagtttggtgcagatcaagactgccattgtggggctgtaggttgcagaaggaagcttggtgtaaaacctagcaaacctaagatagcctcggatgaagcttttaatctagtggcacatgaattggcccagacactgcccaaggtattttcaaattttatctgaaaagaagaatcaaatatatatctcgtctttgccctggcatagtttcacagtcactgaaaaatttgtgtgatgaggtctaagtgactctttttctttccccacttttggttaggtgcatcaaaatggacttgtaaatagacacatagatgcaggtaagtttggattttttctgctcaatttgcgagagtagcttattgtgttttggttgtaagaaagtaatttggattcccatgtttctccaggaaaatcatggaacaatcttagtcaaagggatacatgttcgcgtaattgcattggtgtggtgatcaggttatctcgccccacgagtgataggtatttattgagttttgaactcgtggattagttttatgactcattctatgcttttctcatccaatgttttatcttttgagattttcaggtgttttggcctcgttagacattttgatgagtattcaagaaagcactcggtattacaattagccaatacttgttcctcaccatcgaacttggcaaaatcattctcaattaagacctctctgttaacatctttaaacttggtccaggtgatgttcgaggatggtgttaccgagtttgtcgacatgtcgagagaagactgggagattgtctaatattgttttcaggtgatttatactcttcactctcttaatgaaacattaaaactcccagaagcatagagtattaaattaccctggctgctatgtttctgcagattgctttgaagttgagaaaccaaaataacctgtcttggtaaactaaaggtatcccaaaaaacccgggtctgactgactgggattggtgcagtgacattgtttgttgcgtctaacttgtgacctgtgtttgtacaaccattataagagatatcatatatctacttgtgtaaccacatctgtactttcttctccttccttcttttttcatggggatctcaaatgatgatgtcttgcaagaaccttcgtggtgtgtaattgactttgtaagaaccggtaatctcatatccggtttagcttttaaaaatttgtatccaaagaccggtttgttcttgtttgcatgtgctgttcttattcgtgcatctgtgtgagtgtgactgtgtcggtgtcgccgacaaaagccggtgtttgcaaaatctgaccagttttgttttagcgattaacgtttcaaattccttcaaatgcaaaatgagttaaacaagtgaaaaattactaaaacaacataacagttttaaattggaaaaagttttgtaaagtttaaagatacactgtaagtgaaaaacggaaaattttaattagattttttttttttttttttttttttggtaaaagtagattatttttgttaaacaaaagtgatggatcattggttttttggtagtaggtgggtgatgtgggtgtgtggttctggttcaccaactcaaaaagcatagactgcaggggttggggattgataacgacaaatctaattgtggttggtaaatcttttactaatcacattcctttaaaataattatgtaactcatcttgtttactaatatcaactcgactatcttaatatcaaataactcggattcttcatttttttcactttagaatggtttggtaaatctcttgaataataaacactttaataaaaatgtttttttttgtcaagcataaaaatgtaactcatgttgtctaactacatggattttcgcacaaaacaatgattaaatgtaaattatgtaattatactttatttaaagtatgattttgtcttaaaaatgaaaataatataaggaagtggacgggtaaggtaaagtctaaaattcaccaaacattttggaatctctctgtttactataaagcagtgagtagaagaacctgaaagaactcgcctttgtctctcattcttcttctccatttcgaaaagaag

SEQ ID NO: 11710 - DNA, 3000 bp, Unknown
  misc_feature (1)..( 3000): cDNA_ID_3022599_gDNA_ID_2214512_Annot_ID_184300 3000 nt of promoter + ATG
atatgttacaaagtaaactggagaaggaggatataaacttactgataatcataggtcaaatgctctccctttttgataccacgggtggcgaaaatgccgattctggtctcgccgtcaattatcctaattgcaagcaaaagtaaaccaaatgatgacttttctctctcaagtattctaaactaggaaacaagcactaagggttgacagttaacaacaaaccatttctgcatctgcgtattagggttgcagctatgattaatatatcttgatttgtttcccttatgagtagcatcaataaccatatctctggttatctcacataaataaaagtttgtctcgccacggtgtttcatcttccaaagcctctcttcacaagtcttatcatcaataactacattgagcaaaggtacgaaaaaagaaaacaaattagaccatggtcgcagtatattcagtagggagacaaaatatcaaatagtcacatcaccttctccaacatattcaatgataaactctccagcttcgatttcttcttctgccacaatccctgatccgcatttttctgtctacaagacacaactaaaataacaaaccgacaacaacaaaaatccactctatccaaccaaaaccaatcacacattacctgaattaacttcatcttcttgacatgtcgttgttggaacggcttattgttacactcactcccacacttgcaacttgaggaacagcttgagaatagcatcctaacacaaaagataaggttttttccagttcaatgtacttaaacaagcagataattatggtcttatatcaatgaaatgctgaaatagatagatcaagaaaagtgaaataaaaacagaggcatacccacaatggcaattactcccacagacagttgaagaagaaccaggagacgaggaggagcaagaacagaagattccatcatcttcaaccctccttttgactttcttcgtcaagtatatatctttaacaagtcaaggccaaaacaaatcttgatcaaagctaaatctgcaaaatgaaacaaaaccaaaactgcaattgcaaaaaaggatactgcgcctgatgaagatataaggagtaggttttcctttattcaaccactccggtaactcgaattcttcagattctccaatctgattcaatagcttgtcgaacacttgccctaagtgattccggtccgaaatctgagaaaaatatctggaaatttcagatatcaagaataaagttaaaatttccatgaagcggagattgtttttgaacagacctttttgctggctggcatgtcgaaagaatctaaaagaagctctaaaaaccagagaataagcaagatttgagcgtcgacctattgaggtaacaccaagttcgatgaaactaagaaaagaagatggctaaaactagtacgtctctctgttgtttcggaattcgaagtttctcaaccctaattattacttcttgttgttgttgaagaagaagaactgaagaagtaacaatggcggatctgagacagtaagaaagaagaaagagcggcagttgctttttttttaatctttttttctctttgataattacgcttcagaaataaatggcttcagggtaaaaccgtaacttgactcgatatgatatgttggcccagtgtcaatatgggcttttttatccgatccaatttttttaactagcccaaattagctgagcttaattaacccaaactaatattgttgctttatgtcgtttatatgtcatagccttttagccgtaatcactaatcacattaatagcaagcagcagcaacattttaattttgtgtactgttaacatgttgatggatgtgttaacaaaaaaattaggaacctggagaaaagtaaagtaaaatactatcaatgtcattgttaatataatattcgaacgttttatccgaagtaaacaggtaaatcggagagtatttatttttttccacgtaaaaaaatggtaaacaagtgtaatcataattcataaccctgattatgtgaagtttaattaataattaaacgatatagattgtcattagttgaaagcgaaagatttgaagaaggtaaaaagaagaatcgccattgagattgtcccaaaacctccaaaggaaacacacgtttgtctttgctctgaggtatcttcgacgggacgttgaagcgagcaagatacgacacgaaatcgatctcccccttgcgttttccatctccgtcgtctgctgaaaccatttgatcgatctctcaggtgatccttctgtttcttttcctattgttttctctctgctagaaaaattcggagttgtgagaattcctgggctaaattggatgatgaaattctgctacacgaagaggagttgtcaaaatttaagttgattaattgatcattttcgattactgtagatccgtgagttgaaatttcgtcaagctcaagtctgtttcttgattttgtcatttgctagaaacattcttcaattaagagaatatgcatgtggaatccaaatgctttgatctctaaaattttggtttatatttctctgttgactccctaaaccttcctaatatcatgcggaaaattctatgttgtgatgtttcaagaggtcaagaagctatggattgggtttattttctcatcaaaatctgcttagtgtttgtaattgtagaatcgttattgtgttacatgcttacttgtttttggggtgttaagctgaacttcagtggtcacaaaactatagttatggtctcagagagttaattgattaaacttttctgaaccttgaagtcacacacacccaatcttgtgtagtgtttgaagttaattgtggaagtttttagtcaatcttggctttctgatactacttaaaagtatgttggatgttaattcagtgtcttttgtgcttattatttcagataaggttctcaggatttaggttgcttctatgagaaggacacgttgcagttggtgcttcatgtctaggtaatg

SEQ ID NO: 11711 - DNA, 3000 bp, Unknown
  misc_feature (1)..( 3000): cDNA_ID_1807771_gDNA_ID_2214512_Annot_ID_184298 3000 nt of promoter + ATG
cctttcaatctcaccaaacaggcaagagtcaacacatgggttactttgatgcgatttccttaataaggaataaaactttgaaatggaatctataacaactggtttagttcatgaagacggtgcttttgttaaaacaatcttttcataaaacaggaaaagtagaaagcttctagaagactttcataaggacaaaatgaacaactaacagtggagtaaatcatatactccataagaatttgattatttgaatatcaaccaaaaattcaagaaatgtccatgttgtttcatgatgtaaattgtaaaggcaaatagttgaagttaggtcagtggttacttggttaagtgaagttaggtaacaatattgtatattataatcacaaattaaattgacagtatactgcgccgcactttttgtttaacgcttttaccactgtatagcgtctatagtttaaaaacagtttgaactaataactttttaaactagtttatcaactagatatctagattactattccatttcagtgtcaattgaaaccgaatctatgacatcttgataataaagttcacgaagaccagtagtgagctttttagtctttaccatcactttttatttgaaataacaaaaagcttctagaagctatgcaaagacaaataatatggagtaataaggaatgagtcgtattcactgacgcaaccgtcaaccgataagtaaacatctcgtgaactgtttctccctaatttactacaatttaaaacaggtatattaatatgtatgatggacattttcatttcatattggcatgtgcacgcactatcaaacaaattctttcacgaatagtccatatgtatagattctttatgttttgccaaaaaatttgtgcttagttgttataagttgtaagatatcatcatgtgtttttaattttgtaatacgtattattttacgtagaaaattgcgagggcagtttcgtttgaatataagattcatcaataatattatgattgattataactttataaaggtttctactttattatagtcttctagaagaagttctcatggatatacattggcattaactatccttgggtcttactcttcgattattcaacatattatattaaaacgttgacacgtctattctgcgatgcaccgacgtaaaggtatgtctcgcggacttccagcctcacacaagtcatctcgtctccaccggataattaatgatgctttctgttgttttactttggggttatttatgaatctacgcttactatttgtgccgttatttaaaacatgtttcaagggaagaagattaatttgggtgttagcgcacgatatgaacatagatagacaagaagaaaaatgaaagtcggggataagaaggaaaataataagaatggggtcgaacattaatagggggctggtccattacactctatcccattttccccacattgtctgttcttgtttcgtcaattgtcctttctttgattactctctacttatgtattttctctctatcagcttttctagctttattcatcaccaattattgtcgtgtgtcaagaaaaagtaacgtagagtttctttgaatagtagtagtagtttcgcatataaacgagtactttcgattcattttcattcctaaatggtaatattggctatcaataggtcgcgttagtcaaagaaacaatggatacatcttttgaaactttttgctcgacaagaaaaaagcaactataatgtcatttagttttgttttatttcccttaaatggattatggatcaatggatgatgtagtactgttaacagattctattgatgaatttcacgactatcgcaagacgaatttgaaatcatcacgaaactgaagttgttgttttttttttcttttcaacgaaggttgattgatttacgactacgatgaagtggattggtttctaattaattattcctgaaaatgaaaccaaagatataatacaactattactaaatgaaaagaagaaaaatagagataagggttctagaagataggcattgatatttgttttcccttttggggagtttgtcatctttatgggggaggaaacaagtgggccgaaactggcaagcacttatcctcttggctttagtcttcttctttacggttactaaagtttttctctttcttttcttctagaagaccatattgacatttttttttgtatctctagagtaatagcactaaatataaacctaacttttgatgttagtctaagacaataagacatacgaagctttaaaactctattgttttgaatgatcacaatgtcacatatcaatacttatattcgatctagaagatttggaagagtatagatttaatttgttggtttatgaaaagaaaaacagtattggtggaagaaagtattcagaagggcaaaatcgatgacatgtagatgtagatggacaaggcctgagtatgtatatgtcatttaaaaccaagcccaatttaagttaaataaataggcccactttggaaaaatgactgctgactaaaaaattagggttacgaaataaaccctaaacccagtttcgactttgtttgttttgtcctccttctacgccgcacactatctcttcctctctctcagacgagatttcctcttcatctcaagtaagcttctctctttgatcttcttcgtttagtttagtttttaatcgtaagttttcttttgattcattataatttgtttgttctgatgtttgtgagatcgataaacccagttgttctagttctattgtagagaaattcactttgattttagatttagaatcgttgcattgagttttccgatcttctataattgctccttttcattttgctgtttggttttaaacattgtcgttgatgttcctgccttgcttctctgtgattaacaatctgttcaatttctcaaaggtgtcttttttatttgattagtatagcttatttttggtttgtttatggcatgctatg

SEQ ID NO: 11712 - DNA, 3000 bp, Unknown
  misc_feature (1)..( 3000): cDNA_ID_2707265_gDNA_ID_2214512_Annot_ID_184296 3000 nt of promoter + ATG
cttccacgagctgtcctcttagcttttgtgagagcagccggccacccgcatccacacactctctgtacagtggcatgtaggcgattgccactctcaatggtgctgggagatcctttagacttattgcagactctccgagtttcaaaactctcatgaaattcatgtaattttcccggctttccttcaatccttggttgaatgcagcttctgaccactgttcttggagaaacgatttgaggtcggaaggaacagactcgtcttctgactttgcaatggtgtctgcaactgaatatgtggctgctggatccccgaggaaatctgatttaaggagaaactctactccgtggagggaaccaccacttctttcaccggctgctttgaggatttcaatgctgagagcagtaaggacgggtcttggaacatgaggaaggagataagcagcaacctcaacctggctgcttgaagtggcggctgtgagagctaagcatagctccatttcacgacagcctcgtttcacaaaccattgaacaacttgcatgcaacctctctccgctgctctcatcaagggacccaagaaagcaattgcatgaccttcttctacaaggcaatccatcgtttcgattttactataatgcgaggcaaaaccaagggctaagtcaacatccacgtctaagctattcctttgagcaatctgcaccaggaaaaagttcagttagattgcacaaagtaacttgcaagcagtcattaagaattagatttacctgcaacaagatgcgcacaagttctgtgctcccaaaacgagaagcttcaaggaagcactgatttacattatctgcgcctccttccaccagcataccgagcaatccatgtatgacagtagctgaaattccagaagcccagccaggattaaacgaggtagagaacagcgtaagcgggaagcaagctgcatcaaaggcttctgtgaaatcctttcctgatagatggtttcctgcaagatctaagaacatcttgaaagcagaaagctggagttggatctcagcagctgagtcttggttagctttatctctagggccctggcatcgggagtgaaaacctatacatttgagtgcccattcagtaaacttttgaactttagcaccagcttctgctttgaggacctcatcaccgttacactcttggagacgctcgtgcaacctggaaacgccgagatgggaaaaaatggatttatatagaaagggtatctcacccttcccagctaaccaaagataaaccaggaggaataagaacataagagatactatagatttaacaaaaagcgatttctaagaaaagttaacaacactaaaacacttgcagatgtaaccaaccaatgtaacatgtaagacacaatgtagtgatcatataaagcaaaaacaaggtatcataacagaaaccaacttctccaataatccaaaagtgttttaccataattatactgagaaaaaggggaaacatcttataagagaaagtatcaaatgtgtacctttgagccataacagttacagtatcagcaagactcacagtccggctatggcaagatgaaacacaagaagcaagaaaggaagtcctaagtgtagctctagtatagtcctgagcaccatgacatatgatcttagcaatcaattcagtgattccccgtaactcatgctctgtgctcaagaaccaaatagaatctaaactaatacacaacagatcattcaaagtttgtggatcagccagctgaataaatctctctgaaagttgccaatcctgtgagctaacagcaccttggaaaagccgtcccaattcgattctatcctgtctattaagcttcttctgttgctcaagacccctgcatttcagtatctttgcagtagatccagagcatttggtcggttgagtgatgatacctacaagaggtgactctcttgcaaaaacaacatcactctcttgaggttccaagtcagaacctacaggctcatcaggatacatgtcatcgttctccatccactcagatttccaaaatcaataatccaaaaacttgttttgacattcgaaaaacctttgcaataacaatactgtataccaacaaatcccttcctccttgtacaagcaaatgtcttgtaccaaaatcaaaatccagacttgcgcaatcaaccactccaagaaatcaaacccaggaagaaaagaaaaaagagactagagatttcgttcagaaaatgcggtagaatcgattcacgagagcgaaaagggtctgaattttagcaaaacgtagtcaacagaagcatccaaaccttaaaataaaataaaaacagaaactgatcccaatcagaatccatggccgagcacagcaattgtgaattcggccatgaaaattgcatcggaaagaagaagaaagatgtgaatttgcaaattaccaaagaagaacattcgtagaggagatgggaagatgagcgaacctggacgagattttcattgagaggtcaagagaacaatgagagaatttttttttatttttttattgtaaaaataataattgacaaaattaattaaataaatttgctttgcactcacagaacagaacagaagatgacattttctctattttcatatttgtctttttggtttaatcgactggttatttatttattaccctaaaaaaaaacggaattgttttagaaaatgctaattgaattattagattgcttcagacagcaaaaacattattgtaaatctatttattacacacacaaaattacttttaagttttacttggtaataatatttagatttatccaaatttcaatagccaaataagaaaaaaaaaagagaaaaagcatataagaaagaaagcatctttggacttgtctgattttctctatagacgcaatcaccgccgattctctctctctctctctcgagtctctcgacggtcgcatatcaaaagtccatttctttcttctctttggaggatcagcaact

SEQ ID NO: 11713 - DNA, 3000 bp, Unknown; identical to SEQ ID NO: 11706
  misc_feature (1)..( 3000): cDNA_ID_2711183_gDNA_ID_2214512_Annot_ID_184295 3000 nt of promoter + ATG

SEQ ID NO: 11714 - DNA, 3000 bp, Unknown; identical to SEQ ID NO: 11704
  misc_feature (1)..( 3000): cDNA_ID_3022631_gDNA_ID_2214512_Annot_ID_184282 3000 nt of promoter + ATG

SEQ ID NO: 11715 - DNA, 3000 bp, Unknown; identical to SEQ ID NO: 11702
  misc_feature (1)..( 3000): cDNA_ID_3022651_gDNA_ID_2214512_Annot_ID_184273 3000 nt of promoter + ATG

SEQ ID NO: 11716 - DNA, 3000 bp, Unknown; identical to SEQ ID NO: 11701
  misc_feature (1)..( 3000): cDNA_ID_2707257_gDNA_ID_2214512_Annot_ID_184272 3000 nt of promoter + ATG

SEQ ID NO: 11717 - DNA, 3000 bp, Unknown
  misc_feature (1)..( 3000): cDNA_ID_2711220_gDNA_ID_2214512_Annot_ID_184270 3000 nt of promoter + ATG
gtaagattttacgaccaaagtttcattgtcaaatcagaatttttatcaaatcattctgaagtatgttatttaaatattcaaaagatgacaaagaagattatggaacaagtataaatggaaaataatatttggatgattggagcaacatggttacggaacgtgacaattggagaagaatacggatcgaaattggaacaatgatcacaccgaaaggttctttaaatttctccaaaattaaatttctttcgtatacttgaatgttttcttaagtcaaacatttgattactcacatttttcaagttcatgcatttaaattaacgtgctaatggcgagactaagaaagataagatttttaactactcgaatatacttttccggtaattacttaattaatattcaaggtcaattggaggatcatgatgccgaatgagtactaattgcattcatgttcaagggatcgaagttgatttgtgactcaaccctttgcttaaacctagaagagtggtgctatatgaaaatttgagtatgtgctataggataagcttttagcccaagttatgtatgtttttaaaaaacatttcgttgctttctttaactagaaaatatatgtatattataatatatctagtataccaaccaatcccaagtaaagtaaagcttattgaaactaaaccaaatcaacttatgaatcaacatatttttttctaatataatgtaacttcaaacgaaacaaaaaacaatcagaatttattttaaattaattgtttagataaaaatacaatgaaaagagtattatttaattgttcggatagtaataatactagtgattattcatttctcggcttagttttgaaaactgatcaaaaccaaaccagaaaaaaactataaaaccgtatgaaatactgaaaatcccaataggtatgtacataatgatgtatgatatatctgatcaagtataaggattcgagtatgcgaccatatagtcatataccaatcatcaaactatatatagattttcaaatattatttattttacagactcataattatgttgtctatggctgatcacatgcattgcaagatctcaaaaatatcatgtataaattcacgtaacacatttattacgcatgcatatatgctttgccgcatttatgtagaaggacatcatgttgagttcatgtttctctttgattgttacgtattttgtctaaatactgaccaaatattagttgtttcgttacgtaattatgttagttgaggttggagactgattttcagaagcaatttacaccttaattagtaaatatcattaaccgcagtaacatactgatatttactggcactggtccttcaatcttctaattatagttaaactaaatttgaaaatttgatcatgtcataagagcaagaaaaaaaattcgtgaataattctttcatttttatgggcttttagtattttagaagatagagtgaccattttatttaatgtagtcgttgacatttacacactatattaaaactcgatatagccatgtgatcatgatggatataaactcaaatcgatttgttaattgagaagccaatctaatttaattattcaacataaaaaataaacagtctatttttgtgtcttcagatggcaattgttattagttttcatcgaattgatccagccatctacatacataacataaaggcgcggggaaattaaacatacatcatatttgtagacttgtagttgtgaattttgaaaaagtaatacaaagtatgtaatggaaaaaatgtatcgtttctagacttggaaaacgttgggctttgaaccagaagaaggaaacatattgggtttctgaaaggtaaacgagacctacaaatacagtccttcataaataatgggcccataacatccatacttgtgtgagacagacgtttgttatgtcttcaatcatgaacatataattcctttttttcatttttttcagcaagaacaaataattcttaatcaacttacaactttaaattttttatgcttgttatatgatattatgttaaggcatggctcaatgtttttagattttcaaccaaggcctatattgagaatttgagagcttataactttttcttttcttttcaactgtacgataaattaaaataatgtatagagaggtttgcaggagccatgccttgcatatattcccgcccaattatcctgcagaattttctccacgtgacattacagtaaattccaacagtgcatgatagataatttttgtttctaagtttcttctccacttgattgatatattctgctgttttatttaccgcattatacatcagattcaccttctttaccgaagtttgattacaaatttacaaagtatcgtgaaatcgtcatgggtaataaaatcatgacaccaacatactaaacttgaaatcttaaaaagcataaacagaaaaaataatattattatctgaatcaattgattaagttcaaaagaatatcaaactgtttatgtaaagagacaaaaaaaatattttctgattcagtgaattaagttgataaggaaactgatcaataagcatttgcatatagataacgtggaaactgagagtacaactttgttttgcaataattcatgcatgcgtcgctttatcgactaatattcgtacataacaagttgtactcacacaagtcataagtacattatcattaaataacatagactatggaatcaagtaacatttaggtcacttatattttaatgcaccgcatctaacgcgattagtcattaatacacggatcgtccgatctaaaataaaatttgtttttattttatatatacagtatataacctttctcattatttcttcttaaatcattacaatcatcacaaagccatcgcaaattagaagagatttaagatggccaacaacatctcctttccttgcgccatcatatttttctctatcaatattttcttcttaatcaagtcatcacacgca

SEQ ID NO: 11718 - DNA, 3000 bp, Unknown; identical to SEQ ID NO: 11712
  misc_feature (1)..( 3000): cDNA_ID_2707265_gDNA_ID_2214512_Annot_ID_133867 3000 nt of promoter + ATG

SEQ ID NO: 11719 - DNA, 3000 bp, Unknown
  misc_feature (1)..( 3000): cDNA_ID_2707234_gDNA_ID_2214512_Annot_ID_133868 3000 nt of promoter + ATG
gaaactggcaagcacttatcctcttggctttagtcttcttctttacggttactaaagtttttctctttcttttcttctagaagaccatattgacatttttttttgtatctctagagtaatagcactaaatataaacctaacttttgatgttagtctaagacaataagacatacgaagctttaaaactctattgttttgaatgatcacaatgtcacatatcaatacttatattcgatctagaagatttggaagagtatagatttaatttgttggtttatgaaaagaaaaacagtattggtggaagaaagtattcagaagggcaaaatcgatgacatgtagatgtagatggacaaggcctgagtatgtatatgtcatttaaaaccaagcccaatttaagttaaataaataggcccactttggaaaaatgactgctgactaaaaaattagggttacgaaataaaccctaaacccagtttcgactttgtttgttttgtcctccttctacgccgcacactatctcttcctctctctcagacgagatttcctcttcatctcaagtaagcttctctctttgatcttcttcgtttagtttagtttttaatcgtaagttttcttttgattcattataatttgtttgttctgatgtttgtgagatcgataaacccagttgttctagttctattgtagagaaattcactttgattttagatttagaatcgttgcattgagttttccgatcttctataattgctccttttcattttgctgtttggttttaaacattgtcgttgatgttcctgccttgcttctctgtgattaacaatctgttcaatttctcaaaggtgtcttttttatttgattagtatagcttatttttggtttgtttatggcatgctatgtatgtaggagaaatggctgaatccaaggtagtggttccagagtctgtgctaaagaagatcaagaggcaagaggaatgggcattggccaagaaagatgaagctgtagctgctaagaagaagagtgttgaggcccgcaagcttatcttcaagagagctgagcagtatgccaaagaatacgctgagaaggtaataaagcaacactcttttgttcatctttgctgactaagatgactgttctgttcatggttgttgtaatgaatcatgatatattatttgcatgcttgtttaggataacgagttgatccgattgaagcgggaggctaagttgaaaggaggtttctacgttgaccctgaggctaagttgctctttatcattcgtatccgtgggtatgtgcctattatttgtgtgttacataagttgttgcatatagattctgttttttatttacgtgattgtttgtcatttgcagtatcaatgccattgacccaaaaaccaagaagattctgcagctcctgcgtttgagacaggtaggtttcacagtttgttattttcatccagctatattagcctaacatatgattattgattaatatttgttatatgttcaaactaatatgtgatagttgcctgttcatcatttttaaaagagagtagaagactattgcgttgtcaagaagtttactttcgtatacatttgtgcagatcttcaatggtgtgtttcttaaggtgaacaaggcaacagtaaacatgctgcgccgagttgaaccatacgtgacttacgggtatgcaatctgattctctctctttcaataggattatgtaaactaaactatatgctgctctaaaccgaatgatatatctggtgcagatacccaaacttgaagagcgttaaggaactgatctacaaaagaggttatggaaagctgaaccaccagaggatagcacttactgacaactccattgtggatcaggctctcggaaagcatgggatcatctgcgttgaggatctcatccacgagatcatgactgttggacctcacttcaaggaagccaacaacttcctgtggccattccaattgaaggcaccactcggtggccttaagaagaagagaaaccactacgtcgaaggtggtgatgctggaaacagggagaatttcatcaacgagcttgtcaggagaatgaattgatgaaagcttccttctttatctttgcaaatttcaaagattttgggaccgagtttttttttttttgttcaagttatcagagacttgtgatcttttatccgagataggctttttatgactaatcatgttattttccaatggcgggcttttaaattgatcttgaatttttattggctgttagattgttccttcgaagcccaccaatccattagaaatatctggttttgaccggttgattaaataattccggtcgagctgtatcaaagatagaatgctcttaaccggaatcgttgacttcaagagtacaagctgttctccatttttttaaagagattatatcggttgtgcgaaattgtccaaattttgtttttatagattgaccgatcaaatattgtagcggttaattcgttaaaataaaacgtttgatcagttacatttgattaattcaatatcaagtcaaaattttatcttgttaaaggaaaaagaaaaaatattgggtttagacctttgacaaaggaaaaaaatggggacttaaagagtctaattagacctcaattaacaactcttggtggctctataacattagtaatttctatttaggttgtacattgtaactatccaaaactctaaataaagaaaattacaaaacatagaggggacaaacacacactgacaccgcatacattacacattatataatgtgcatgaatacaacctacactttctagtaaagaaatgaaaatgaatataacctacaaattttaatatttaaagacacgttctaaagaataagatcgccggtttaaaacaattacctggtcatcattttggattaaactcattaggcattcattatataattgcaccaaacaagaaggggatcaagaaaatcacgaatcaccggagcaaaaaaatg

SEQ ID NO: 11720 - DNA, 3000 bp, Unknown; identical to SEQ ID NO: 11711
  misc_feature (1)..( 3000): cDNA_ID_1807771_gDNA_ID_2214512_Annot_ID_133869 3000 nt of promoter + ATG

SEQ ID NO: 11721 - DNA, 3000 bp, Unknown; identical to SEQ ID NO: 11710
  misc_feature (1)..( 3000): cDNA_ID_2711179_gDNA_ID_2214512_Annot_ID_133871 3000 nt of promoter + ATG

SEQ ID NO: 11722 - DNA, 3000 bp, Unknown
  misc_feature (1)..( 3000): cDNA_ID_2711175_gDNA_ID_2214512_Annot_ID_133872 3000 nt of promoter + ATG
agattatagcaatacgtcagaaaggtcaagtacaaatacgagtcgagcataacagagataatggaatcaatttcacagttgcaaacctgggattcacactgtcaagcccaagaaccagtggaaccaaaaggataatcggtgtccactcagactgtccttttgagaattctagacaagatttggtagcatcttctatacagagaattggagccccacctctctctccatcttcgctgccagaaacgatatgaacagccataggaagcgtctggtttttagaatcagtttgttttctcttcttgcacgctaatgactcccacgctcgacaaatggcatacggtcctacccatgacccagcagcgagaccataggacgctccagctattataagattgtggatggagaaagctgaaggctcggaatcaccaaaaggttccaaggtctctaagtattcctgttcaggaagctgcatttttaaatcaaacaagcatgaggtttccactatctcaatgcaagaaaccgggtttctgttcctagtgttgctacattgagcttacctcagatttcttagtccaagccctccccagcctatggaaaagcaacgcctgataatatttggtttgtcagaatatgttataaacttcaaaatctcatgccaaaagaaatactcttcctcacacctgagcaaaaagcatctggctacttcgaatcatgcaaccccagttcacatcgctggtataagttgtgtctctaaagggttcaaaacctgtaaaatacaattcgtaaatggtaaattttatgtaaaaaactttattttggctttaatctgtagttgagtttacaaacctttacgatatgtcatcagtattttggatgaaaaatctagttgcaatgcagccaatacagtgccagtatcggtttcccctgagttctcatccgcagatattttatagcagacacccaagagccatacgtcactagttgtgctcggaagaccggtcctattaggccctaaaacacgctcctggaatctcctaattgctccactagccatagagactctttttacaaatgctgtccaaccattacgagtggtgcaaacttgcttatgcccagaagttgaagactccctatacggttgagaaactgaggaagaagacgtaaacacgtttgaccataaggtaaacttggacttattatcactaggtccagaatctgaaactaaaggggatttatcatgcgtatcactcttgcttgatgaagaacattgttgaggaacaaatctatcacataaagccttcattacctagacatgaagcaccaactgcaacgtgtccttctcatagaagcaacctaaatcctgagaaccttatctgaaataataagcacaaaagacactgaattaacatccaacatacttttaagtagtatcagaaagccaagattgactaaaaacttccacaattaacttcaaacactacacaagattgggtgtgtgtgacttcaaggttcagaaaagtttaatcaattaactctctgagaccataactatagttttgtgaccactgaagttcagcttaacaccccaaaaacaagtaagcatgtaacacaataacgattctacaattacaaacactaagcagattttgatgagaaaataaacccaatccatagcttcttgacctcttgaaacatcacaacatagaattttccgcatgatattaggaaggtttagggagtcaacagagaaatataaaccaaaattttagagatcaaagcatttggattccacatgcatattctcttaattgaagaatgtttctagcaaatgacaaaatcaagaaacagacttgagcttgacgaaatttcaactcacggatctacagtaatcgaaaatgatcaattaatcaacttaaattttgacaactcctcttcgtgtagcagaatttcatcatccaatttagcccaggaattctcacaactccgaatttttctagcagagagaaaacaataggaaaagaaacagaaggatcacctgagagatcgatcaaatggtttcagcagacgacggagatggaaaacgcaagggggagatcgatttcgtgtcgtatcttgctcgcttcaacgtcccgtcgaagatacctcagagcaaagacaaacgtgtgtttcctttggaggttttgggacaatctcaatggcgattcttctttttaccttcttcaaatctttcgctttcaactaatgacaatctatatcgtttaattattaattaaacttcacataatcagggttatgaattatgattacacttgtttaccatttttttacgtggaaaaaaataaatactctccgatttacctgtttacttcggataaaacgttcgaatattatattaacaatgacattgatagtattttactttacttttctccaggttcctaatttttttgttaacacatccatcaacatgttaacagtacacaaaattaaaatgttgctgctgcttgctattaatgtgattagtgattacggctaaaaggctatgacatataaacgacataaagcaacaatattagtttgggttaattaagctcagctaatttgggctagttaaaaaaattggatcggataaaaaagcccatattgacactgggccaacatatcatatcgagtcaagttacggttttaccctgaagccatttatttctgaagcgtaattatcaaagagaaaaaaagattaaaaaaaaagcaactgccgctctttcttctttcttactgtctcagatccgccattgttacttcttcagttcttcttcttcaacaacaacaagaagtaataattagggttgagaaacttcgaattccgaaacaacagagagacgtactagttttagccatcttcttttcttagtttcatcgaacttggtgttacctcaataggtcgacgctcaaatcttgcttattctctggtttttagagcttcttttagattctttcgac

SEQ ID NO: 11723 - DNA, 3000 bp, Unknown; identical to SEQ ID NO: 11709
  misc_feature (1)..( 3000): cDNA_ID_2707261_gDNA_ID_2214512_Annot_ID_133873 3000 nt of promoter + ATG

SEQ ID NO: 11724 - DNA, 3000 bp, Unknown
  misc_feature (1)..( 3000): cDNA_ID_1975979_gDNA_ID_2214512_Annot_ID_133875 3000 nt of promoter + ATG
ggtttttataataagaaagtttcaccttcttataatctcagcgccgccttaatggacatctgggcttaataatggccattaacgggcctgttttggatatctcgcggtagagtcccggtttactttggtttaacccagtgaagtggtcgatgaattcaacatccaacacttgaaaaggagtcttctttgttctcttactaaaagatacggtaatacaatgctcagacaaaagctaatggatcattgaatagactcagatattacaagacaactgatagtatttacaaattcttttgttatttgaggtatgtaagaagatagattatgccaaaccgaagagcttcagtgttgctgcactagcgagtatgccatgtatggctggctgtttttactgtgtggtaaagtaaccttaaaaaatcatcaaacagaagttgtgcactcttgctgatggcacttcttctggtgttgaataagctgacttctaagatagcattcttccatctgcagaatagaagaaaaaacactttaggatttcagaaactgaaaagaaacaaatggttatgtcccccaaacagtacaagttttaatacctgtgatgaatgtgtcttaagcagtgcaactctgcaatcttctactgatgctttctctatgccgcttactctagctaattccgacatcaaagtctccatctcttgtgtctgcaaaaggaaccaaggaagatgtttcagtttcaacataggcgtgtgtaggaactttgtttttgttcatgtttaatgtgaagcacattgactgtattttgctaaccttaggcacaagatttccaatgttttgcacaatgccttccatagattttgaagcgacaacaagtgcttctgctaactctttagtctcaacctggttttgagaagcaaaatctaaatgttttagtacaaaaggtataaaggagcagaatttttcctagttgattcgaccaacacaacatataccttgatttttgaatcgagaggcaaccgcaatgaagcattcaacaaagcttcagttgtttccaatagtgaagttgagaattcatcttcaagaacagcccattgctccaaagaaggagtctgcatagagttaaaagtagtttaacaccaatttttacaaggaaactacacaattgctctaaacgttcataaatgtaaaaatagtgtgaaatctacgatatttaagatctttacttacttgtgactctacaatctccgtaacagctttaactctctgtaaatgttggagttctatgcgtttcctctgtacagaatcagacaactccgacattttcaaaccaagtgaataaaacattctctgcaagaaaaacaatttacagcatccataagatcaccatcatcaaacagaatctaacctaaacaacattcatcactaatactgaagttatgtgtcaaacattgatctatatgtaaaagctatcaaatttctgattctcagagctatagaaactgacctcagcttgtgctttctgagattgtgttttgacctcagcatttgcatttgcaaatcgccattgcaagtaacggttatggagcagtttcagagaatgcacatccgcttgttgtcctaaagctttcttctgcttctttgtatcggcttgaatcttcgaattaggagccaccggaggcaatgacaaaccaacaccatttttaagcgacaatgaagctctaacatctcgaaacatcgacgcatcatcggaactcagggatcgagaaagtggtgaggcggtgggagtgttaaaggcctttgcttgggttctaattgttggcaacagatctgggccgttggatttgaaaatctctctattgttgttatcttcttcaccgtctgtagaagatgataacgagatcccgcttgatcggagaagcctagtcgcagcggaggcagtgagtaaacgctgttggttcagccgcgatctagacggtggcggcaacatagccgtcgttggtgtgtcgagacggtgaccgttctctttcaacggcttagatcgaatatgctgcttagggtttttacctccgtcgacttgttgaagaggaaaaggcgagtctaagctacgcgccgtctcggaaggacgattctcgtctccctcttgcattttcaattgccgtctcatcctctgagccgaagtcgatctctgattctgatgttggtgatgatgtctaggagaatttgaagtcaattgatggagatctccggcggaagaagaggaagacgacgatgacgaagaagaaatgggagacatgaatctcgagctcacttctcttactctcggccgcctcgtagaaggaggaggaaccggcgccggagcattaatcgcaggtgtagatgggtgttccatggatcggccgattctcgcctccatttcaatcaaatttcttcgaaattgacaaaatcaccggagattccagatgccggagatttttttgttccgataagaaaacagaaattattcaaatcggattgaaattttcgaaaccctaggcgaagaggaagagaaaaggggaagaagaaggaaactagccgttgagtaaatgcttcacaaagcgcaacggttctcttcttgtccgtgaaacgataggttttttttttgtcttgctttctcgattaaattaaattaatcagataagataagcaagattaatgttttgaaaaaaaagataagcaggattaatgttggtgggcctattaatattgggcccaataaggagcgtttgtgttctttaaagtaatgggttataaatgtataaatgaaagttttgttggatcattttgcaattgttttaaccttccgacattttcctggatagactgaagaaaaaagttgggagtgaaaaagaggtgaaaagaggagactttgacttcttctgatgaactttcttctgcacttcttctcattaagcctccttgttaaaataatttgagatggcgataggaaacccagaagtagcaactatg

SEQ ID NO: 11725 - DNA, 3000 bp, Unknown; identical to SEQ ID NO: 11707
  misc_feature (1)..( 3000): cDNA_ID_2707226_gDNA_ID_2214512_Annot_ID_133876 3000 nt of promoter + ATG

SEQ ID NO: 11726 - DNA, 3000 bp, Unknown
  misc_feature (1)..( 3000): cDNA_ID_2711267_gDNA_ID_2214513_Annot_ID_133881 3000 nt of promoter + ATG
gaggaaggatttgaaccagatgagaggacgttggtgagtatgttgggtgcttgctcacatttgggtgatttgagaactggtagattgctggaggagatggccatcaccaagaagatcgggttaagcacgtttctggggtctaagttgatcagtatgtatggaaaatgtggtgatttggattctgccagaagggttttcaatcaaatgattaagaaggatcgtgttgcttggactgctatgatcactgtgtaagtcattgttcgacactgtattcagataaaagtatgattcttaaacccgttaatgaagctaaatttggactgttttggttgttctttatcagatactcacaaaatgggaagtcaagtgaggcttttaaactgttttttgagatggaaaaaaccggagtttcaccagacgcgggcacattgtctacagttctgtctgcttgtggttcagttggagctcttgaattaggcaaacaaattgagacccatgcatcagaactttccttgcaacataatatctatgtggccacaggactagtcgacatgtatggaaagtgcggacgggtagaggaagctctgagagtatttgaagctatgccagtgaaaaacgaagccacttggaacgctatgataaccgcttatgcgcatcaaggacacgctaaagaagctcttttgctgtttgatcgaatgtcagttcctccaagtgatataacattcataggagtgctctctgcttgtgtgcacgcgggtttggtccatcagggctgtcgatatttccatgagatgagttctatgttcgggttggtcccaaaaatcgagcattacacaaacataatcgatctcctgtctcgtgcggggatgttagacgaggcttgggagttcatggagaggtttcctgggaagcctgatgagatcatgttagcagcgatccttggagcatgtcataagagaaaagatgttgcgatcagagagaaggcgatgaggatgttgatggagatgaaagaggcgaagaacgcaggaaactatgtaatctcttctaatgttttagctgatatgaagatgtgggatgagtctgcgaagatgagggcgttgatgagagacagaggcgtcgttaagacaccaggatgcagctggattgagatcgagggtgagctaatggaatttcttgccggaagcgattatttacagtgtggcagggaagattccggttcgttatttgatttgttggtggaggagatgaagagggaaaggtatgaatttggttacattcacctgtgactttctcggagagtgcaagtctagtaaaatttgttgtaaaataaatttgaagttttattttgaatgtatatgaaacttaacactaacaattaaaattactttgaatctataatagttacgtctctctctagttattatttaatcattcagtaatcaatttttttctgttggtattgtaatcaccgattcttaaaattagtagagaaaggcaaaaaaaccgaacggaccagaaaagagaacattcgccaaaccaaccaacaaccgtttgggtgagcttgacgagaacgacgtcgcacccgccattttctccatccttgaagcaacaccttcttcacttcagatctcttcttcttcttcttcttcttcttcttcttcttctttgctcgcaccttccgtgctattgtatttctagggtttcggatcctgtgccttaccttagatccgacggtggagtagaaatcactctccctgtctcttcccttcttttttgtttccagtttttgattgaagatcccttcgtggatccactataatggcggattctcagccaatcacgcctggtcaggtacggtatctcctaactttgtttttttttgaagcttcagcgtcttcttaaatttcatttttttgctacggtttcaaggatttgaaatgaatagtttctgttgaacgagatttctactataatcgataggttgtggagtaattgaatttacaatttggattagtttactagagggatcaaattttgctagtgtcttcaaatgtagtagctttcaactttgaattttgaaaatgtttctcaccagagatttggtttggatgacctttcatatttctttaatgcaggtttcgtttctactcggagtcattcctgtcttcatagcatggatttactcagagtttctagagtataagaggtcttcattgcactctaaagtgtatgtatcaggactctaatttaaatggctctcttgttatatgtatctaacctcttagtaacctatacttcttacttgcagtcattcagataataatttggttgaacttggtgaggtaaaaaacaaggaagatgaaggagtagttttacttgaaggaggtcttccaagatcagtctctacaaagttttataactcacctatcaaaacaaacttgattaggtagttttactgatttcttcctttgtgtttttttgtttcttagagtggagtgttctttcaacaaacataaaccatttacgtttgtctacttgtagatttctgacgctggaagactctttcttgattgaaaatcgagcaaccttgagagcgatgtaagttccttaattttatcagaatggattcatactgttcttcattccctctcatgaccgtattacttcctttcagggctgagtttggggctattcttttttacttttatattagtgatcgaacaagcttgcttggagagtctaaaaaggtgcctcctttaaatctatgtgatggattcttttctcagtttcaactggtcatcaaaattctaaaaccatttatgtgttatatatagtgttatagcacagatgtcgttaatagtttagagatagaaatctaacatctgagtctaaaaatggttctgcaatttgtgacacttttttcgtatactttccattttgcagaattacaacagagatcttttcctctttctctactgtcttctcatcatagtttcagcc

SEQ ID NO: 11727 - DNA, 3000 bp, Unknown
  misc_feature (1)..( 3000): cDNA_ID_1807534_gDNA_ID_2214513_Annot_ID_133886 3000 nt of promoter + ATG
ttcaatagaaaaaagaaaaatgaaaatttaaatattcatggatgtttgaatacacacaattagaaactattcaacgcccatataaggcaattcaagattttcaattaaaaacttgctaaatctgcacccttgtgattctccacctccattactatatatgaccctcgttaggttcaatgaaaattctctacctccatctccattactaaaaacagagacatacaacaccaaaatcttcttcttcaccaacatattcactttcacagcaaaaaaaaacgagaggttctctcttattcgtaccgttttagcaaacaaatgggtcggagaaagatcaagatggagatggttcaggacatgaacacacgacaggttaccttttcaaaacggaggactggtttgttcaagaaggcgagcgagttagccacgctctgcaacgctgagttgggcatcgttgtcttttcaccaggaggcaagcctttctcctacgggaaaccgaatcttgattctgttgcagagcgattcatgagagaatatgatgattcagacagtggcgatgaagaaaaaagtggtaattacaggcctaaactgaagaggctgagtgaacgtctcgatttgctcaaccaagaggttgaagctgagaaggaacgaggcgagaagagtcaggagaagcttgaatctgctggggatgagagattcaaggagtccattgagacgcttaccctcgatgaactcaatgaatacaaagataggcttcagacagtccatggtaggattgaaggtcaagtcaatcacttgcaggcttcgtcttgcctcatgcttctctccagaaaatagctagaccgacttgttagagttacattctattttttgtatcagcctacagaacttaccaacacatgaaagttattgctggtgtagaattttctgtcatctatggggtgtgactttctatttgacatcaaatgaaaatgtacctggaaatttgtctgtattaatctcaagtgtacttgctaaacttgatcagctttttcgtcactctgcagtctggaatttttgtttcaaacagaatcgagacaataaaaagaaacagtaaaaccctttggcaaccactcaagaaactggttagtattcattgatctccaaatgcaatccacagaaacatgagtatcagtgaaagaatgatctcaaaaacgaaacagaaactcttaaatatcaccgatatacaaacccatcctagaaggcttagaacaatgtttctaatgtggtagaaactaaaaagtaatctattcagaatagtctgagtcggtctctgattcatcgtgggcacctgattcctgcaaaatagtaaaatgaaaagctcagactaatgttttatcaccgcatcagtgggacactgatgtgaataaatattaagcaaaaacaaggaaaaatgaagaacccactgatgtgaataaatattaagcaaaaacaaggaaaaatgaagaaaacggtggtaccattctcttggtatattctgtcattgctcggtgaaattcttccctcttctcagtagctatatcataatactttaccttttcctacaaaacagttgaggaacaaacaatctaggagtaagaaacttccgtcaaggtctcaaccaaagatatctaggtaagaagaataaaatgagatattgttcgccaaaaagaacaagactggcaacacctgactcattttagaacatatctatccaaccactatatatgctaacatgaaacctatttcattgcttttgtgagtcatcccaatgtcagatatcatacatttgactatgatttgaataacattatagaggagacttttagaagatagagacaatagactaactgggacagaaaagcgaaacccaaatgttacctcgtaagtcattgttttccatttctctccacatgtcttcccaatctgtacagaatgaagaacaaaacaactttagcaaaagaatcaaagtgaacataatagccaccatgttttactttgacatacaaaaccaacaaagtaatattctacaacctcgcgcatggacttgacatctggattctcctcttgatattgcttccggaaatcatccctttggagccaaaaagataagacaatatgaggcaagaggaaaatgaatacaacaagtgtttcttcgtatgttttctaaagtaaccagaacacataacaacataaataatcgcatcctaaagaccaatggcaaaatgcacacaaatttctacttaagagaagacttaaggaagtccagctgagcttaaatatttagataacaatttggaatcatatgagagagagtacctacaggaaaaagaagaaagcagtggcaggtttcttgggcatcttcgtttggagtttaacgggtttcttcttggggcttgtctttggctttctcaaaggctgaagtctcagtcttgtagacctccttgcaccttcacttgacttcacagccaactctaagttcctgccaagattttacaacacaattaacaaaaatctaactaacatcctctttccttgctcttcttctcacccatttgccattggatagcataaagttcacaactttcatatccaattccctatctaaccacttaatcagtaataaccagagagactaagcagaacccttaaaccctaaacagagaaatcaaagcaaaaccaggtgtaaaaagccaaacttgttctgtaacctatcaaagccagacacaaaacttaccgactagagcctccgctgcacgacggagacaaaggccctgacttgggagctctcttcgtcattttctctcactttctcggaatcgaactttcgttcgctgcctctttggggtttttccgtaattgcgtactgaaacagattgtcggagacctttgccacgtggcgtaatctaatcaacaaaaaaggcaaagatcaaaaatttacaatttaacaaaagttaacgtttgtggcagagaggttacacatcg

SEQ ID NO: 11728 - DNA, 3000 bp, Unknown
  misc_feature (1)..( 3000): cDNA_ID_1808663_gDNA_ID_2214513_Annot_ID_133887 3000 nt of promoter + ATG
taacactgtgacgataggtgtagtaaagtgttgatgtcgcaaagtaaacaattccgaaatttgatggcactatggttgccatgaagtcacccatgttttctcttagaaaaaatttgattcctagttttttattctctttttgtgtcaactgtcaaggtttcacactttcaattatataggttctagctactaaccaaagtttaagacctgattatttattttaatgatatttacaatttagccataaaagcaaagtacgtaaaaactgagaagatttactattattgtatatagttatcttatagtatagagagtatgtacagattgatatttctataaattaatcttagttttggtttaagttttggtttatggcttatggtttaagcctttggttaagttgtatataaacccccaattgtattattttctaaattaatgagaatgagatttaattgctaatatttacaatgcgaagaaaaatatatctgaagatgctgacatatgattttgacatatgtattgatttcttgtcaaacaattatgtttggataggagttgctgagcatcttgattaaacagtacaatttaatcatatacaagtccttttgtcatcgtcgagagtcttcatcaatggcgttggcgtgtcacaattatgcaatgaatgtgtgagatacacagtatgcaataacgaccttgattaccttttttttttttttttctttcttgcgctcgtgtttgcgtgtcctcatcacccactaatttacttcgttggatctcacaatgctactatagagtggattggacctatatatgtgtgtttgggctttgtcgtaacccacatctgtcttctgtcgttttgctttaaacagataaagtttggtagtttttcactttcatattttttggttaatgattttcactttcacccctcttcaaataaaatggttttttttttttttttttttttttcccgtatgtgtgtgtgcactatttggcctggtaaggatataatattgaaacttgctacaaaaatttgactagagagaaataataaaatgaggaggaggaaataaccaaatttcgggtgggctaagacttgattacaattaacagcccattgggcttttatgatatcagttttagaattagggtttttgggcagatgctcatttataaagaagaagaaccctagccgcttatatttggttgaggtttccaccgcattgtctctctccagacgaaaaatgggtgctttcagggtaagctctttgattccttgttgatttcaatgacactatttgctgctgattcaagtttcggactcgaagaaagaatctgatctaagctttgtctggtttcatttgcagtttcaccagtaccaggttgtgggaagagctctcccgacagagaaggatgtgcagcctaagatttacaggatgaagctctgggctacgaacgaggttcgtgccaagtccaagttctggttagtaatcatattctttctctctctcttttccatttttgttgctgctgagaatgatatgagcttgatctttaattagagtgtgttatttggattaggtatttcttgaggaagctcaagaaggtgaagaagagtaatggacagatgctcgccatcaacgaggtacttgttcatttgtgaaatgacgcaatctcgtttgacttcttatatcttattgagttaggcacttagattcatttatctggaaagtgaatgtatttgcttgactagaacactagggttttgattgatcacgtttgcgtctttgtttaacctataaatgcagagtcttttgtttgcctgactattatacaatacttttatgtaactttcaaatagcctgatcatgcaaatctctcatggctttgaatctatttgtatcatacttctaattttgctgattctgataatttctttgtctgttagtctaggttaatacttttcatttgctgtctgtcatcaaatgagaaaacttagattcaccaaagtctcttacttgattctctcgacttgctattgaatcgaaattgaaaccatatcacgtttttatcatgagtttatattgtttgattgctccttggcccctctcttgactaatgtaatctattaccaaattgtttgcacagatctatgagaagaacccaacaacgatcaagaacttcggtatttggttgaggtaccagagtagaactgggtaccacaacatgtacaaggagtaccgtgacaccactcttaacggagctgttgagcagatgtacactgagatggcatcccgtcaccgtgtcagattcccttgcattcagatcatcaagacagccactgtcccagccaagctgtgcaagagagagagcactaaacagttccacaacagcaagatcaagttcccattggtgttccgcaaggttagaccaccaagcaggaagctgaagacgacttacaaggccaacaagcccaacttgttcatgtaaaacgtctctgattgactcttttttggggtggaatcgatgttgaagctgtgctctctcccgttttggattttatcggttatttttgtttttcaatatgttaggcgtactcatgaatgtgaactcgactttgtctggattttatgcttcttgtttcctacttatgaaaaaacctttcccttaattcctatattttgtgctctttattgtgttaacaaccatcgcttctttaaagtgaaagattttaagtcttggactgtgataccaacttggtgtcagttaaaatacgtttcctctactgtaattttgccttcaaacacttaacatatgacaggggtattacagtcattttatgctcccgacagagaaagcatctcctttcacttaggatagaaaaatatagaaagattcttacattaaaaactgtgcttaatgatcccagaatcccagtagtagctctactcaaagtcaacacagctaccggaagaagattcgagtctctcggaaatg

SEQ ID NO: 11729 - DNA, 3000 bp, Unknown
  misc_feature (1)..( 3000): cDNA_ID_2685989_gDNA_ID_2214513_Annot_ID_133888 3000 nt of promoter + ATG
tggcctcgctgctaactacctcatcggcaaattcatcatctacatcagagacacagagctttctcatcaaatattctccaacgttcgtcttgaagcttttcaccctctaggacatccttttggcaaacaactattcggtgatcatagcctaatctacttgtttggtgaggatcacaaaactgttcgccgtcaccttgctcctaacttcacccccaaggcactctccacttactctgatctccaacaaatagttatgctccgtcatctacgacagtgggaggaaagtttctccggcggaactaagccggtttctatgcgagaccttgtccgtgaactcaatcttgagacttctcaaacggttttcgttggaccctaccttgacaaggaagctaggaacacgttctgtactgattacaatctgttcaatctcggatctatggcgctcccgatcaacctgcccggctttgcgttcaacaaggctcgccgggcggtaatgaacctggagaagacgctctccgtctgtgcgggaaaatccaaaaagaggatggctacaggagaggagccaacatgcttaatcgatttttggatgcatgcattcgtcacggagatagaatccggtaatccaccgccgcttcactccgaagacgaagccatcggcggtttgctcttcgattttctctttgccgcacaagacgcgtcgacgtcatcactcctttgggcggtgacgtttctagaatctcatccgaaagtgctgagcaaagtgagggaggaagtggccaagatttggtcacctcagtctggccatctgatcacggccgatcagctcgcggagatgaagtatactcgcgctgtggcacgtgaggtggtgagatatcgaccaccggcaactatggtcccacacattgctactaatgatttccctcttacagaatcgtacactatcccaaaaggtacaatagtgtttccctcggttttcgacgcctcgtttcaagggtttactgaaccgaaccggttcgatccggaccggtttagtgagacaaggcaagaggatcaagtgttcaaacgaaactacctagcttttggatggggtgcacaccaatgcgtaggccagcgttacgcattgaaccacctcgtgctcttcatcgctatgttctcatcgttgtttgatttcaagagacttcaatcggacggttgcgatgacatcatatactgtcccacgatatcgccaaaggacgggtgcacggtgttcttgtctaagcgcatcgtaacgtatccgaacctctgatttggatttttgttacaaattattggtgatcaaagtcaatactcatgagtgtgattactattattgttgttcgtgatcgtgatgtgtctcgtgaggtgagttccactagagcgttatgtcttgttgaatttgagaagtcattgttttgccattaatctgtactgtcttattttgtttggaccccagtgattctataacgtgtttcatgtattttatgtcattttctctatttttcgattcaaatagagataacaatatcgcctcgtggtatataacgacagaaagccaaaaccgtaaaagaattcacacattctcggtattattgtacatttggatcgttaagatatactaatatacatatacaaccctatagttcctgttagatttttacatttcattttcttatttacatttttgtaagataattaatattaatattttatctatacgattagcaagataaaataacactgtgacgataggtgtagtaaagtgttgatgtcgcaaagtaaacaattccgaaatttgatggcactatggttgccatgaagtcacccatgttttctcttagaaaaaatttgattcctagttttttattctctttttgtgtcaactgtcaaggtttcacactttcaattatataggttctagctactaaccaaagtttaagacctgattatttattttaatgatatttacaatttagccataaaagcaaagtacgtaaaaactgagaagatttactattattgtatatagttatcttatagtatagagagtatgtacagattgatatttctataaattaatcttagttttggtttaagttttggtttatggcttatggtttaagcctttggttaagttgtatataaacccccaattgtattattttctaaattaatgagaatgagatttaattgctaatatttacaatgcgaagaaaaatatatctgaagatgctgacatatgattttgacatatgtattgatttcttgtcaaacaattatgtttggataggagttgctgagcatcttgattaaacagtacaatttaatcatatacaagtccttttgtcatcgtcgagagtcttcatcaatggcgttggcgtgtcacaattatgcaatgaatgtgtgagatacacagtatgcaataacgaccttgattaccttttttttttttttttctttcttgcgctcgtgtttgcgtgtcctcatcacccactaatttacttcgttggatctcacaatgctactatagagtggattggacctatatatgtgtgtttgggctttgtcgtaacccacatctgtcttctgtcgttttgctttaaacagataaagtttggtagtttttcactttcatattttttggttaatgattttcactttcacccctcttcaaataaaatggttttttttttttttttttttttttcccgtatgtgtgtgtgcactatttggcctggtaaggatataatattgaaacttgctacaaaaatttgactagagagaaataataaaatgaggaggaggaaataaccaaatttcgggtgggctaagacttgattacaattaacagcccattgggcttttatgatatcagttttagaattagggtttttgggcagatgctcatttataaagaagaagaaccctagccgcttatatttggttgaggtttccaccgcattgtctctctccagacgaaaaatg

SEQ ID NO: 11730 - DNA, 3000 bp, Unknown
  misc_feature (1)..( 3000): cDNA_ID_2994343_gDNA_ID_2214513_Annot_ID_133891 3000 nt of promoter + ATG
aaagaagcaaaaggagctgagctattgaaaaaggcattggagaaagcaagaaaagaagggaaaggtcatgaggcttatgagattgagatgttgcttgtggagatgttgatctacttggtttgctttctgaatttcctttctcatatatatgaatttttttcaccatctttataataaatttatttctttgtaatagggaaacatggaagaggcttcaaaatgtaagtgtttagaggatgaagtcataacagatgcaagacgtcctctatatcaggcaagtcatatacatagtaatccttaattccatttttttacttattgttgtgaccaatgtcgttttatctctcagactataatccattaccttcaaggtcatcctatgaagcaagtcgaggagacattcaacaggttcagagagattcaaattggtctacaatggcctggaagctcagaagaatgtgaaattgaccaagtcacatttgatgagttcaagaaagttatggaatctctcaagcatgaaatcgaagacggcaacaaaagaaagttgaagttagtcaaagataaaactatgagagatagtcttcattaatttcaagcaatattagtgtgttattattcaagaatgatcataagatttggtacataaataatgatactcttgacaaaatacatcaaactagacccaaaaaaacatttaatatacttatatacatgtatcattttcatgatgaaacaaatttgaatgtatgctgaaaaatgttatcaagtaaggatgtaatcttttgccaaaaatagtaaggatataaaatgtatcactgaaatgaatcaaaacgatattggcacaatggtttaagaaaaataaaagtcttattaaagtagacgagctcttagtgggccgattagaattggaaaaaggcccaatcattgtctcgagtagaagtgattgtgaatctgaaatttgctttcttctcacagagaaccctaaaaccatttccgcggcggcgtttctcggaatcaatggcgagtctccgaagagtcctgctcaacgtaacttcctattgccaacgttctctcactcaatcgtcgtattctacgtcggggatgttatcccgatcggtggtcaagcatgcgaacaatctcggtcaaattcaagctagacatttcacgacaacgcttatgaaatcgggaccaaagcatagtggtacagagcaaggcgtgaagcgaaacagtgcagatcacagacgtagattgctcgcggctagatttgaactgagaagaaagctatacaaagcgttttgcaaagatccagatcttcccagcgaaatgcgagacaagaatcgttataagctctcgaaattgccgagaaacagtgcctttgcgagaatcaggaacagatgtgtgttcactggtcgatctcgttctgtgactgagctgttccgtgtttctcgaatcgttttccgtggattagcatctaaaggtgctttgatggggataacgaaatcgtcttggtagctgcattatgtgactgatctatgtaagtgtttttgattctccttatttttctgtgtttgcttagttacttagatgatgatgatgatgatgaatgaatgatggtttgtttcagggaagaagctgattctgaagaaatgggagcaaggaatacaaagaacgtttgtggtaaatacagttaccaaagtagctgtttgtatgatggtggtggaaacattttgacaccatcacaaaacttagtttgcttttcactagtgatgctctctctttgttttacgatcttgctcagctattctagcaattctcgttgaataagttatacaaagtcacaaatcttgcttcttttttatgatctcgattttgtagtttattgtagcaattgtggttgaattaagtatgttatagacaactcatagagtcatagacttggtgtctgatgcattgttaagtagacggttataagcaagcagcttaggagcaatttagatgggacttttatgctgaggaagtaggtggtaactctgtgaaaaggagggaaaactcactaaactaaaacatcaaaacgtagtagtttcatatgaaatcaacccccatattatatgctaatgtgccatttgggatggtcaaccaaaatctaactagaagtaagcaacactttagattgacaaggtattgtatagtaaggtgaaagcattcagcatctaagcttgagaaagcggacatcatctatgatcaaccatcgtttaaggttagtgacagaatccatgtcagacttttaacatatctttacatatgcatccatgttagggttgacggctttgactgaaaacatttatgcaaagaaataatggcaacaatcataatgtttgtgtaacataatacaatagtagcacttaggtacttgtgctttgtttttcacattgttgaaattcttgattgcttcttgaaacacttattcacattgccattgagtgtctctgaatctaaaaccagcccatttcttcaaaaatctaaaagatgtctttttcctcgatctccaaaagatattgcaacaatccctccccacttgttcttttcgtctacacagctctacccttggactgatataaagagtaaaaacaagttggctatttcttacaaataaaaagaaagaaaagaaaagtggttattggtccatattagataaatgagtaagagagaacctagtaaaccactgccgtagagaccaatgactacgaccaccacgcggtttgtgatgaagagggtcccaaaatggatacacttctctacctattttttaacatatcctacaaaatctcaatggtttttatttagttcgataaagtattattccgaatgtaaatagtggaacaaaaagaacagctgggaggattttgtttaaaaggacactacacttcccagctttccctcactgcccgaaaagaacactgcagaaacactttcctctgttcacagagaaagagagagatg

SEQ ID NO: 11731 - DNA, 3000 bp, Unknown
  misc_feature (1)..( 3000): cDNA_ID_2707298_gDNA_ID_2214513_Annot_ID_133902 3000 nt of promoter + ATG
ataaaaaatcaattgcatgcttgttatcttcttcaattaggttgcataaaatggtaaatagcctaaatgttagaccactatacacgatctttttttaatgaaagatacactctacacactaatctctaactttgaataacaaataaatttatggggaaaaaaaaagcgcgatgatgcaagaatagtcgagaaattagccaaattaagataatcataacacttgtacgatgaattctagaccagccgccaatgtgtgagctcatatgaatttcgctaatgccacgttatacaaaacttaaccaacaagctgatagtcaatccaaattttctatgattacaatatgatgtataaacatattttggcttcttatgatgatagaaaaaaattaattaaatgtctggcttagtaatgaattttatttgctgacgacccaaaaatttgacggatttgtcgagaactgcaacaattcatggaaaaatgactgtaataatagaggtttgaaagattaaaataaaaacccattcgagttttactttcactccggataaagaaacagataaactcacatcaatgatcaatccttttgattgaatcttcaaattttatttttatatatgtaaaatttgaatcattaggtgatgcaacaaaataaacttcacttttttatagatacgtggaagcaaatctatcatatatatgttgttttgattttactttgttgtgctgtcaaagcgtggtacattatttttcttatattgtacatatcaaaggtacctaatgtaatgtataaatataagaaaaataaaaatttacggattcctgttgttgtcacaaggttacgtgttgacgttatgcggtactaagcctctgtaccttgacctaaaataattttccgatttgcttatatcacccgatatcgacaataattttaattttgtaattatcttaatacaaacattaaatgtaatgtacattttccaggtaaacaaaaagaaaatcattgaataatacttgcagaagacgattggtatttccacgtaactcaacatgaaacgacaaataccgaatcgtggcaggatccgcaagtaagatatagtagttgaaacaagggtaaaatgggaaattcacacactcaataattcaaacttacgatcacaatataaatagctccaaccatgaccaatccaaagatcatacacacgagacctcaagtcctcaaggttcaatttttcaaatccaatgcccaacttatcaggagctatccctgaaaatgacagaaatgccctcgtacgttgtcgaaacccccctcttcgagccttacaagcccaagaaacaatacaaattgtactcttcgttgctcccgatcatcttatctatcttcacctacattttgatcttccacgttctcgacgtgtctcctttgtcgatcttcaacgacacgaagatcttgttcgtcatctccaacgcacttatcatcatcattgccgccgattacggtgcattcactgacaaagagaacctcgatttttacggagaatacacagccgcgatgagaagggatgcacaagaaaaccctagaccggaaaagtcggtctatggggtgagtatggcggaagaaaccaagaaccgtgagaaacaagaaggaccagtgggagcgagagacttacaagatcagtatttgcctaacaagaaagcgaaagttactgagagaatcatacaagccgtgagcaagaaccaaccgagaaacaaagccattgaaaagtgtgagccagtgactgagcaaaatgttcatataatagctgcaaaagaagaaacttgcaacgcaagcaatctgatgaactctaaagcctacgggcgaagcaaatcggataaggctcgtgggtcagtgatatccaaggaacgtcgtcgtcaagagatcaaacatagacataaaagttacgatcggagtcaatcggatagctcgaaatggatggttgttcacaaggggaagaaggctgacgaggagatggaggaggcgacgaagaagtgggagaatgtaaaagaagagtcggaggagttctcgaagatgtcgaacgaggagttgaacagacgagtcgaagatttcatccaacggttcaatcgagatatcaaacgacaaatttagtttaatgtaatttgttgttgtaccaatacggcaaatttagtcaacctttttgtgtcgtttccttccctttttttcttttgtcattcttgcatcttgtttattagagttggtaatgagatcatggagatattaatcgttagtttaatttcaagggttaaaataaataaaaatttaaaagtaaaaattgttgcgacttttttaaatcgatggaaactgattcaaaaacaaatttactttacagaatctctcggtatttcagacagatcacactagtacattagataaagcgttggatcgaatcctcgtatatgttcaaagaacagttaaaatgagttacatgagtctttgttgttgttgttgactaaatttgccgtataggtacacctcaatttcggcactcttctctcggatccttccatggtatgattctgttttttctcgtgacttgcgtgtttagatgctcaccattggagctcgctaactgcaattcctatatgttgattttgaaacttgtatcatccacttttgatttgattctagaatgttattagcttgagcaaagcaaaatcaattctgaggaagagactcatcagacgaacaactatctagagaagatcaaacattagaacactgatgacgaattgtaacctcaaatgagccaatcattgcacaagaggagtgccacgtgtttggatgtgtgttttggattatccaaactacaaaaaagggaaacactatctaatctcaccaatcacaaaagagaatagtgccacgtggaaaacaaccaccttaccttcacacttcttcttcttctccttcggcagaccatccaaaggccacatcatctctttccacc

SEQ ID NO: 11732 - DNA, 3000 bp, Unknown
  misc_feature (1)..( 3000): cDNA_ID_1832288_gDNA_ID_2214513_Annot_ID_133904 3000 nt of promoter + ATG
tcatacacttactaaacacaaatatcaattgtcactcacagcgtacgtgatgatatgaagaagagttttctcaaggtagctatttatgtttgtaatgtcaactaacatgatgctattatgaccgaagctcttcctcaagatattttcattctctattcagtcgaatttcgtcagtttcatcaccctcaagacatttcgattgaatagcttgtaatgacgtgttataagcaagagtacacatagttgctcgaggttggtagagcaacttagaacattgttagctacacttgttcagtgactagcacggaattgtatatagaaaactgcccacacgttactaaattaatgaaaaatatcctttcacacaaatgcttgttgatatctatctctggtctagctttaaacttgatatttgtctcattaccacacaaaaacaagggaacatagtaggtgatcgggtatatctatatatatgtacattaaataacaattttttgtatcatcggaccaagcttgtgacggtgaacaattgaaatgaatggagtatagaataattgtgattaataattgaaaacacataaaataacatgatttgttagatcttgattaatactataatagaaagaagagaagtgtgacaacacatgggatgtacccaacaacacaagggacagcttcaccagtctgatttatgccactgtcccgttcttgtcctccctctgccccaccactcctttgttttatttcatcagtaataatactactaattttagttagtgtttagattaatcataatgcaataaacaaagaaaaatatctgatttttggtagaaaaacataccagcagctcatatactattagttcatatttttaaccgatagttgattgttaaaaagaatgttgattcaagaattttgtaagaattgcaacattgttgaacaacagtggcaaaacataccataaactaatagatactagtaactatgatcactgatcaaataatgtataaatcggagattattctatgtaacatttaacaaaagtgtattacaagtaaataaagaataaactttttaagttacgaatggtaaaaaactaaagaaatttgttagttctctgtttgtatgcatgcattgtctctctgctaaaatgttcatgacaagtccacatctactcaaatactcatcgaggtgattatcctcgtcgtcgcttttatacacatgtaatattacacacatctatacatggagtatatttttagcgaacggataggtgccatgtggaggtaagtacacgtcgccacttgtgagattctgttccaattacttgtggaagtgaattatgtcgcagaaaaagtttgacgagatttccaattagccactcatttattaacggtcaccaaaagcatcaaattacagttttttttagtgctttgagattcttttccctgacatattgttttatgtaaaatagcaaactcgaaaagatagtaatagtatccaaattattattattacagtattatttttgataaaaggttgttattctttttttatttttttatttattgtatctattatataattcgaaactgctatattgtttgtctttagtttgcatctctagctttatatatgcttatgaagtttcaaatgttgctattatatgctgctgattctttttttcttatgtaggagtataggtttgaccgtttgacaatacgagaggaagaggaagttgggaaaaaacgacgccgcatggatagtctcgctcgttgcacgaatagttcaaaaggtgacgttaggcgcgtgcgggtcagcgaaacttgtgcctagtcagacctttgtggtatagtcttacgtggtctacgtctgccaaatttcagaaaaccaaaaaaacaattatatgtttggtccctagaaataaatattatcgtcgtttagcaagtttgaagtaagcaatagtagtattaatgtataaaaagtgtaggatattaggttaaaataggcctgtgatagataccgtaatgtctatgatgtgtctggtcagacccatttaatattggttcagaccatattagcacattagccaattgccattcacgttgggtccaaaccttcttccttctatagtgtcttagacaagtacgtacacacgctgaagtacaaatcatatacaagtatttattcacttaaaggtacaatgattgatgttttttgtgtaacatgttcctctagtccactatattaatccattacggagagaactatctaaaaattgtataatcgcaattgtaaattgcaaatctattaacaaaactaagatgtgttcacatgcatacttcgataaacattcttccatatatcttttgtgttaaggcatgttttaaatgatcaaatcacatattgattttatttgaaagtatatcaatataataaactgtttagaagatgttttgccaaaaaagaaaaagatgttttgttcttcttggaagtgtttgttaaagcccaagagagacttcaagctcacaatttctcaaagatccattaatactgggccttagttagatataccaagcccatatactttctcttcacaaattcccgttctaataccggcgcgtcgtgaaatctagagattttgccgtcaccagaatatgttaataaacgcaggaggagataaatggataaacccaaaaactgacaagtgaaaaccttttgaagccaaaacccccttcaaaatcaagctccatgatagaaaaccctcttcctacataatctcctggtaaaacaaaaaggttagtctttttctcctcaacttcgagtgtgaagcgtttgtaaaaatgcccaaaaaaatcgtaccttgttatggacaatttgttgtatcaggttcttcttatctgggttttatgttttgtactagtttgaaactgattctgagcataattgaatcggttgtttttgtaaatgatacagtgagaagtagaaagagtgtaaatg

SEQ ID NO: 11733 - DNA, 3000 bp, Unknown
  misc_feature (1)..( 3000): cDNA_ID_1832291_gDNA_ID_2214513_Annot_ID_184355 3000 nt of promoter + ATG
caaatcctaaccataacaacagctaatgttgaaaacaaatatcaattcatctttgatgagtggagtggagccacgtaaatcttactgcatgattcagccaacttctagagtaaaattatatggaagacatcaaattggatcatatagcatcacatggaaacaagcattagaacatagccaggccgacttaaaacagagatttcttataattggtgtcgtttatataaaaaaaaaaatcaatgaacatttacattttcatggagttatttgcatttgtctttgaagtataaaccaaacaaaattcattaattagttttccaatttatgtttggacccaaaagctgtcgcgtcagaaaaaaggacccacagttcctaaatgttgccgcctgtcctcctcacatcctatgcttttatttattacactgttttagttaatctcttcatatctttcttactctctatatgattcattgattctatctttaatattctgtttttttaatcacaagttaaggtttttgtgaccaatacacatcatcctctgtctaatcgttacgattataaaactaaaacggattgaatcatcatttagcttattgttaaaaaaaagattcgagggagaaataataattggagtaaggtgggaactagtccgtacaaaacatggaccccacgaaatatatagtacgtacaagacacagaagtaagtcattccgatgtagttttagtaattggtacaagattgggatatagttaaactagttaccaaacacttggctaagagagagtttgagaagatacagaagtaacgggaacagttattgtctttaggaaccaacgaggaagggaatatctctctgggtttatttaaccataagtccagaggtcagttctgttttgtctctttgccaatttagctggcacaattacgactttgtccctcttccaccaaacatctcatgcatttttctccttatttccttcttttttctccaaacttctttctcttaagtttccaaaatacttaagagaataactgaatatagtcacagtcaaatatgttaatgtttgattcagattctttaatttaaaactaaacctagggacacttatcttaacctagggacacattaattttgaaaaacgtgttctaaggttagctaaggagagggccatgcagatatatatgcgccaaatgaatcataagcggtgggcatatttatgtctgtcctttttatggcttatgaaacaaagttaaagctatatattgtgcatgaaacttaggctacgtttcccctctattttccattcattttgaactcaacatttgcaagtgttaaccacacttcttctaactgttgtgattcgtttattctagccatttcacagattgaggctagtataagtattctagagtacattatatgaatacgtctcaaacttttactgtataaacaaaacagttttccaaccgcgaacagaggttggattagagcaactcatggaaaagataaatcggagatgaaaaaagttgtcacagtggtcaatccacaatgatatgagagtaggacaagtaggttcattcccgtataattatataatacaatatgttatagtagcccaaacattataggaggtggagctaaaacaaaacaaaaattagcgagaggagatctccaattgacaataattgaatcaaccaaaacctaacctaacataaaaacaatatcttggattcaaatccaaagcttggaacgtaacgtaacatgaagccacagaaagccaacaacatcctagtatataggttgggtcccttccagcatttgtatcatctttattaatgatcattaggtatgttcatagtcggtataaatatatagggtccgcacaaactggtacacttttttaatggcaaacatagtggtacgaattgatagtaattaagtgtgttttggtcaatagctagtttttttggggttttcaaagattatatatccgtgaccatgagttctctagttcaactctcactcacgagaaagacaaatgaaagaacatactgtactagtttttgtctaaaagtactctttgattaacctttagaaaattgatgttatcattaaacaaaaaaaatagtttcactatctcttcctataaccttttttacgggctcattgaataattacatatcttttagtacattttgtaccaagacgatataacattaccaatcatcttgaattagccagaaacaacaaactaaaactgtttaagtttcagaaactaatccatatataatgttgagattagttagtattcataacctatggagtattaatcttcaaaattttcctcatgaaatctgtatttagtcatcacttttttaacacagatgaatcactagtccaatatttctccaaaaaaagacacaagagtctcgaaattgtaatccatatctgtaattttgcacccctataatatgcctagaggaaataagaagaaaaaataatggggaaaaagagaagctactgctacactttcaggcacgtgacaacgtctcacacgtgtcatatatcttacgtcatcaagtcctctttttctctctttcacttttctgtttacctctctcacgcgttgaaaagtgcaatcaatcttacataattaaccacagtaagaaaaaaaaaaaatggtctctgtaacgtctttttactgttataaccttacacgcataaatacccctcaccaactctctctgtctcgcctctctctaaaactccaacacttctccttcttccatctctctcaaacttctgaaaatcttcttcttcttctcaatcataaaccctaaatcttcatctcttcagatcagaaactaatgtccattcaaagacaccctgtcctgtttcatctctgtcattagtcttctgttttcagattccaattttttttcttgaattatcctcttagccatttcttgatttaacttcgattttcccggcgatg

SEQ ID NO: 11734 - DNA, 3000 bp, Unknown; identical to SEQ ID NO: 11731
  misc_feature (1)..( 3000): cDNA_ID_2707298_gDNA_ID_2214513_Annot_ID_184352 3000 nt of promoter + ATG

SEQ ID NO: 11735 - DNA, 3000 bp, Unknown
  misc_feature (1)..( 3000): cDNA_ID_3022740_gDNA_ID_2214513_Annot_ID_184342 3000 nt of promoter + ATG
taaaataccagcaatattaaaatttcaacaagagccatctgcacgttgaagttggcctcaggctcgtttctgtatcgcatgtttgcgtcacgaaggagctgcaccgcctcttcacattttccttccttcatcttccgtaccgcctccatctatatttcccacaattttaatttcattgagttttttttttcatttaaactgatttgaatatatgtatatatgaaggtaaataccgaatttaaataagaggaagtaacatatataagaaaagcaaaaccgaataatccagctgtttgtagtggttcaacaatactcctagctagtcttaaaggatcaagatctcacgtgacactaaactatttgaacaaatatttatatgtttgcagattgtaccttgatggagtcaatatcgtcctttgaaggcaaagaagggagcttgtgaagattgaatggtttttgagaaggaatgggtttagccgaagcaagcattgagctaacttcaaagagagaccgcaatgcgaatttagctgggaaaggatagataccggaagtagcggatgcggctgaagtcggcttcccggatatgatcatgtcggcagagcttggataggcagctgccgcggcagtgtagctcatattatttatcttaaagccaaagatacttatggcgcaagctagtgctagggatgctcccgccgccattttcaatggccttaattgctttttatcatcgtgagaatcattcttgctgtttgatttggcgaccgtgattggtgatctgatgatcaaacggcggctttgacctccattggaggggaaaccaatatatatgttttggaatctaagagttggtttatgtgtggaagtgaaatgagataaaggaagggtgagtttttgagtatggccttgaagaaatgtagaagccatttttcttcctatgagttaataaaattggatttttattgcattggttgatctttgtgttagggattggttcttaaatttttagtttccccatagacaatttgagagttttagacttttaggtgtgtgaaggaaagcatcaatttgttacttcagacaaaagaaacttcaatttgaaaaaggcatcaaatgttttgcataaacaaacagtactgttttggtatcctttctttttcgaattacatgacaaatgctttctctattggaaatattctttgttcaatgtgtctcctctattaaagtatattaacttctttacctatgatgcaagactaacattagaataacttgaatgctttcatcttccatttgcaatccaattattgtgtataaaagaaagtttcgagaaggattaaaaaaaaaaatcattccaatagataatttaggtaagtatatggtgaatcagtccaagaacaagtttagcatgaaaaccaagtatggagcagcagttgcacctgtattcctccttgctgctgcatatgtcgcttggaactacataaatcgtggtttatggagaaagaaagacgatgaaaatggtcgagatacaagaaaaagcatcggtaaaaacatttcagaacaaagaagagatggtaatgttaaaaacatgggtaaggaggcttcttcaggaagagatgaaagaaccctctcaaaatctgtttcaatgggagctattcgaggaggaaaattagcactacagagattgcttgatttgcactcataccgcggtgacacttcttcccttgcgaatgctgaactcgaatttgaagcattgctttccaaggaaaagccggacttcgggttgcttcaggttgttcatatatagaaacttttttgctctttcggatcaaattgcatttagttaatttcttctccctcatgcagagagacattgtaaaaatggaaatgagtggaaaagaagcaaaaggagctgagctattgaaaaaggcattggagaaagcaagaaaagaagggaaaggtcatgaggcttatgagattgagatgttgcttgtggagatgttgatctacttggtttgctttctgaatttcctttctcatatatatgaatttttttcaccatctttataataaatttatttctttgtaatagggaaacatggaagaggcttcaaaatgtaagtgtttagaggatgaagtcataacagatgcaagacgtcctctatatcaggcaagtcatatacatagtaatccttaattccatttttttacttattgttgtgaccaatgtcgttttatctctcagactataatccattaccttcaaggtcatcctatgaagcaagtcgaggagacattcaacaggttcagagagattcaaattggtctacaatggcctggaagctcagaagaatgtgaaattgaccaagtcacatttgatgagttcaagaaagttatggaatctctcaagcatgaaatcgaagacggcaacaaaagaaagttgaagttagtcaaagataaaactatgagagatagtcttcattaatttcaagcaatattagtgtgttattattcaagaatgatcataagatttggtacataaataatgatactcttgacaaaatacatcaaactagacccaaaaaaacatttaatatacttatatacatgtatcattttcatgatgaaacaaatttgaatgtatgctgaaaaatgttatcaagtaaggatgtaatcttttgccaaaaatagtaaggatataaaatgtatcactgaaatgaatcaaaacgatattggcacaatggtttaagaaaaataaaagtcttattaaagtagacgagctcttagtgggccgattagaattggaaaaaggcccaatcattgtctcgagtagaagtgattgtgaatctgaaatttgctttcttctcacagagaaccctaaaaccatttccgcggcggcgtttctcggaatcaatggcgagtctccgaagagtcctgctcaacgtaacttcctattgccaacgttctctcactcaatcgtcgtattctacgtcggggatg

SEQ ID NO: 11736 - DNA, 3000 bp, Unknown
  misc_feature (1)..( 3000): cDNA_ID_3022748_gDNA_ID_2214513_Annot_ID_184339 3000 nt of promoter + ATG
tttggattccaatcttcctaaatctttttcttatatagtagccttgtttgttttttttacttcgctacacttgtgtatgtattacttcttgtaaagcatattttcattattaataatatttacatgtttagaaaaaaaaaacatcaagttggttacaccaaccatatatattttcacgtatgtatcagacaaattactaattacagtggaaactgtattaacaatcatagcttttatatatatagcctttatgtaatttttggttttcatgttaaaataagccaggccctaagagagtgtcatacccttatatattgtttactgcatattcacaaaactcaaatacagagcagaaacctttaagagaagatctaataagaaagaagaggaaaaaaaaggatggttttctcagtttccatttttgcctctctcgctccgtacttagtctctgcgttactactcttctttctcatcgagcagctctcttacctcgtcaagaaacgtaacctccctggtcctctctttgtccctccgatcatcggaaacgccatttcactcgtccgtgatcctacttccttctggttcaagcaatccgacacggcaggcacttcccctggcctcgctgctaactacctcatcggcaaattcatcatctacatcagagacacagagctttctcatcaaatattctccaacgttcgtcttgaagcttttcaccctctaggacatccttttggcaaacaactattcggtgatcatagcctaatctacttgtttggtgaggatcacaaaactgttcgccgtcaccttgctcctaacttcacccccaaggcactctccacttactctgatctccaacaaatagttatgctccgtcatctacgacagtgggaggaaagtttctccggcggaactaagccggtttctatgcgagaccttgtccgtgaactcaatcttgagacttctcaaacggttttcgttggaccctaccttgacaaggaagctaggaacacgttctgtactgattacaatctgttcaatctcggatctatggcgctcccgatcaacctgcccggctttgcgttcaacaaggctcgccgggcggtaatgaacctggagaagacgctctccgtctgtgcgggaaaatccaaaaagaggatggctacaggagaggagccaacatgcttaatcgatttttggatgcatgcattcgtcacggagatagaatccggtaatccaccgccgcttcactccgaagacgaagccatcggcggtttgctcttcgattttctctttgccgcacaagacgcgtcgacgtcatcactcctttgggcggtgacgtttctagaatctcatccgaaagtgctgagcaaagtgagggaggaagtggccaagatttggtcacctcagtctggccatctgatcacggccgatcagctcgcggagatgaagtatactcgcgctgtggcacgtgaggtggtgagatatcgaccaccggcaactatggtcccacacattgctactaatgatttccctcttacagaatcgtacactatcccaaaaggtacaatagtgtttccctcggttttcgacgcctcgtttcaagggtttactgaaccgaaccggttcgatccggaccggtttagtgagacaaggcaagaggatcaagtgttcaaacgaaactacctagcttttggatggggtgcacaccaatgcgtaggccagcgttacgcattgaaccacctcgtgctcttcatcgctatgttctcatcgttgtttgatttcaagagacttcaatcggacggttgcgatgacatcatatactgtcccacgatatcgccaaaggacgggtgcacggtgttcttgtctaagcgcatcgtaacgtatccgaacctctgatttggatttttgttacaaattattggtgatcaaagtcaatactcatgagtgtgattactattattgttgttcgtgatcgtgatgtgtctcgtgaggtgagttccactagagcgttatgtcttgttgaatttgagaagtcattgttttgccattaatctgtactgtcttattttgtttggaccccagtgattctataacgtgtttcatgtattttatgtcattttctctatttttcgattcaaatagagataacaatatcgcctcgtggtatataacgacagaaagccaaaaccgtaaaagaattcacacattctcggtattattgtacatttggatcgttaagatatactaatatacatatacaaccctatagttcctgttagatttttacatttcattttcttatttacatttttgtaagataattaatattaatattttatctatacgattagcaagataaaataacactgtgacgataggtgtagtaaagtgttgatgtcgcaaagtaaacaattccgaaatttgatggcactatggttgccatgaagtcacccatgttttctcttagaaaaaatttgattcctagttttttattctctttttgtgtcaactgtcaaggtttcacactttcaattatataggttctagctactaaccaaagtttaagacctgattatttattttaatgatatttacaatttagccataaaagcaaagtacgtaaaaactgagaagatttactattattgtatatagttatcttatagtatagagagtatgtacagattgatatttctataaattaatcttagttttggtttaagttttggtttatggcttatggtttaagcctttggttaagttgtatataaacccccaattgtattattttctaaattaatgagaatgagatttaattgctaatatttacaatgcgaagaaaaatatatctgaagatgctgacatatgattttgacatatgtattgatttcttgtcaaacaattatgtttggataggagttgctgagcatcttgattaaacagtacaatttaatcatatacaagtccttttgtcatcgtcgagagtcttcatcaatg

SEQ ID NO: 11737 - DNA, 3000 bp, Unknown; identical to SEQ ID NO: 11728
  misc_feature (1)..( 3000): cDNA_ID_1808663_gDNA_ID_2214513_Annot_ID_184338 3000 nt of promoter + ATG

SEQ ID NO: 11738 - DNA, 3000 bp, Unknown
  misc_feature (1)..( 3000): cDNA_ID_4262158_gDNA_ID_2214513_Annot_ID_184334 3000 nt of promoter + ATG
attgtagaatccatgaagaaatcctgtattcacgatacgttctattattgtaatatgttcttttgatttattttcttcaggtgtcccaccgacttttcgagcttacaaacacgttaaagtctgttttcataccaacaaaagacgacaagaggctgctccacaatgttctcgctggagctgccatctcgttctgtttatatttaacatctctcattcttctccagatcccacactaaccatgtaaggccttttactttgcatggtccattgcagccattgttgatcttggtgtgtactcgcttaggaagagatacaattctcgattaacacgctataaccattttattttgacaggagggactagaaacatgttgaaaaacatgaatctaaagctgcacagaggtttctatgtgaaacttgctaaaatagatacaacacacatctcatatcgacaataaaaatttgttttcaaagatcagtattttttgaagcttgccaagtgaagcatcttttgggtaattagaaccagagaagcttcaaaaaatggcttagagtgaagcatcttgtggcatttcgacggcatcatcttaggacgacttatcttgttcgttttctttctcgtctctgttgtaattttgctataagtttctcatatatagtttcattttgtcttttgttcgtccgtatttggtagtttgtccaaatacagaacatatgaattttacaagagtggatatttcaattcaattgagtcttcagataaaacgccaacacagttagagaaaaagaggttcgatttctatacaaagataccacaaaggaaagttcacaaatttacatagaatagaccacaaacaaactctctttctctgctctcattcacataataagcagccgctcactttccggggacgaagttggtggcgaaggcccaagcgttgttgttgactgggtcggccaaatggtcggcgaggttctccaaaggtccctttccggtgacgatggcttgaacgaagaatccaaacatagagaacatagccaaccttccgttcttgagctccttcaccttcaactctgcgaaagcctcggggtcagtagcgaggcccaatgggtcgaagctgccacctgggtaaagcaagtcctctgcttctcccaatggaccatctccggcgactctgtagccttcaacagctcccatgaggataacttgagtagcccaaatggctaagatgctctgagcgtggaccaagctcgggttgcccaagtagtccaatcctccgtcgctgaagatctgtgaaccggccttgaaccaaaccgcttctccgaacttcactccgttcctagccaatagctcagggaaaacgcagcctagggctccgagcatggcccatctgctgtggataacttctagctcacggttcctggcgaaggtctctgggtcggcggatagaccagcggtgtcccatccgtagtcaccggggaactcaccggtaaggtagctcgggggctcgccggagaatggacccaagtacttgactcggtcagatccgtaccatgggctgcctgatggaccctttggcttggcgacagtcttcctcatggtcacacggccgcttccgaggacatctgatgcggcaggcttcacagcctttccggcgaaggcaggggaggacaaagccatggttgaggaagccattataatctttgtttttgtgttttcttttttttggttgtgactggtgagagtgattgaaaatggttggggtatacgtccactttatagcaatgttaagagtaaggtttgttatctgtgaagtatctgtatctgtttagtgattggcttatgagattttgggattgtcgttatcttgtcctatgtgtcactctctagtccataagcttttgctagattctttagctgcaacgaaaacacttgtcatttgtacacaaagaaactttggggaaattttcaaagataaatgcttgaattattggaaagaaatatttgaaattattccaatctatttttttctttttccttgttttctttaattccaatccacttcatgctctcaataatattttcttttttttcttatcaagtttgtttcgaacgccaaactacaaagtttttaagtgaaactagaaacacttaccaaacaaatatatatcaatgttatgtaaaacaatgcagttagatgaaacaaaaagtgatacgaagttcttacgatcataagttaataatataaaaccgtcgacaatgatattaactgatacctttgattgattttgttgaatgttttcggcaacaaatatgactggtaagtttttcttgccaatacgaattagaaaacatgtctttgaagatgaactgtattttttttttttactttgttgtcattttaatgtactttcttatcaggattaaatcttctgtaatttagagtagtttttttaacaagataattaacaaacttagagtaatgaaaattgagatgttcagttttcactcatatttcacattttggtgaaagagtgggtagtatgcaacgttctaagtatgtttggactttgtatcatgttgttttgattctttgacgacatgtctatttgggaaacaccaatgacgtgtaccttgagactgatacgattcaaagggatagaaacacgtcagatttacaagtggcacgtcttcaatggacaatgggtattccaatatgctaagatgctacgagatatctaatttatctaacacaactcaattccaaaccaaaaatctgatgccagctcgacaagacaaaaaatctaagctcaaaaatgtcaacaaccaatagaaatcaaggcattgacgatatcacgagataagcaaattaaatcttcaagttttgcaattcatatgtacgttataaatacccaaaaacctcaccgtaacctagctatccaatttcatcacatcttattaactaaagagccttttacttgcgccacactctcaccgca

SEQ ID NO: 11739 - DNA, 2610 bp, Unknown
  misc_feature (1)..( 2610): cDNA_ID_3022765_gDNA_ID_2214513_Annot_ID_184330 3000 nt of promoter + ATG
gagctaagtcttcttcagaagtaaaggaatttgcagtagacaacgggtcaattcttgtttgagattctgagaggcggaaccgacgacccatatatgaagcctaaaacctttaaaaacggttgccacttatttgtagctaagaaaaataaactttgtgtacgtggattttcaaaaatataatcctaaatgttctagaagcttcctacatcattagggcttttctattgttacaaacaccgtcgttttttgttcgtagttttttttttaataagcgtaatcagccactgttgttgaacgaaaccaaaaaaagttatggtgagactagtttgcagccgaattctcaaatttccaaaaccgtacttatggagtgcgacgcagactacaagccgttgcttcaattcacgagcccagtctcataatctcatcacaaagacgatcacttcgtctcttcaagacgttttaacacgtcccatttggcaaaatcgaagctttgttcaatgcagaagagtctcttcctatgctcagatggttaataatcatcaatctgtgacgattgagacatttgatgctttgtgtaaacaagtgaagataagagaagccttggaagttattgatatcttggaggataagggatatatagtggattttcccaggcttttagggttagcgaaactatgtggtgaagtagaggctttggaagaagctagggttgttcatgactgcatcactcctttagatgctagatcttaccacacggtaatcgaaatgtattctggttgtcgatccactgatgacgctttgaatgtgttcaacgaaatgcctaagagaaactcagagacttggggtacaatgataaggtgcttagcgaagaatggagaaggtgaacgcgcaattgatatgttcacgcgtttcatagaggaagggaataaacccgacaaggagatattcaaagctgttttctttgcgtgtgtttcgataggagacattaacgagggattgttgcattttgagtctatgtacagagattatggtatggttctttcaatggaagactatgtgaatgtaattgagatgttggcagcttgtggtcatttggatgaggcgttggattttgttgagagaatgactgtggaaccgagtgttgaaatgtgggaaacactgatgaatctttgttgggttcagggatatttagagcttggggataggtttgctgagttaataaagaagctagatgcctcaagaatgagcaaagagtcaaatgcaggtcttgtagcagcaaaagcatcagactctgcaatggagaaactaaaggagttgcgatattgtcagatgatcagagacgacccaaaaaagcgtatgcatgaatttagagcaggagatacttcacatctggggaccgtttctgcattcaggagtttgaaagtgcaaatgttagatataggttttgtccctgcgactcgggtttgttttgtaacagtggaagaagaggaaaaagaggaacaacttctttttagaagcaacaagcttgcctttgctcacgcgatcattaattcagaggctcggagaccattaactgttttacaaaatatgcgaacctgtattgatggccacaacacatttaagatgatctcactgatcaccggcagagcactgatacagcgagataaaaaaaaataccacttttacaaaaacggggtctgctcctgcaaagattactggtaagctctatggtgaagaacctatcatctcctcaacctcaaatcgtgattttactcagcttggtagagattttgtttccttttaagtcctttagcatatttctagaatatgactgaatgtttctttcccagttcatcgcgttggtatatattggtttcttaacgtttcaatgctcgaatcatttcacattgtgacttgccattttactagagtttttttttttcagttttagattcgatgtatggttgaatgtcaacatcgttgtcctctgatataacttatctgagatggggttgttcgaataaatttcaaagaaattgcaggaaaggagatgaaactaggctgctatctaaaagagtagactcagaaataactggatacataacgtaagcagatgaaaaagacgatggaacagacatgacctgaagaaaacgttgaggtctctctgacgttgccttgacgtgcaagtcatatccgtatacattattagtgtctgacttctgagatgctctgttctatctcagtatctccttgaagcatcttcccaactttgatcattctctctgcctcagctatttctactttccttctagctttgggtctctaatcactgcaaaattccctttcgtataaagcaagaaatcctggaaagtaaaagagaaaaacaaacaaaccatgaagcagaaaagaaaatcaattttagaccgaaactttggagtctcatgtgaggagcctctaaaagatcaggcccagttaaagcccaccaactgaagaggcaacaaccgtcgtttaagccgacaacatgacggtatcaagctgtttttgggagactgtgtttgcgttgtctttgttttaagctatatgaagaagcttttctttatttgatcaatg

SEQ ID NO: 11740 - DNA, 3000 bp, Unknown; identical to SEQ ID NO: 11733
  misc_feature (1)..( 3000): cDNA_ID_1832291_gDNA_ID_2214513_Annot_ID_133905 3000 nt of promoter + ATG

SEQ ID NO: 11741 - DNA, 3000 bp, Unknown
  misc_feature (1)..( 3000): cDNA_ID_2707326_gDNA_ID_2214514_Annot_ID_133907 3000 nt of promoter + ATG
taataataagggaccgtaataataataaaatactaataatagcaacaaatagtcatgtgatgttatacattttcgtcggcgtatccaacggaccaaacattaaaacagctaacacatacgattttattttacagtaaagacatttgtcaggacaaagattcggcctttcattgctcataaaacactggtgagatacataattatcgaattttatcaatccatgtcgtacttatggacatttgtatgtacaagaattgaagtatatagccaactagttttgttggaattgaatgtgctaattaacatgagaaactaagtttagtgatctctagagctcttgaatcatgaacaaaataaaatgatcataaaagtgttgttaaagttataacaagctaatttttcaactttcaagatatgtttttgatttagtttctttttctatttgctgcaaattgttgttgttgttctttttttttttcttgcaaattgtttttacatatatttactaagtaggagaataagatttagggtttatgagaaaccctctcatctttgcataagttattcggtgtctgttaacaacaagagagaattttatcgatgatggtattatagtattgatcacattaatggaaaaagctatataacactatatactgatgttttaaggcttaaaaatatggccaaattattattattatatatatatatatatatatttattattttttttgaacggaaaaaagccagaactgtagtcatatacatatatctgaatatagcgtttaaaaaataattgtgttatcattgtatgacactcaaaattttcattttttgccaattttctttttagggtacattgataacataagatcaataaaaatatattatggcatcagttaggtaacatacagtatataaacaaaagccacatgttgaaaatacgtaaataagtatgcaacaacactatatcgtgataagaactaatattcaacaacactactttattatcgtagcaaagtatgataatcataaacatttattttcacacagtaactatttttttaaagataacatcataaaagtcaacattatattaaatatagttataacataatgtatattcttttttatttattgtactgtaaatttattcaacaaccaaaaaacttccttttatgaatatgaaaagaatttgagaagctttgaaatggtaatctttatattctacaataaatctttatattctactataaaaaaatattttcactgatgatcagatgatgcatcaaacttttttttttttttttccttttgcagaactcaatatactgatatttcaaatctgaaaaatacgaccaatttttttttattttttttaaacgaaaaagtgagaattgtagaattgtagtgatatagtgaagatcggattttaaaataattatatcattatacgatatttagacaaatcacttttttttttgcaaatgttcttttaagtttacatctaaatttgaagatataaactcgataaaaatatattatggcattaataaagtaacatatttaaacataacgcacatgttgaaaacacgaatgtaagtattcaccaacacaatataatatcctccaaaatgcgattcaacatttttctgccaaatacgatttcacatttgttttaataaaacatgatttcatatttttccacgaaaacatgattccgtggtttttccactaaaaatatgatattaatcataactatttatgtcactaaatattattcaatggtaataattattgattaattattctatttaattaattaattattttattttcaggaatcaactcatttaaccattaaaccatcaaataattggattaatgaattgactcaatccgttcaacaaatgaattgaatcaactcataaaccatttcagcctaaacttggattatggattggtttgaatgagtttatccattttgacatctctaacaatacatatctacatatgaactaatattcaacaacactatttattctcatagtaatgataatcttaaatgttcatttccataccaaactattaagaaaagaaaaacagtataaaattcaacattattcctataataaagatagttatatttttttttttgcaaaataagaaatatagttattttgttttgtgaaattaataaatatagttatcacataatgtctgtccttttttctttattcctgataatgtaaaatttgttcaacaaaaaaaatacacttccttacgaaatagagatgtaacgtctataagtctgcaaagaattaccttaatgtatagttcttttcattaaggtaagcattctattctaccatatacaaatattcccattgataattcactaatcttttctctattagtattcatcatgatgtttattttatttttttgactaaatttgttagtatttttttgagaaaaaaagaaagaaaaaactaagtgtgacgagacacgaaaacactagacaaggaggggctttgacgagacccgaacaaacaaatgtgaatttaaaaaaacccattaaaataattaaaaataatggaaatttaaaaatagaaaataatagtgtctctcgctttccttcatgcgttctctcgcagtcgcaggcgactatcaagtttcagaactcgagattcatcattctctgttccacttccggcgatgtattataatccctagaccttagttccggcgaactctcgaagaacaaacaagtatatattattattttcttcttagtgtttcgtgctgtttccacgattccttcgttttatcttggatctacagttttacattcttctgtttttcttcactttcattgtttccactgcgttgttctgattaggtattgcacaggttttgaaatgtcagtgaaaacgcgaagctgagagaggagaaggaagaaatcgaaggaagctgattcaaatttaggaagaagaaaaa

SEQ ID NO: 11742 - DNA, 3000 bp, Unknown
  misc_feature (1)..( 3000): cDNA_ID_2707354_gDNA_ID_2214514_Annot_ID_133915 3000 nt of promoter + ATG
tattgcttcaaaaagaaaaaaaaagaataattgtaagctatgggcttcacaagtttgtactctctctatggaaaatccaaggttctgaaatcaattagtttttccgctctcaacagtaaaactctcgcaattgacgcttcaatgtggttatacagaggtgctttaaataatgcccggaaattcttggaggaaccaactacacccaactctgaacatataatgtttgtcatcaaaaaagtcaaacaattcatcgaccgtaatgtgaatcctattcttgttttcgatggacatcgtttacctattaagtcaccgcggaacccaataaaaactctagaatacgcaaaggatcttgacgcatcagcacaacttatggctcccgatgaccctaagagaaaggacaaagagaagaatgctactaagatctttcaaagtcatatacacatcacgccttatgtgatacatgttttcattgaggtaacatttacggtaaataattatttttaagaattttcacttctttctaattttttattaacctttcttttttctcccattgaaggtttaaaaaaaaaaagtatccgaatattgagtttatcgttgctgctcacagcttgtatatttggctaataataaagataaaagcgtttatgcggttctcactattaacactgacctcataccatttagatgttgaagagtaagttctttaatacacttatcaattattattattttaaaggtttttctcatgtagacataacattaatttttactaccactttaaacttttgtgtgatcacaaattattttcgccagtaaagactttgaattgcttgaactcgaaatgatagacttattgaagcggtttcatagtagcaagaaaaataaagacaacgaaaaagaaactaaagaagaagcaaaatcttacgatttttcagaattcacagacgataattttctggagatgtgcattctttgcgattgtgactattttaaatggccattaacggagggatccgaaagagcatatgaaataattggtactaaaactatacgtggtagagaggtactttttacttggtttagttcaaaatagtagtatactatacatttagattttgtatttgcatgtatgatgacatgatgtgtgttattcattttctttcaggtaatagaggaactactagaggacagcactgacctaacttctcatctgaaaaaattcataattttgttgcttttcaaatattagtatgtctataatcaagtaattgaagagcttcaacacttgaatgtgcctgaggtgtctaaccttccattcttgcgtgaccgtgagtctggcgatgaatttgtcattcgaaagtatgaagattctacgggcacatatttgtcaacaactaagactaaggaaatagcataaggaagacttaatcctgaaacccacgaaaaatttacacacgtggaagtggaagaaacagatgacgaagaaactacttagacaaaagtatctaataatttgaatttcgaagttctagttcaaaataaaggaagtctaatttcgacaaaaaatctcacatctataccatattttacggttttagttttttttagtcgttagcaacaatgacaatcagttatattttgttaactttataatcgttagcgatgactatcgacaatgaaatcatgtttatttggtagtcgttgggtcgggaacatttaacaaatgattttgattcaattttttttttttcttataaaccttatcggctgatctggttagccctagtaaaaacacaccgaaatgttttcgagtggacttcttcccgaaaaaccaccatactgtctgtctgtcacgagtttgaaatgctttctgactaatgccagggggtagtcaggcggccgcctacatttctaattaccaagtaaaccaattaaaccaagacccaacttatacacttaccaactttcaaggagaatcgaactcgggtctaagagtttcatccttcccaaagcttcccctaccactaaaccacatatacttggcctaggttgaaaactttcagtgatacaattttttacttgctaatcgttcaaaaatattgaccataaattgtcgatgaaccaatggctaacactatttagttggttggtcgcaatcgcatagcatgtccctgacacaaaaaaagcaaacaaaaaaagaactacttggatcaaacaaagaaacccatgcttgggctcagactgaaaacaaagtaattgggccaaacccatttagtattaaccgactaatcaagtccaacaatgtacagcatgaaataaacgctacccattaaccgactcaaatcgcaccaagtcaggcccaattaatcctacacaggcccatttagaagaaagttaacttcctccttaagaagagagaagggctaaaaatcaagctttcacgagtacggaaatttacagtatctcctccatctttttttactttcctcagagctctctcctctccgcaacttccaccaccaccaaatcggaactctcggcgttctactccgtctccggcgttacctccgtcgatttcatcttctcaggttacttagggttacctcttttttgctttttgatcgataaagtgtgatgatgtctagcgttaactcttttcgtcttcgtagtcgtagtcttagggttttggtggcgacgatactttgatttatcaaaccgaacttcttctttgtgatcttcgatgaatcaaaagttttctaagggatattaattaggttttgttaccggcgataattaatccatcttcgatgcttcttctttacacttctgactttgtttctgatgttttaacctctgtggagagcttgatagagtgacattgctctgactaagcgttttagttcaacgcatggttgattctctttttactaagtaatgaattttgagatccttgtttgattgcagttggaaggagtgaattgagaaggtcgggccaat

SEQ ID NO: 11743 - DNA, 3000 bp, Unknown
  misc_feature (1)..( 3000): cDNA_ID_1022691_gDNA_ID_2214514_Annot_ID_133918 3000 nt of promoter + ATG
acggaaaaatggctacgatttggtttctttcacttctctttctctgttgtattctcctcgccgcctttaaacacaagaagcgtcggacaaatcagcagcaaccaccgtcccctcctggctttccgatcatcggaaacttgcatcagcttggagaattaccacatcaatctctatggagtctttccaaaacgtatggtccggtgatgcttttgaagcttggaagtgtcccaacggtcgtagtttcttcttctgagacggcaaaacaagttctgaaaatcaatgatctacattgttgtagccgtcctagcttagcaggtactataactctaacttaacacatacaattttctttctttctatttgttcctttgttcatagaactcaacaaaaaccatgattttgatcattcgttaggggcaaaagagctctcttacaattacttggacattgctttctctccttttgatgattattggaaagaattaaggaggatttgtgtccaagaactctttagtgctaagcgagttcactctattcaacccatcaaggaagaagaagtgaggaaactgatcgtttcagccacggaatcagcctctcagaaatcaccagttaacttgagcgagaagtttcttgatttaactgtaagcgtgatatgcaaggcagcattcagtctagacttccatacttcagttctcaataatgatggatttgacaagttaatccacgatgcgtttttgtttttggggagcttctcggcctcaaacttcttcccaaatggtggctggatcatcgactggctcacgggtctacaaaggcggagagaaaaaagcgtcaaggatcttgatgtgttctatcaacaaatgtttgatctgcataaacaagaaaacaaacaaggagtcgaagatttcgtggacttgctcttgaagttagagaaagaagaaactgttcttggatatggcaagctcacaagaaaccatgtcaaagccatcttaatggttagtactatacaaatatgtgcaacacattagataccttatgattctaaactttgttttctcatcttatcacagaacgttcttcttggggccatcaatacttctgcaatgacaatgacatgggccatggcagaactaataagaaacccgcgagtgatgaagaaagtacaatccgaaatcagaaaccaaatgataaacaaatcagtgatcaccttagatgatatagatcatctaccttacttgaagatggtgatcaaagaaacatggaggctacatcctccagtacctcttctacttccaagagaagttatgtctgaatttgagatcaatggctacaagatacaacccaagacattgctttacgtgaatgtttgggctatagggcgtgatcctgattcctggaaagatgcagatatgttttatccagaaaggtttatggataataacattgatgctaaaggacagaactttgagctgttaccgtttggaagtggccggagaatctgtcctggaatgtacatggggacaacaatggtggagtttggtctagcgaatatgttgtatcagtttgattgggaagtaccagatggtatggtggtcgaagatattgacatggaagaatctcctggactcgccgtgggcaaaaaaaatgagcttctacttgttcctgtcaagtatttaggtcattgatgatcacttaaagtactaattttcttcctttgagtacaaaactaaatgtgttccctaaataaaactaaatcttgtattccattgtctctcggagtggatcaatccaacgatgttctttgttgccttcaatatttcatatagataatctatttattttgactaaaatatgaaccacctttcaagtaaggcatgttcgtttgtacatgagaatgatgcatatagatgacctatttggatgttgcacatttttgaatttggtagtacatctggatagagcatttgaatgaagttttgttcgtttggtttaggttttaacaatttgttatatttattcaaacatatataaggaatatgccggaaaaaccaagtatctgaaattccaaattccgaattaaacatttgattatttaaagttctagtatgattgaaaatccctaaaatttatcaaaattttctcataatttttagatatttctcaaattatccgaataccactatctaaattaaacttatattgaaattagcaagtgttttttaccaaaatttttcgaacatggccaattacgcgaattttccatgcggtattttatacgaaatagtagtggtagatttttttaatactcaaaactatttgcaaaggggggtgcaaccaaatcttatattgtcagtgatttgatttattttgagagtttttatatgatttgaagaatttgggtaaatttacggaagttgttaggatttattgtaaaatcctttcaaatttcacgtaaaggctaaaaccatgagatttaaaattctatatttttaactaagtaaatctactaaattcacttaaatatcttaaagtcactaaaaatccaatccttaaaatgttttttaagaagattttgaagtagattttaaagtagattttaaaatcactagtccaataacattagatttcatgagacttttaaaaatccatgattgaataacatatgatttactattttaacacaaatcacttcaaacgtttgattgaatatacccccttaagtgagcctaaggttttttcggttttatttcataacatgagatttttatcttgaattatataatctttgatttagattttaggaaaccatgaatatattcaaacatgttttatcaattaaatgttaaaccaagtattacagagagtttcatagtctttactctaaaaccacgtatgagcaaaccaaattgaacgaccaaacaatttcaggcatttttgctgcttctggaaataatatatctattgagtcaacaaagatcagatcaaagctgaactataaaa

SEQ ID NO: 11744 - DNA, 3000 bp, Unknown
  misc_feature (1)..( 3000): cDNA_ID_2707314_gDNA_ID_2214514_Annot_ID_133920 3000 nt of promoter + ATG
agtacttaaacaaatatgctttaccaatatttagatcttggtgtcacaaaaagaacaaacaaacattatactctatgttagaatcgatcacactaacgatgttggattttacgaacgaccaataagaagtcaagttaatcaactatccatccaattcagtatagcactactttccattatattgttgtttattgataatgagaaatgttatatcgtgctagagctttacttctcattgtctcaagtcaactctcacacgatttaacacatccttgagttaaaaaaagtataaacaaattttggttcatttattagtctaattggcctcatcgctcaatgaagctatactatcgcaatccaaaatgtctcaatgaagatatcctactatcaatgaagctatactctctataaactataccgaaagttttttactagagatttcttaatgaaatctctatcccttcgattcatatatgtaggatatcatgtaaattataatacaaaaagaccgttgagctaaatattaatactcaatctgtatcattttaaatgatgtttacaagagagaaaaattgtttcatttaaataatgtaatacagtaaaaaccttaaacattccttgaaatgaagagagtatattattatgggctatattaatgtatatgcctgaaagacttgaaaattagatatttactataaatagtttaatattaggtaagaataaaagagaaaaaaattaaaactataaatatcttttctatttatttaatttaccaaatttgccattgtctcacaacattatttattaccggatactttaggcatgatactgttcatcatatacctgacaactctattcatccaaaatttacaacactattcatcattggattgcataaaatatttatggtttatgtagataactatttgattaacatgttaactagtatgatatcgtgctagatacagataaatgtttgattaacatgttaactagtatagtatcacgataaatttatatataacgtattaaaccatttaccatattatacaaattaatatgaaagaatcaaattcggttgacaaaaaaaaaaaaaaaaatcaaattcaaattagaataacatattatactgaatataacgtgctaacatattaaatatttgaataatatttttatataaatgtggtaaaatatttgatatatagtgaaattataacaatagtttatacacgacatatttggtaaattaaacaaagtaaaaaagacagttatgactttaattttttttctcttacatacttacccaatattgaattatcaatggtaaaatctagttttcacattttctgggcatatccattaatactagatgagtacccacgctacgcgtggatttattttgaaaattgttaaaaaaaatatttacattgattgttatttttgctaatttttgtttattctttgtttattcttgtattgttaataaaattagatccataatatgtacttataatttttatggttagattcatttgtgactaatttatttataaagctgattatttataaaattttaatattttcacttcatgaatacatataacaacaatatctgatattctgatagaattatgtataattatgttacttgtgtggtttaaaatttgcttaactcgattataaataaatcaattccttgttttatgtacttcaacgatattgtgataggttcatgattaaagtttggattgacatcaactgaataagatctgaaaaatattcatatgtaaaaataagaagatggcaaaaattgaatatcatttaagtcaacaattttagattttctatcattgcatatatcaatattagaaaaatgatcatgtcttggatgatttgaaaattgtctaacttgattacaaataaactatttctggtcttatatattctcttgatataataatcaacaacattgttataagctcatgattaaatatataaaattgatataaactaaacaagatttcaagcgtattcatatgaaaaaataaaaagaaagcaaaaattaaaatatcatttaagtcaatacttttagatcttctctcattgcatatatccatataagagaaataatcatgtattaaattatttggtaggtctaatgtttcaaaggtttattatttgaaaaaatttgaatgttaatgttatcaaagactcaaaataaaattactaaactaataagaggttaggtagcaaacatcttcaatgcaaaacattttagtcattaaaatagtgattattgataataaaaaattagtaaaataaaaataatataatgtaagtagtgcttaatttattaacataatttttattttttatttttattttgaagaaatcaattaaaattagtattgatgatacatttaatttacttattaaattttattaaattttaatttaaaaaatataaaatgacacatgtcatttcttgtgtaatgacgtgtcattcatatggagagagttggtcaacttttatatatatgatttttctattatatattacattaaatactttttgaaacagagtcaaaactattacagtaaatattataaactaacgttagttggatttaattatttttaatttcagcttagctgtattttttgtcaaccaacgtcaacgtggtaacgtagctgtaatatataacaaaaatgacttctacattaatataacttaattcgtaataataatgtgaaaattagctagcatttagcgcccatagtttatttgctactatatgagtcattaaacaattacgactagatcatatcattctaaaataatatcaaacaaattgcaaactggagttgtttaatccttgggaagctaaaagtgaaatcttaacgaggacaacacctttcagtctttatatatacacatatgtaggggcaagaaggataacaacatcccaaaaccctaaaaaatactctaatcgagcaacc

SEQ ID NO: 11745 - DNA, 3000 bp, Unknown
  misc_feature (1)..( 3000): cDNA_ID_2711279_gDNA_ID_2214514_Annot_ID_133921 3000 nt of promoter + ATG
actgataaagaagtcaacttaatcatccaaccaaggccagccaagtcggtatcgctaccactacttttcattatttctatatactataaaaaaaaattaatctggtggcgtcacgattaattgcaacatttttgtttgacttttacattttcgattaatctggtggcgtcacgattaaggattggccccattagctaggtggatactaattgcttagttcattcgaagtctaccattttccagtttcctttatatatgttattgaactaattaaatttaattaaatattcgagcttatgaatgaaattcttatgagaaacgatttttttttaaactagagattagaaacgttttggaaacgtatacaaatatatatatatatatatataacattaacataaaattagattgaagaaaaaatggtttaaaccatacaaatctaaactatcaatattaaataagttaactaaaactctaaagataaagattaaaaggtttaagttcaaatatttaatttagaccaacatttttattcttattttcattactttcatcaaagataatttaaatctctcttcaaatctggtttatcaaaagaaatatcttaaaactgagagtcttccaaaattagttatatgtattaataattttaagatttctattttttttgtttttgtaatccgaaaattaattagggctcaaacgagccaaacctgagaaatgttgtttacaaatttaatataaagcggttgggtacgaactcatatttccagttttagttattaaattttttaagtcaataaaaaatatttgtcgtatgtctattttagaaatataagtttctattttggaaacttgagtttctatcgtgtttccaaaaataaatttttaaaaaatatgttttcgtgacgattttcgtatttccgaaaagtttctgtttccgaaatgtttcgaaatataaaacagatctaagagcgaattttcatgcaacctagatatacactgcccttttaatttgctaagttgtaaatttcctcaaccgatatatggaacaaaattaaaattagatttctgttattttaggtataatctccgggtatacgtgatgagttagtacttttacgcagtagtgatatacaacaaagatctctgataccgaacgtgaaaagtaaaagtccttttacatcatcgttttatatcttgaattaatataacacacaatgactattttttttttagaaacacaaaaagactgttgagaaaattaaataactaaagtctatcaaccatcttagctgtacttaatcgtatatatgaaagttggccaactctcttcatatggatgacacatcatcacacaagaaaatgacatgtgtcctttaacattaattaaattaaaaatcagcaaaattaattgagagaaaatcaaaagtttcatattctgttaaatcgtccattaattcatttctttaactattttttcaaaataaaaataaaattataaaattatttatttaaataaatcaattactacttttattttacttttattatttctatttttttttaaattaatggtcaatggtcatcactctataatgactaaatagttatttgtgttgtagtttagttgtttgctaccttatattagtttagttattttaccttgatttttttatttttacgttatggttcatatcttatcatatgaaattctgtcttttcatttttgtatctttaggtaagttcgtaacattgacattcaacattttcaagtaatagacttttgagacttttggtaagtttataaattcaccttagttgtatatcaggctactatagttaattaattatgtaccacattaagatgattagtttgtttccgtctttattgtacattgtgatttgtgaagatagcatttaatcatttagttagctagctaacccataagttatttatttgccactgaagctatatgccccaattaacaatcacgattagatcatttcataaaattattacagaacatgaattatatataatgtcctatgacacatattttatttattaaagaacttaatcatctatgtgtaacactacctttcattgtttcaagtaaaacttttggtgtatattttcgtttttctttggcaatgttaattgaaacatttgcgattaatcgggtggcgtcacgaaatccgattgtgaaccgggtaatagccggataagacgttaatttggtgacgctatcacacgtaaaaagccaacaaacagtcgaattttaaccggtccaactagttctacttgattagatcatttgaagtccaccttttgcaagattttcttcgtgtaatttacttatctttaaatcgaacatatatatatatatatatatattatatatttttgagtactaatatattgcctttataatttgataaatatacttgtatgtaattaaatcttcctcctcactatataaattcatgacttttaaaactgtttctgtttatatatatatatatactaggatttaacccgtggtataccacgggacaaatattttatttatatataataatattaaattttacggttttaaatttagtattaaaattatataattttatattaatattgtaaataaaaaaattggtgatgataaaataataaataaggatttaactcgtgttatatcaatcaaatccgtcccgctatacaactcgtctcatgatagttttaatatttttttataaggataaatattaataaattgtaggtatgtaacctagctgtaggtatgtaaagagttagtttaatgaatttgtacgttaagattagactatttattaaagaaatttaaaaacacaaattgcaaagaaagctggaaaaattaaaacgtcatctctgtgaacgtgtatatatcggaaagaaggagaagaccagtatcaatcctaaaccaaccaaaaaaaaacaccaaaatctccgattgagcagtc

SEQ ID NO: 11746 - DNA, 3000 bp, Unknown
  misc_feature (1)..( 3000): cDNA_ID_2707318_gDNA_ID_2214514_Annot_ID_133923 3000 nt of promoter + ATG
taaagtggaatttaatgggaaaccatttcttgtataccgcaacgttataaaaccattaccacaaacacaaacctcaaactcctttgataaacaatccattgattccgtctacgatctccctcctcaacctcttttcttatgccctagactccgaacccgtatattattgaattctcttgatgatgaggtggaagatgaggtaactaatcatatcctttccaagtacagttcttcccctctctttgatgagaccagcaacaatcatcatgtactccctctgttttggtgcaacaacaaagaagttgatccggaagcagaagaaggcgatgagtgctattcctgctctatccaaaccatcggtacagactattatttttgtgccacgtgtgataaaaggttccacaaagaatgcgtcgagtgtccacttgagattagttatcctacccacaccaaacattctctccaactcttctattctaaatatagatttgaccattgcatctactgtagaaaaagagcaacctatatgatttatttttgtgctctttgcgacagttatatgcatgtcctttgtgctcagtcaaaaatacccttttttatagaccagccaaaaagacatgaccatactctcacccttttccctagacaagcttccttaacctgcaatatttgtggtttgataaataaactccatttcacctacgtttgccctatatgcgatttcgtagcccatagtgattgtatttatatcccacaaaccataagaatatcccgtcaccaccatcgtgtctcttttatttcttcccttccttttgaagaaaagtcttgtggagtttgccgtcaaatggttgatagtgattatggtgcatacacttgcaatgtgtgtagtggctatgtcgttcacgtaagatgtgcattacgtaaggatatatgggatggtaaagaactcgcggaagtaccagaagaattagaagacgttgagtccttcaggaggttagctgatggagaaatattccatttttatcatcaccatcatctgaaatttgacataagtggagtttacgttggaaacaaattttgtcaagcgtgtgtccttccaatcaacgaaggaaatatttatgtttgtgtggaatgtgatttcatcctacacgaaacatgtgcatatgctccacgtaaaaaggtccatccattacatccccatccccttacacaaaagggtgatcatgtaaacgctttcttcaaatgcagtgcttgtatgcgtaagagtaatggtttcggatattcgtgttataaccgaaattgttactttaaactagatgcagtgtgtgcctcgactgctgagccgttcaattatcaaggccatcgacatcccttattcctatcgttagacccaaaagataagccaatgtgccacatttgcaagtcaacgaaagataagaaggtacttaactgcattgaatgtgactttattatatgttttgaatgcgcaaccttaccatacatggtaaggtacaagcatgacgaacattacctcacattttgtcatggagatgaggtgagtgactcagattggtgtgaattatgtgagggaaagttatcaattggaggaaaagaagggttctataattgcaaagattgctgcaccacgcttcatattaattgcttacttggcccagatcaatattataaggctggtcaaacttacaaaattggtgaggttgatattagtttgcaacacaacaattctgcttctcggcctatttgctgtatgtgcaatatccgttgtccgtatccaatatttttggtagccacagtggataggattgcttatattctatgttctagtaaacatttgaagtaagggaaaccctacaatacacgtcgacaacctttgagttatccgttttcttttaaaatgttagttgtacctgtaagtctgcaccactttttctttatgtatatatttttgtgttgttgttgttgtatatatatatatatatatacatatattttttgtttggttttcttgaaaacattgttcatgtgcgtttgatgtaatatctatacattattatatattaaagcgaacactttttatcaaaaaaaattcatctggtttattagactaaatcattaatgttttataagagatgtcatgaaattcctctataggtgaaaaatatggaacttattaagtgaaaaaccgagatatatagagacgatgtaacgtcaaaaagacttggaattttcaaaatttgaaacatttcattagaaagtcaaaagtagatatttttaaatttgaaacttagttcttgttatctatccagtatcaccattcaatgaatgacatttcaatacgcggagtcatgtcctctcaaacccacaaactcactatagcaaatctcacaaactactaattttttctccacaatttcacttaatctaactataatctttctacttgataatgaagcaaaagcaattacttcaccataaaatttctgatttaagaaaataattcttttgattttaggataaaattaaaatcaatttcattcctgaattatttcggtttttcttcttaaatttctgattttttaaatattttatacatatttaaggaaaaaaaatatatttttttcatgtagtttggttgtagaaaagttaagacacgtaacaaaaaaaaagaaaagtagtttgttaatggtattttggtctgaaataacataattagctaatttgtgaaacctccatttcactttgtcaaaacatgagaacaaaactcgtaatatgggttaatgtgatttttttttataaaattatcatgctactttgttattcataattgagtgagtttcactttgctatacttttggcaagattattttcaaaagagacactttcatcttttttttcactattcaacattctttaatacaattttgcccttttttctttatttctctttttcatttttattatctttttactatcattttt

SEQ ID NO: 11747 - DNA, 3000 bp, Unknown; identical to SEQ ID NO: 11746
  misc_feature (1)..( 3000): cDNA_ID_2707318_gDNA_ID_2214514_Annot_ID_184394 3000 nt of promoter + ATG

SEQ ID NO: 11748 - DNA, 3000 bp, Unknown; identical to SEQ ID NO: 11743
  misc_feature (1)..( 3000): cDNA_ID_1022691_gDNA_ID_2214514_Annot_ID_184387 3000 nt of promoter + ATG

SEQ ID NO: 11749 - DNA, 3000 bp, Unknown; identical to SEQ ID NO: 11742
  misc_feature (1)..( 3000): cDNA_ID_3022851_gDNA_ID_2214514_Annot_ID_184384 3000 nt of promoter + ATG

SEQ ID NO: 11750 - DNA, 3000 bp, Unknown
  misc_feature (1)..( 3000): cDNA_ID_1441000_gDNA_ID_2214515_Annot_ID_133927 3000 nt of promoter + ATG
cacttaacagaacagaatttctattcaaactctagaatcagattgaatatgctgtgcttctaatgagatgtctcttgctgtccctaggtcctgatcagcggaatactgcaaatgctgtgttctgcttgtggatggctattgggaacatccttgggttttctgccggtgctagcggaaaatggcaagagtaatctttgagatccttattctcaaaatcttgtattctttttcctcatttgcaattttgcattttccgccagctgttaaatgatcaggcaattttactgcgcagatggttcccttttttaactagtagagcatgttgtgctgcatgtggaaatctcaaagcagcgtttcttcttgcagtggtaagcagtatgtttaattttctgacacatgcatcttactaagctttctaaattgcaatggaatgggctggtctttacgaaacactctcacgtttgtacattgtgacttgtgattcatatatgtcgcaaatcaatgcgttctgtttgtatgtctatattatttttgaggtgattttgaaagtgaaattatattattgcacccagtggcttttgttcttgtttcatagtctaaaatctgaatatattgttctatatgttttaagagtttaaatcattttttcaggtctttctcactatatgtactcttgtcacaatctattttgctaaagagattccttttacaagcaacaagcccacccgcatacaagattctgcacctttgttggatgatctccagtccaaaggccttgagcattcaaaattaaataatggtactgccaatggaatcaagtatgagagagtggaacgtgatacggatgaacagtttggcaattcagagaatgagcatcaagatgagacctacgttgatggccctggatctgttttagtgaatttgctaactagtttaaggcatttgccaccggctatgcactcagttcttatcgtcatggctcttacatgggtgagtgccaaagaaaaattatgatcagttattacatatttcacactgtttcttttcttaaactctttaatgatctttaaaattatttgcttctgttatatttttgattgtggtcttgttctttgcagttatcctggttccccttctttctgttcgatacagattggatgggaagagaagtttaccatggggatccaacaggagatagtttgcatatggaactctatgatcaaggtgtacgtgaaggtgcacttggtttgctactaaactctgtaagaatcgttataataacctgttttttaactgcactgctcttcaaaattcaattactcgcccgttattgaatattcttcttccctgtttccgtaggttgttcttgggatcagctcatttctcattgaaccaatgtgtcagcggatgggtgctcgggttgtatgggctttgagcaattttactgtatttgcctgcatggcgggaacagctgtaatcagcttgatgtctctcagtgatgacaaaaatggaattgaatacataatgcgtggaaacgaaacaacaagaaccgcagccgtaatcgtttttgcactccttggttttcccctagctgtatgtgctttctttcaaccgtaattctctttattcttttcgtgttgcaacatttctctaaaatatgtgataaaaccattctttaatgcagatcacatacagtgtccctttctctgtcacagcagaagtcactgctgattccggtggcggtcaaggtctgtgaaaagattcatatcttcactatattcatagtttttgtacttaaatcttagatttcagtaatccctaatggtttcatttcctcactccaggtttggctataggagtgttgaatctcgcaatcgttattccccaggcaatctctcaaatctaattacactgataaatttcattctcttgtataatgccactcacttcgagtgtagtcttgacccgtaaatagtgtctgaatatggttttggctctaaacagatgatagtatcacttggagcgggtccatgggatcaattgtttggaggaggaaacttaccggcgtttgttttggcgtctgttgctgctttcgctgctggagttattgcattgcaaaggcttcccacgctatcgagttctttcaagtccaccggtttccacatcggctaaaatctttataccacagacataaaattcacagttagatctacccgattctttttgaccacgttctcctctcggcgtatatgtaagtaggttttgtacatctagttttcttatatgttatacacagcaatgtgactctaaatttacagtacctctcttctcacgtagaatatatcttcgttattttgaatcactttatatttgtgtgttcctttcctcacaaatagaaacttgaagcaacatattccaaactcaatagtccaatctaataacacaatactgttggttctttaacctatgatgtgtacgttttcccaacattaccatactaatataacaaagcatttcaataagaacacaaattcaaacctattttcgcctataaactatgtactaaaatcataaccaaactatatctccaatagaaacaatgtgtccataaataataaatgctcatatatcgtgggttgttgatgacatagtctttgtccacaagttccttatttagttgatataagcattttcaaaacaaagaaacaaaattcaacttagtgtaacaatgtcaaaaccaaactcttatcttcaataatgagacaaaagaaaccgaagttaagtctataatcaatttctacatagacaatgtggccaaaaataataaatgaacatatatcatgggttgttgagacacccaatttaataaaataaaaacattgaatgtcttattttcttcttctttaaaaaccctttgtacatttactcttcaattcatcctcatttactctctatagtttctctctctttctctaaactttcacctaagatcgatcaatg

SEQ ID NO: 11751 - DNA, 3000 bp, Unknown
  misc_feature (1)..( 3000): cDNA_ID_2707398_gDNA_ID_2214515_Annot_ID_133928 3000 nt of promoter + ATG
ataaacaactatagtactctttttttcttcatatatttcaaaaaacaaagctaatgtttcatctaccattaacctaaaaacgtattgtcatctattaatatgtctcttgaatttgatcacatgttgtttgcgatagcacatagtctcgatgtccggtcaacgagacgatgttcaggggatgatgcatttttgactcaactttgttataattggacgtagcttccgaacttaattagtcgagttaaggtttcgcatatactccgttctatatgaacactctatatatgcacaaatcggacccaaaaaaaagcaagatgatgtattggttttgttgggacaattaaatgacacaaagattttagaaaaaaaaccattacaaatatatgcacaaaccattgttgcttttttaaaaaatagtccactttttaaatgatttaatgaagtgagtggatataagagttcgtaaaagagctgtctccacgtgacgtgattcttttttatttcttcacgttctttccacatttctatctttcaatatcgatggttacattctcaataatgattaatgaccattataatttttctttatcaactttaatggagttattatgtgaaacagtgtaagccccattcttatgtatatatgtaaatatcacattataaattatgatctatcgacagagaacgacaaaattgccaaccaatcactaagttagaaaattaaatttattgtaataacgcatctctttttttttttttaaacatatagtttttatattattaatatttgaatttgtcgtttgagaaatgacgaaggagttattttcaggcgtaagcatttgacgtgctcgacgttaaggagatgacgtgttaagttatggtacatatgtttttttctcttttatttgggtcatagccgcgttcaacacgtgctttttgtcaaatgtaattacatgattaaactaaaaaaacttattactgtttttcaatcaacttattaaccttgatcttttttataacaaaataaaaataaaaattggcacatgatcaaatcatcaatctcaaataagataaaaccaaaggtgtaataaggttcatttttttgtggagaaaccgagtcaatgctaccaaattgcctatataggcttgaattttatgtaaatgcttttttgaatggaataatccgattttttattttattttttcttatgtaaaattataacatggtatagataaaaaatttgttttgtaataagtgatatttggtctaacggcgcgtatgtatagttcttttacaaaagtgagtaatagtggttttctggttcaaatactattgagaatggtatcagttttgatggacaacaagtgtatgagactcggctataacttctcaattaaccattaaccattaaagaatacaaaatttggattttcgactatactttggttcggatacatcatacatgcatgcacaccataacaactaaactcaaaaggatttgtttttgaacttttgatgataagaaaaagaaaaaaaagatgggacataagagtcatgtacacgtggataaggaaaggagaagagagggacaagggaagagatggagaaagagagacgtaagtattaattcaattgtgtgccctattagctttcattttccacaagcaagaataatattaataattatgtatcatctttgcatttttgtaccaatacatgatacatttgttaggcacacgtctttttcctttttcctcctttttatttctaactttcttccttttattcgtttaatccggctctatcacgttaacacacatatatgttatatcatctttttacaaacatgtttacattagttattagaaaatacatatacttgtaatagtgacattggtaagaagaactctatcaccttcacaatcacacacatatatgttatataatctttttacaaacatgtttacattagttattagaaaatacatatacttgtaaatagtgacattggtaagaagaaaaaaacactattaaatagtgaaaaaatgtttataactctcttaattaacattacttattattgctagcacctaaaatctcccacaaaatatttgttgtaaaacacaaatttacaaaatgattttgtttttaaattagtaacacatgttcatatatacgttaataagaacataccctatatgattttatataaaaaaatttctttgagacgtcttatccttttttctttaataatatgcaattgtgagagtttggatttgaatggtagcattagaagcaaacttgaaccaaacatatttcatgaagtcaaacttgaaccaatgtaatcactaatcacagtgttcgcagtgtaaggcatcagaaaatagaagaagggacatagctatgaatcatataatcttgacacatgttttataggttttaggtgtgtatgctaacaaaaaatgagacagctttcttctaatagacttaatatttgggctaaatgtaccacagttgtgaatttcttacaaaaatgggccgagctacaaaaaactacaggcccactctcaactcttatcaaacgacaccgttttacttttttaaaagcacacactttttgtttggtgtcggtgacggtgagtttcgtccgctcttcctttaaattgaagcaacggttttgatccgatcaaatccaacggtgctgattacacaaagcccgagacgaaaacgttgactattaagttaggttttaatctcatccgttaatctacaaatcaacggttccctgtaaaacgaatcttccttccttcttcacttccgcgtcttctctctcaatcacctcaaaaaaatcgatttcatcaaaatattcacccgcccgaatttgactctccgatcatcgtctccgaatctagatcgacgagatcaaaaccctagaaatctaaatcggaatgagaaattgattttgatacgaattagggatctgtgtgttgaggacgatg

SEQ ID NO: 11752 - DNA, 3000 bp, Unknown
  misc_feature (1)..( 3000): cDNA_ID_2707394_gDNA_ID_2214515_Annot_ID_133930 3000 nt of promoter + ATG
attcggaaatttgaagacttgttaatttgggtttgggattgggattgatctgaaaatttgtagtttttggaagatatgttggaagatcgatcaccagattcgtgtttgagtacaagggttttctcaagctctcgtctttctgaatcaaactggtctaactcttacatgtatccagaggatgatgataagctcctcggtaatggtaaaagagctttggaggttgttggtgaggttagacagaccaaatcacttaaattaatgggtttttcgattatctatgatagcgattcttctgactattcattgagtggtggggaggagcaagctgatgctgctattggtgatggctcatcatcaaggcaggagcaagaacagcaatctgattttaatgacaatggtggtgattcttcggattctcactctcttatcaatgagattgggagggacaattcgatcgactgtttgatccgttgctcgaggtctgattatggttctattgcttccttgaaccggaatttccgttctttggtaaagagtggagagatttatagattaaggcgacaaaacgggtttgttgaacattgggtttacttctcttgccagctcttggaatgggttgcgtttgatcctgttgagagaaggtggatgcagttgccaactatgccttccagtgttaccttcatgtgtgcagataaggagtctctggccgttgggacggacctgcttgtcttaggaaaagatgatttttcttctcatgtaatatacagatacagtctactcactaattcttggtcttctggtatgaagatgaactctccgaggtgtttgtttggatccgcgagccttggagagattgctatattcgctggtggatgtgattcccagggaaagattcttgattttgcggaaatgtataattctgagcttcaaacttggataactcttccaaggatgaacaaaccgaggaagatgtgttcgggagtttttatggacgggaagttctatgtaattggaggaatcggtggtgctgattctaaaggcttgacctgcggtgaagaatatgatttggagaccaagaaatggactcaaatccctgacttgtcgcctccaagaagccgtgctgatcaagctgatatgtcaccagcagcggaagcaccgcctcttgttgcggttgtgaataaccaattatacgctgctgatcacgccgatatggaagtgaggaagtacgataaggagaataagaagtggttaactgttggaagattgcctgaaagagctggctcggtaaacggatggggacttgcttttagagcttgtggagagcggttaattgttattggtggaccgaagtgctcaggaggtggtttcatagagctaaattcttggataccgagcgacggtggtccacctcagtggacactacttgacaggaaacattctcctactttcgtatacaattgtgcagtgatgggttgctaaaagaacacacattcataatactacgactatccatttgaagaccctccagattcttgttgatgggttttagcttacaagtcaaaagacaccattgaaggtcccacgctccaacctttatgcttcttcttcttcttccttatttgtttcccttacaaaattttcaatttgaatacaatcatctctgtattgttagaaaccagacaaaagtcccaaggagattccaaaaaaaaaaaggaaaaaaaaaaactgaaacaggtttataataagttcgttaaaagttgaagctttttagagtttgccagatctggttaacattgttgtatgtgtttttaatcaaatttgttttctaataatcttgccatctttttggtctttgttcacggttttgcttttgagtttaattctttttctatttttgttttgctttacctttctttaattttacaggtcactttacaacgttgagtttgaagtgtttgtcaattttatgacgacaaacaaaaaagtgtcacttttgtttttttgttggggtaaggaggggcaaatgttatgtctttatagatgtgtcctttaagatatctcaatctgttgcttgcaagttatacaattttttgttaagaatgtttttggactcttgttttagttccttcagcttttagggtctttagattttttggtgaagataacaacatattacaatctaagttagtattttaccaatcggaacaactcatagtataagtaacattaaccaaagtaaatttttttcaaagagtagttaaaatttcttaattacaagataaccaaagtaatatgtttttagtgtttctaattttctgatgatatatttttttttgttatttagatattttttcttatatacgattatctaatgtcttttaactttatcgtctacaactcacacacgtgtactgcttgatttcaatcgaagttcggacacaatgacatcactagcatatgttatgcttgaaattttagacatgtaaaaatctcatagacatagatataaatactagaaatcaaaaattgaaactgaaatataaaatatttagaaaaatataaaatatttagaatagaaaaatataaaaaatttagcagaattctctaaattttctttatctttattttttcgtagcgtaaatgtaaaagtagacacattagtatgaaatatttgtatcgaacagcatcatgtcacatatataaacaatattctcatgattttgagttctaattaatattggttgacaaaaaagagaaagagttaaagatgcctctttcttcaacatatcagtatcaccctctcaattcgattttttctacaaagaaatatgttatgttctaagcaaagcccaactacaataaatttgggcctcataatgttaaggcccatttactctaaatctcgcagggttttaagttttgatttattctctactcagcaaacgccattatcgctctgtagaaaagcttccattttcgtagaccactctcactgagaag

SEQ ID NO: 11753 - DNA, 3000 bp, Unknown
  misc_feature (1)..( 3000): cDNA_ID_2707440_gDNA_ID_2214515_Annot_ID_133931 3000 nt of promoter + ATG
ataaaggaataaatacagttctaaatcgccaccaggtaggtttcatggtgagctagagatcttcgcttcaggtaaagagtttttgttatttcctttctctaatctggtgttttctgggtttgtgtgagagattcttccaaatctgcatcttggattttgtctatgtttgattagcttaagcttctctcagacatagaaatcttgatttggtctgattttttgcagtgtttaaggattagataatgttaccggagagaagaagcacggtgttttcttcttcttcttcatatctgaatccatctggtcacaatgataattcttttttacttcttcggagaggcaaaaagtttggtcgtattgtgaaattgaagctttcacatttctttttgttctttgtgtcactctttttcttctcttgcatgttctctggccataaactactctttcatggtaagctttgagaactaaagaaaatgtctttctttttgttttctctcagttttggagattattaattcaacacttttgaatttggtgtaggttctgagttcttacctcattttgagcaaaaccgtaagcttttactttgtcttaatgattgaatttgtgtaaaaacctactacaaaagcttattgtattaagtggatttggtttcaaatgcagcttacatgaacagtcatatgttggtttcatcggagattgatataggattaaacaaatccaacatcgaaagaccacctggaagcaagaagagaaccaagcgtatggatttttgtatctctagaggttttcaattaatgtgttagtgttggtttctcaactctaaggctagattgtttacatataatgcagatttaccttgtgaagttccacttgctgaatctgctgatcgcatacttgagcctcaggattatttgaatttcactcggttttcgttaggctttgtagagactgagacatatgataaccctaggtttggagggcatcaaacactcagtgaaagagagagatcttactctgcagtaaatcagacaattcactgtggttttgtcaaaggaactggatttgatttgagcgaaaaggatagggcctatatgaagaactgtgtagtctctgtgtcttcttgcatttttggaagctctgattttctaaggagacctgcaaccaaaaaggttaaaactttatcattttagtagatattagcttatgctttagactgtgtgagactcatcagtcatgtggagctttattttgctttgtttctttcttcagattagtgagttttcgaagcgaaatgtttgctttgtgatgtttgttgatgagcaaacgctatcgaaactggctagtgaagggcatgttcctgacaagcaaggatttgttggtttgtggaaaactgtagtagtgagcaatttgccttataatgatatgcgaaagactggcaaggttccgaaatttctgtcacaccgcctttttccttcttctaggtgaggtcagttggctagtactcaagctctgagacttgaatcagtgacttaaatgtcttatacctatcctcatttcttgtttcaggtattcaatttggctagatagtaagatgagactcactacagatcctatgctgatcattgacttcttcttatggagaacaaaatcagaattcgctatctccaaccattatgaccggcattgtgtgtgggatgaagtgttacagaacaaacggctgaataagtacaaccattcggccattgatgaacagtttatgttttaccgatcagatggtctcaagaaatttgatccttcagatcctaattctcctcttccaagttgtaagtaatcaatcaacccttaacttctctcacaccatacacatttactagttttgtttgtttaatgtttattgagtgttatgtcttgttgttgttagatgtaccggaaggttcttttattgtaagggctcatacaccaatgtcaaacctcttcacttgcctttggttcaatgaagttgatcggtttacctcacgagatcagttgagttttgcatacacataccttaaacttcagagactgaattcggatagacccttgcgcctaaacatgttcaaggtaaaatagaaagaaaaaaaaaagtatataagagagtgatcattggtctcagttctttcatgagtacataaaaatcataatcaacttggttttcatttcaggattgtgagcgtcgagcattaactaagctcttccaccatcgcgtagattcatcgcctccttcacctcctacttgattgattaagtatagatagtgttcttatgtttctacaatttttgtacttttctcctctttatacttttagtctaactttgaaggagatgaaacatggaagaggaacctaattgacattgtgtatgagccattatagtaactttacagcaaaattcactgcagatatataccaaaaaaaacagcactgaaccagttactgcttaaggttagtggaaaacacaactacagtagggattttgactggaaaaaactggaaaaaaagaagtaccaattctgaagacctctaattgagaatatggtgaatttttttctaaataaaagtagatttcagctgggaaaaaaacacacttttttcaattttgttgatcatataaatataataaatatacaaaacatgttgatatgaatggggatgtagctcagatggtagagcgctcgcttagcatgcgagaggtacggggatcgataccccgcatctccatttcttttttgcatttgttttaacattatgtggcttagggtgtgagtaagagacgtaacttgtcggagaagttacaacttttaccaacggttacgtagagtaagctatgtaaacatatagataagtgtgtatgttgtcttaagtaaaaattgtcgagaataataaagaagtggaaataaaaattgtcgagaataataaaagaagtttttccactttttcatcctttgttttctctaccatg

SEQ ID NO: 11754 - DNA, 3000 bp, Unknown
  misc_feature (1)..( 3000): cDNA_ID_2707372_gDNA_ID_2214515_Annot_ID_133933 3000 nt of promoter + ATG
tatctataatttctactgagtgagaaagatatgtaaacttataataatgtcttgttgagtccatgatcaaatcaatttaaaagggtttcttagagaccttttgcacctaagaaaaagttactcaaagagtgacaaatgattggagagtgaaaacaaaacattatggtcagttaaaaacacagatctcaaattcagcaaaataagcagagagacattccaaaaattggctccaccaagttttaccttttttggatttagtctcaagactcaagagagagagatatgagttttgtcttagcttgaaagggttaaatcaaacgtacactagattgacagaaagagctattaatgaggaaacttaaatcaatgaaagtgtcatattacctaacatatctaagatctggtcctgaaactcatctaaaggccatgtatatgtctgaaataaaagtaaggtagacaaaaccttaattgctagttgacaatatgagagaaaagaaccaaagtgccttactaagacaataaatgcaaagaaagatcaaagatgtttgtctctgtagcctactcataagggaaatgatcgaatttaccccaaatgatcttatccagttcactgatatttctctgtaagatatttcaaaaagggctaattagatttcaagaaaagacataaatgaaaccaagatgatgacatcaaagctagtatagctagtatgggcttaaaaccaagaaacatacagatcttgaagataagtattgtacccttctcaaaagatatgagaaaataattgaccacactatatataaaaatctaatcatctaactacttagttttcatatgtggatgagagaagaacaacaaaagcaagaagacattttgtgttaagaaagcaaaacaagattactcatctttgaattctttggttggacattgcctcaaagcatccgcttgctctctttcgtcaagtgaataaaggcaagttggtaatgagatgagactctgatcccacatgacaaaaaatggctgagagaagtttctatttaattccatagagtttgtggtgaaacattcactgtcttgatgtgaaaggggttcgttcctcaggagcccaccaagagaaggagaagagtcttgtgtggtcgtttgctgcatctccattacttcatgttaccaaaagaatacaaaaaaaccccaaacataggttcaggaacagatgatgattatagaaataacaatcttatattatctgacaacaaagtggtaacagtacatcaaaactaggattcttgactgtctctagctatgtgtcagttcctaatatcttccacagagagaaggaaataatgatcatatgccaacataaagaaaatcaaatctttttaaagcacccctaagtgtatcataacatgagaaaaataaacctttaaaggaaagatcactcgattttcacaaagataacaatcacagtgctctgcctctgattaccaagtaacgtttaatgttcaattgccccgagtgaaaccattaccagttatttcaagaagatcataaactctacactcttttttgaagaacccattgtttagatgtcgtaagtagtccagtttcgtctgaaatctctgtctctctaaagtatccaattcaatgaaatcaacaggaatgtggcaatgtgcccataaatcaacattcaaaacatcgaaaacaaagtctcttctttggaaaaaaaaaaaaaaaaaaaaagcctcttctttgtgtctctttcctaaacacaaaacgaacaagcgccacataaacataacaaaagcaaatcaattcatcatctaaaaccgctccaagagaatcactaaattgtgatcaatgacgacggtccacggcgagatcaaggagacggcgccgtgtaaaaatttcacctttgaatttgattgaggagggacatattccacacgtggcacctaaagagtggttaatgataagtatcgacgcaaagtaagtatttaacaatgattaaataaaaatatgaaacaaagaacaatattgggctttcaaattggcgggttgagccaggcccatgcagtagtgcaacgcatgggcgactcgtgaaagcccagatagcaagctatcttaacgggctttctcccttaaaaaatagagttaatatcgtgtgggccgatggcccacatatcagatattaaactgataagaacagatactacacttgatcttagccaaaaggccgagaaaggtatgaatggtttagtccatcaagcttcttttatatacaccaactccaagagtgagcgattaattatttagcgatgtgggacaataccaaaacattttcttagccttcggacaaaagaacaatttggacattattgaattaggttcggttatcttaaccaaatgttttaatcttgatcagcataatccgaattgatccggtctgaaccaattcaatagatctgactaaaaagaataaactgcatacctttctagtttggttaagatgcgaatttcacatcaagagaaagctttaaaaccgtcatcacaaaagggagaaagttactagatgaagctagtaggtggaagtttgagtcatttggccgttactactacgacttgtttaatttttttctctgattcattgaatgctttattaaaaactttatctcataaccagtgtaaaaacaaatattcaaacgttaatcaatccaatttagctttgaaaaatccaccaagaagaagactagtcaatattggttgcgacggtcttgtagaggcgttattatctgttagataatattactataaacagtgagggataaagcagaaatgcttctgtataaatactatcactacttttgatcaaaacaaaaaataccatcactattttacttgtgtgttatttcatcaccttcaccttcaacatcaaacatcacatctctttctcttttatctctttttctcggtcttcaaagagtttcttagttaccaaatcaatg

SEQ ID NO: 11755 - DNA, 3000 bp, Unknown
  misc_feature (1)..( 3000): cDNA_ID_2707432_gDNA_ID_2214515_Annot_ID_133936 3000 nt of promoter + ATG
gaatggttgttgtgtactcgacctacttgcctcaaattgatcataatccgtccaatgttgagcatatgtctctcgttcatcctcaacaatcatattatgcaatatgatacacgatctcatgatgatagccaacacggttttttattttttgtattcaaatcaaatgaaaatagtatctatttatagagaatgaaaattataaattttgatatttttatgtataaatattataaaataattgaagttatataattgaaatgaaacaaaaaaaaatagaaatcaaagcaatcaatcaaaatataacacttgtcacacttattttctatcttctactttcagggatgttgatatttatcaacactaaatttgccatatcacctaacttttaattacaacaaatcaatgtagtgaaaatatttttttcaccagttgtaaaatggtttgttacaacaaatcattgtaactagtctgaggttaaatcagcttattagattttattttattttattttattagttctaacacttatgaaaattattgaacaggtgacaccatatcgattaccatgttaaatcatattttgaatcaatttataaaactataagaaacaatacacagttatatgatttttagctacggaaaattatgttgttggtctggagatgacgtcaccaaaaatccccacaagaacattttccatcttcaaaatgatgaaacctttgaacatctctaagaacaactttcctaccaaatataagagatatcaactttgctgcattgtgacaatctctacacaccctaagattcttcacaacccgaatcgttgttcccggaggagtattcaataatccaaacgttatcgcaagcttttcgctgtgatacctaagcgtaatttccttctcttggtcattcatattggcgtgaactaccattgatgtatcaggaacataacctgaaagctttagctctttcaccatttcatctaatgctctgtgaagctttgtggttgcagacttcacaccatcccctgagaaaaactcatgaaccacattgtttacctcaatcgagctgcaaccgggaactttaaccgcctttcgatctttcatcacctttcttaaagaatctacatattcccatttcttgtttctcgcgtataggtttgataaaatcacgtaatcgccaccgtgtgaatcatctagctcaaagatcctctcgctaaccttttcagctaggtccaaattgttatggctgctacaagcagctaaaagaatcctccatagcattggtgttgggctaattgggagcttatcaatgaattcatatgcatcttctaaatttccagctctactaagaagatctaccatagaaccataatgcttaatactcggaacaatcccaaatttgctaaccatctgtgagaaatactttctcccttcttccactcgaccagtgtggctgcaagcgtttaacagaccgagaaatgtgatctcatcaggctgaacattttcagacctcattctctcaaacatcaacatggatttctcagctttcccatgattcgcataagctacaatcattgctgaccaagcttgtgtatccttatacctcattttttcgaatatagacactgcatcatccaagctaccacatttcgcaaacatatcgatcaaagctgtgtttactttcacatacttacagaaactatgtttcttagcatacttatgtatccatttccctaaatctaacgatcccaacagagcacaagatgacagaacactcaaaagggtaatctcattcggcttcaagtacttaccttgcatttcacggaacaaagataaagcctcgttcggtctgtttcttctcgcataacccgtgatcatagcattataacaaacaacacacggctcaacaatccgatcaaacacacaacgagcagaatccacatcttcacactcagtgtacatattaataagcgttggacaaacatagacattatcatcaagccctagtttcatcgacaaacaatgcaattgtctaccttcttctaacgcctttgctactgcacaagctttgagaagagacgggaaagtgtagttgtcaggtaaaataccatcttctaagatctcaacgaagagactaaaaacctcaagaggattcgtgaagcgagaatacccacgagccatagaattaaaaatgacaatatctggttcagacattgcctcgaacaagtggcgtgcatatgacattgaagactccgttggagactcagtgcagaaatttatcagcttagcgacgaaggaaacatcttcaatatgagatttgatcgcgtaagcttgaatttgcatcagctctcttagagaattgcatttggaaatcagaagaatcgggttttgtgtattcacagtgtcgattttcgaatgcttagtgaacgtttctgcgtgtgagaatgatgatattagtgaagctgaagatatcgccattaaagctctgattttgagcttctcattattcaaactgacaaatcttgaggataacgataagcctgttatgtgatcatgacccgattgcaaaattaataatcaaataacccgacccgacccgaattgtaatttaataattaggtataaaaatcgtaaaaggcgctacaacgaccaatttattttccaatttaattttgctttttaatctcttttatttttatttttatttctatcaccgagaacgacatcggagacttgagagcggcggcgagcttcaccggcgctggttaacggcggccctctcaatctccagtattctcggttcaataaaagcttcaaaaaaagaagaaaaaatcgaaaattcacgaaaatatatattaatttcaattttccatatttgaattcttccagatcttatggttccttgttcttcgttctcgtggcggtttttgaattgttgatgcgacgatctcatgcccgttctagggtgaagaatagtagtagtagtaaatccgatatg

SEQ ID NO: 11756 - DNA, 3000 bp, Unknown
  misc_feature (1)..( 3000): cDNA_ID_2707424_gDNA_ID_2214515_Annot_ID_133939 3000 nt of promoter + ATG
aaatttggcgggaaaaatatttttggaaaaaaaaaattggcgggaaattgttttttcaaaattatttggtgggaaatttattttggaatattttaggcgaaaaatattaatatttcattttgtttacctaaaacaatttccaaataacggtaaatggtcattaaaatttaaagaaggtaaaaataaaaatgacaaataggaaagagtagaattgaaaaagggtaatgtgaaaagggtattctcaacaattattcaagataaaaattgtataggtgttaaataataatgtgtaaaagagaagacgatgtgaagtattaaaagaaaaaaaaaatggatgttgtatataagtaaccattgtagatagtttaagcaagaaaaattgatgttgcattggaaattaaaaaatttcaataaaattagaaaagcaactctaaatcattacttattttattattttcaagaagttataaagtattaaacaattcgttgacaaataagtttgatcgacattgtgtgacaaatttaaaacacatcattaataacaacgaggacaaatacagttcagatatcgtctactattaaaacacttcttctataggagcaaagaaaaattgtcggcaacgaactggggaccaataatattccgagtttgagttcaaactgagtaattttattttgagaaaatttgccaagttaacttataattctggtttacgtgtagtaatttattaagttgttataggaaaatgagaaaatactaagacacatccaagaaagtttcacacgaaatttacttacaaaaagattgtttatttaatacttccgtatatagatatataaatatttaacacattaattataaagttcaagataattgattatctatctttttttgtcatctgaaattattatcgctcaaacgaagtaattctgaggaaagttgtttacaaactagttatttcattattgtctacttatataatagaattaaaaaaaattattgcttaatgcaatttagttttagataaaatcattaaacttaatagattatataagttagatatcaataattgggcttgcttaaaaacataaatataaaatattattgggccgttacgtgcatacaaaacgaaccttctaacaaacaagtgtgaacgttacgacttcaaaattaaaaaaaaacacaacaactatgtccacacgtaatctcatatgattcagattccaaggagaacaaaattaaaaacaaatctcgtaaacatacatacacttcacataaaacaaaaggtacagtatataccataaatctccgagattcttttgatgtatctgtccatttcattattacacaaactaggaaactgatatctctctattcacattcctctgattctatttctctttatatatattcacccattaaccatctcaatcttataaccctcaaaatcacaatcttctcttacaaaaaactttgaaagatgaagattcttctagcatcattgtgtttgatcagtcttctcgtaatcttgccttctgtcttctctgcttcttcttcctctgaagattttgatttcttctacttcgtccaacaagtaataaaatcattctaagaatgtttctgatgattttttataatcatctaatattgttttgtgttttattgtatagtggccaggatcatactgtgacacacagaagaagtgttgttatccaaattcaggcaaaccagctgctgattttggcattcatggtctttggcctaactacaaagatggaacttatccatctaactgtgatgcctctaaaccattcgatagctcaacggtaataagatcaaacatttctgttttaaggtcaaaaatatggtttaaggtaaaaaatatggaaagttttgtacataaccggttggtttgatttggtttggtacagatatcagatcttctcacttcaatgaagaagagctggccaacactggcttgcccaagcggttcaggtgaagcgttttgggagcacgaatgggagaagcatggtacttgctctgaatcggttatcgatcaacatgaatatttccaaaccgctcttaaccttaaacagaaaaccaatctccttggagctctaaccaaagccggtacgttttgatgtcaaagtacctttttattttcccggtttggatctcattggtctaactattggtttattatgtaatagggattaatccggatggaaaatcttactctttggagagcataagagattcgataaaagagtcaattggtttcactccttgggttgagtgtaacagagatggttctggtaatagccaattgtaccaagtctatctttgtgttgaccggtctggttccggtttaatcgaatgtccggttttcccacatgggaaatgtggagctgagatcgaattcccttctttttagtttccaatttctaaattcagtctcttgaaccggcatcgatcttttgttcatggagattggtttggtcaaaaagaagatttaatgtaataaaaatttatgggatattggataatgatatagttcaatttcaataatattctacgtatccgcatggtttaactctaaaatatatagtgaaaatagttcaatttttctctaaaactagaaaacaaatctttcacaaaaaattgctaacacttttgtaaatcagttttgatatgataaatttattttttatgataaagttaaatattcaaaaaaaaatctagagcattaacgaaactgtaactcaaaagtcgaatctaaacaacaaaaagagtatgtcaaaaaaacaatcaaccataaagagtttaataacaagcgccgagaaaatcttatctataaggttttcgttctccataatttagaactctcgatctgttttatttcttcttaataacaagagatgacgacatacaaaaaaacctttgatctcttaatataatctctatttcgtttttttttgtcctttaggttttgagttgca

SEQ ID NO: 11757 - DNA, 3000 bp, Unknown
  misc_feature (1)..( 3000): cDNA_ID_2707420_gDNA_ID_2214515_Annot_ID_133940 3000 nt of promoter + ATG
ttggcaccaggaaccgtatcatcgtcaatgtcaacagtagagattatgcctacatcggcaagaaatatgataacaatgagtgaagaagtagcaaattcattcactcaaacttcttacatacaatttgggagcttgtgggagacgtttaaaactgtaacaaagttgtcgcgtgtagcgatggtggagaatggagagtgtgtgatatgtctggaggaatggcgcaaaggtgatatggagacggagctaccatgtaaacacaagtatcacttggaatgtgtgaagaagtggttgaagattcacgccacgtgtcctcagtgtagatacaaaatgcctcttgaagctgaagactagtgattatgatttctgaatcttctgactcagcatgagggttttgacgtcaacttttgtttttttaggagaaggtaatgaattcaattggaatcatgttttgtagaagcatgattaggatctattgttgaattcgtatgtgaagatcatattcccttcgaattttgtcaatattggtttacattaccaaaattaaaaatttgaaacataaccagttggtaaagtatgatcacttcatcgatcagaaacgtacgtaacatcatcgacatcgaacatgcggacatcgagtttgatgacactaacgaggttcatcgatgagcaaatatctttacgagcaaccgtttcgtcgacgaggacgaccgcacggttgttgactaatgaatcgccggcaacgatacgggcggtagcgatgttaccacgtgtagcgatggtggagaaaggagagtgtgtgatatgtttcgaggaatggagcaaaagtgatatggaaacagagctgccatgtaaacacaagtatcacttggagtgtgtggagaagtggttgaagattcacacctcgtgtcctcaatgtagatacaagctttcttgtgtatataaaagctttttgatgttgtgatttgagagattacaaatttataattgcaaaagttgtgtaattggaaatgttttgttgctttcaaggttacatcagaagaaagaggcttattgacttggttatcacaatcacctaaaattactctactggtttgaattatccatccacttgtgttgattgatttgaatcttcctcattggttgtgttatccctctgtgcttcattaaagacttgagtactatatgattccactatattcacctattcaataagcccctttatgatgtaacccaaatttttctttttgtctcaatatcgtttctactatatgacttgagtactacttgtaaatttttcttttttggtaggccctggtaaagaatgtcactcacaatttattcataaactaaaagaaaaaatatcatatgtgaatgcttctcggtctcgtggacccacgcgtatcatttacaaagagcaaagtaacaatatctggaacataagtagaagaatgaaatcttggcgacaaactaaacgcataattagctaacccatatgctagatagttaattagcttctcgatatacgtgaaaaaaatgaactatccagtctctcgaaagaaagtcatgacacaagcataccagaaaaacattgaattatactcgcttattcctgtcttaattgttattttatcatattctttcaacagatataagacgaaattctaaaaaccaattgttaaattgaccaacacaaaagagctttagtaatagtagagacaaagtgaatatattagttttttgcatgaaaaaaaaaagaaaaagaaaaagaaagttaaaaaaataaacattggggaaagaaaaatattcgtttaggttgaggcatggcgatatgaagacgatttgaccgggaggcttgtgattggtggatttttttcctactgtccgatttctttcttcctgtaggtatgtctatttcgttcgtgttggtccaccggattcccagaaacaagagtagctatcaaactgtcatgatgatgctaaatgtggggaaatatttccaatttagtggagcaaaagtcaatattaaaatgctaacaagagaaacagtgagaagcaagattttgattcacatgaggctaccaagagaccatggtacaaatagtcatagtcttggctgaaaaagtatctatatatacatttttaataaagtttttggttgaaaaatctctcaaatatttactattttcaatattaatcctaacaaaatctatttgacaaaatattgtctttaaaaaaatttacaaatcgactttatcaactaacaatttataattaattatttgtcttaatcttgcacatattaattacgtattatttgagaaaatctaaacaattagaaaagatctatactaaccatatatatgttgttctttgatcacaatattcatttacttgattctaaagcaaattagttattgacttttccgattttgttgctaaattctcgattttatgatacaaatttatctaatcacaactaattaatactaaatattattgttttaatattaaccattcattttatttgtatgtaattaaaagctaatcaaaggcatattctctcttttattcaattatatcctatacgattttcatatatttcttaaacaaaatagcatattcgaatcattaaattattttcccaaaataagattatgttaatcatgcattaattttcggaattgagaaaattgcttgctcacaaagctatttttttattcgaaatcaaaactaaccctaattgtgtatgagctctatctatatcctcactagcaaacaaatatcacaccttcattgtgtcttatgataacctttataacctctcattagcaaagccaacaaaaactcaattgggtgatacattgctaagagagaaaccaaacctcaattaaagtcataaggtataataatgtagatgaagacaaatatagattaggatatggtgttgctggtaaaggtgtgaagcgtctttgcctccttggtaccttgagaaatgtaatg

SEQ ID NO: 11758 - DNA, 3000 bp, Unknown
  misc_feature (1)..( 3000): cDNA_ID_3022908_gDNA_ID_2214515_Annot_ID_184429 3000 nt of promoter + ATG
cattgtcaccgaggaacacaattcaatcccgcagaggttagtgaaaactctcaccgagagaacttttctttcttttaatattgaatcatatcttaaaaccaaatctttgtctatcctcaaaagggaagtcgagtgctcagcgagttcttcattcgggagctatccaggctactttggaacagggaaatctcctgaaatgacaattccgggtcaagaaacaagctttcttgatgaactaaacaccggacagctgaaacaggacacaagctcgcagcagcagttcactaataataataatatcacagcatacaatcccaatcttcacaatgatatgaatcatcaccaaacgttgcctcctcctcctcttcctcttactcttccgcatgctcaggtgtatattccaatgaatcagagagagtatcatatgaatggattctttgaagcaccaccacctgattcttctgcttacaacgacaacaccaaccaaaccaggtttggttctagcagcagctccttgccttgctcaatctcaatgttcgacgaatacttgttttcccaggtaaccaaaacaaaactttctcagagattctaaatgggtttttgttttgtagactgatttgacaatttgttcttctttcttatagatgcagcagccgaactgagagagatttgatgaatgatgataaaacatctcactgaagaaactcaaaccaatattttttttcagaaacagcaagaaagctaaaactctgccgatttctgaattggttccaagaagaaaaaaaccagtggtaatccctggtagattgtgcaaccaaaccacacacaatacgtgttcatttattttttctatatcttcaatagatgtcacttaattcttttctatacataatttctcagtcagatgagattttttgaggttttccatatttctccggcgataaaagttagtagtgtctttggagggctgtcaaagtaacgccatgacagccaaaagatgagaaactctctcttccttcccttcccacaaactctagcctctgtatctattctttttcattctttcaatgtaaaacaaacaaacaaaacaatgtttactacatttttgtttttgtttttgtcttcaaagtactcttgtttattaagtgatttatacaaaagtttacaagttatgtaggatgaactaaggaagcttatgtttatgggttagagagactacattggatgattcttctaggattttgaatcaccaagaaccatcaacaaagccaacagtatctttcacacaagttactaatatcttcttaaatagttttactttgtaagaaccatttccttgagtgggtttacaatgggacggactaacttgcgtacaaagaccgttttttattcactattcataattttggtccgcagtttagtaaataggaaaaaatataaaaactctaggggaattggaaaactaaccaaaaaaaaatataattaagaaactagcataaaaaaaaaagcaatgatatcctctatattttatatattaattccaagtttaccccctctatctctttccgtctacctctctcttcccttctctctcccctctatctttttctctctctctctttctctctctttctttttttctccccctctctctttctcctcccaataaagttcctacacctacctcgttacttgttttttatttcaaattagagtctcttaattactttagggtgatatttgatttgggggtttcgaattacagagcgaggaacacaagttaggttcagggaattgactttcgttgttgcacttgatgatgaaatagggttccgttgttgcgcttggtgtattggtgatgaaattgagttccgttgttgcattttgagagatactattctattttgtaaatagtatactatttacgtataccttgttctatatacgttttaaaatgaattgtttgttttgattaaagatgttaagtgatttcattaatgttttagatttaaacccttgggttccctatatattatccctttagggtttagtatacttccatcaaaaaatattgtcaatttatatagaacgttatgttattcattgacaacactattcacatctaaattattttgtgtctattttcaaaaatttaagtcatgatatttgtagaaaactatacaactttttaatagatatatcatgaacttgaattaaattttttaagatcagataatatgagttacaattgaaaaggagtaaagaaaaaagaaagagaaaagagaatttctctcctaccacctatttctcttctcacctcaacaccaataataaagtcacgtcagctcacactaatcattctccttcttcgctgacgaagcgtaacaccaggacagtgatgtctttttactctccttgaaggttatttactacatttacaaatttatggtgttagttggttaattatttagtaaaaaagtgttatatctacaaatcacgcaaaactctattacggaccaacaaatagtttatttgaaagcaaaaaaacaaaacttggtccgtaacggattattgtccgtcttagaaatataatggtctactccgcaaacagatttgtccgtcttagcgacatattggtctagtctgcaaacggatttatccgctctgtctatttgttgcaaccttgtaagttttcaaagaggaaacacatatatatgttatggattcggtatgttattatatttcccggttctatttctcaaacacactctctcgtcttctccaataactaacttctccaaatcaaagccttcttcgagattttgcgcattcctcgttttctaattcgtaagtttctcttttgtgtgtgtttctaatcgaaacttttgtgtcaatttcaaatcggaaacctaattaatttgttcaattcgctgtgatgttaaaaacccctaattacgttaaatttggaattagggtttgtgtattagctctgtgttatca

SEQ ID NO: 11759 - DNA, 3000 bp, Unknown
  misc_feature (1)..( 3000): cDNA_ID_3022912_gDNA_ID_2214515_Annot_ID_184428 3000 nt of promoter + ATG
ttaaaatcggaaagatattaaaatacaagacatgaacaaattaacccaaataaatttgtagaaaaccattaccggtttaccacgcaacaaacctaagattggtcatataccaactaaataaagtgaaaaacgttattttctgtatgcacgaccctacacttgtcttaaatttaagaaggttttgtttaggactaatacaatctccactttattgagtttaccaaaaatgaaggccactgagaacacaagaggagatgacaacatcaagatgtgctagaggtaaagccagcgcctcgagcaggacaattcagatggctaacaccaacaccaattacttcctgagctttatgtacggaaatgaatcagtatttgaggatcgtgtattcgcttctcgttaatccgactttaagttattggtttccaagctatatggttcaaaattatggaaggttacagttttcagtttgagtcaactcttaacaatttaggagagaatttgaaggccctgttctttttccagacgctgcgatcaaatccagcgaccaaaaaaacagttgtttaacacacaattacgttgaagtctatagaaagttatgtggagaggaatcactcgattctaaaaacagcgacctataaggcatatacacgtgttgccaaaaataacagcgactcaacatcttcactagagacgtcgccggcgtccatattgagcgactgtttttgtatctctgttaaaaaatttgtcttcgtcggagtcgttgtcgctgtcgcagcgattaataaacgaacatgcccgaagttacagagaacaacaccacacactatttgtaaaattatgaagcaaaaaacacataagctaatgaatactcaagtcttgtgaattacagagtacattgaaagaagctaacagaaccattgagaaagattcaaagtaatggacataatttgaaattttgaatggttaaacgcaaaacatttctaattcactcagctagggatatgtgatcatctactgaaacccacgtacttggtgcaaatcatcacttttgcagtcaattaccatctttctcatgtaaactttaaagcaactttcattcctcatcaactagattcttaattaccttaccaaaaaaaaaaaactagattcttaattacaccttcatgatctaacatattgaaacaaaaaactatatacaagctcatatgaaagtgtcttagcatgtcccaaagtacaaaacttctgcaattttcatctctcaaatctcaagtaccaagaacaaagaacatcaaaaagcttacattgttgttgttgatcatcatcttctttcacgatctcaagttacacattacatgatctaacgaaacatgtactcagcctaatcattgaaacagaaactatatacaaaactcatgtgaagtgtcttgacatgtcccaaatctcaagtaaaaagaacatcaaaaagaacgttgttgtttatcatcatcttctttcagcagacctaagacgaagttctaaaagccaatggttaaactgaccatcactaaccttcaacatctcagacaaaggcatcaaaatcccatgttccttaagcaatctatgccttggctttatcttcctctccaagctaaacgaaaaatactgagggaaacgtttcagctccttaacatctccacgcatctcctcaataaaaaactcaactttaggaactaaattgttatcaacactataagtcaacaacgccggagatctcacaaccatcttcgctacttcttctcttgtaaaccctaacccttcttcaagatactcaattttggggattagggttcgttccacattcgatacaagcaacaccgtgttccgtgacgtaatcgtgtcgcgacccacgaatcctagggttttgaggaacgttaatgcaggacgaagctgataatctacagatgaaattagcaatcgaggacaacgagagatcgatttaggtatgtcttgctctgaaattgaaatctcattggataagaagcgaagaactggtaagatttcagattcaggatcagaagttaacaaatctggaaacatgtcgaggatacgaccaacggcgggtcttgagagtccggtggaagagagtagagtctcgacggagacgacggaggagattggagcagaacggagagatgggtttactcggagagctttgtgaggatctacgttaaggtcttgaaggtaaataagcttctcccggaatagaatcccagtatctgaagtttctccggcgaaacatctaatcctcacggcggagaaacacggcggcggaaaaagagaacaccttgctatcatcatcgtcggtgaggtagaaaaaaaaagtttcaatctttaaagtgtggataaaacaatggaagaagggtaaaatggtaattctggtgtaacggtcagataaagattaaacgacgtagttttttggttgagagttgtttctgcttgttcttcttcttccaatgaggatccctattctcaagcggcttaatcataagaccggtttttgcgcagagtctgttaaccgcaatcatcttctctgtctctatctctacctctggttttcgattcttcgtttcgaagttttttttttttttccctttcttcttcaagaggtcctttttaagatctcgctcatggttagtatcagcttggcgtttgaatttgcctctttaggtaagtttccttttcttcttctctttccttatctcttcttaataagggttttcacaatctctctgttttcttcagaaaaagattgaatctttattgaaaacccaaagtgatgaaattgaaattcatgatctgggtattatagattgcagattctggaaacgtattatgttaatgattcatttcaagttttgattttttgtgttggattgaagagaagaatagtttattgatgttttgtgaagaagaagaagaagagattttgattttggtttaatatatagttggggattaacagg

SEQ ID NO: 11760 - DNA, 3000 bp, Unknown
  misc_feature (1)..( 3000): cDNA_ID_3022917_gDNA_ID_2214515_Annot_ID_184423 3000 nt of promoter + ATG
tttttttagttaatttaggagatcttttttgaattttaacttttttggttgttgaaatagaagtttgtttcatataattacggaattttacatagtccaatatagtatgaacatatgtttggtatataataataccaaattcaacccatgcatggaatccatgttttcattttagaattctaatgaaaatttgcttacaatatcaaattttaaaatatttagaagtgtcaaaccttatttaaacaagcatataatacattacgtttaacatgtcacatgctataaatattttaattatatatctatttttaaataatcaaattagagtatttacaattttttaattttttaatctattaaatatttatgatattctttaaaaatattaaatgtattagtcctaaacaaaattttcttaagtttaagacaactgtagggttgccatacagaaaataacatttatcactttgtttagttggtatatgaccaatcttaggtttgatgcatgataaactggtaatggttttctacatttttttttttaacatctaaacaaactttattaatgtgaatcaaagtatacatgattatcaatgagattacaaatacaaccaattgtttttgtaacgaaaaaatgatgaagcaatacatgccgcattcttagtcaagtactttatcatcttcgtcatttccgtcaatttggtgtgactttcttgcttagggatcttcttctttttactgataaaataccggtaatgcagttgagagtcatatgcaacgatccatatgttacatcacaaagcttttggattgatcgagactctcatatagaatgagatgtcattggtcttggttgtgcttaaaacccattgttgtgtacatgacataaaccatcttccgatcattctcctccatagatagttgcttattgtcattatccattcatcccgaattgtctctttttccatggtagtttccattttccaaagtagatctgtttgtatagttgtaaagacaccaaattccgagatctccatttatatttgtaaatctgcgagaacaagactgcatcacatcgaatcatgggtttcagtgtggggataactgcggaagggtgggagagatgtcccaagaaaaccatatcatcgacaaagagaattacaatcatcaccataaaggtgaagagaaatcgaatgaagaaaataaatctgagaacaatctgagataacagaaaattccccatcacaattattgaaaacagaagaaaaataaagcaagtaacaaaatagaaccaccggcaaatgtcggcggcccgaaaaccaaagaggaaaaacggttttatcagtatccccttttgtgtcgacagagagataggagttgtttggccgttttcagggttatcgtctttaccattgggttttctacaaatttatttgggttaatttgttcatgtctttttctttttttaattatctttcagattttaatttttatttacatttttataaaatgataatatatagatatattaataagtcagaatatttgtaaattataatactaaaacttacaaaataagaatattttaaatagtttttcttttggaaatatatttaaataggtcatgaaataaataatctatgaaatatatgataatatacaattatagaaaagttagaatatttataaaaatgataatgataaaaaggatttttctgttttaatgataaaaaggataaaaaggatttttctactcgtcaaattaattatttaactatcaaacttttttgtttgttttaatgttaacttatcaattcagatttttaggattgtaccaaagcccctataaataaagagacaagcccgagttgcatcaaagtttgagagacaaaatgagaaggtttgggaagaaaaacaaaaaaacaaacaaagagacaagcccctcctctgaatgataatattgaaaacaaccaaaagttaaggataaaatacaatttaaagttttatatgagcttttccttggatattactggatttaacgtctacaaatattttaagaaactaatacaaccacattgatacaaagtatacttcgtccgtattatataaagttatgttttagtttaaaaaatggtttcattttaaatgatgttggtagaggaacaaacccacaatgttttacatttttaacgtaaaataattgttttattgtttcaagacttgttctattattgactgaattgtggattaaatattaacagctttttaatatatacacaaatttttaaaatatttattatttaataaaaaagattacatatcaaactgttaataaataactcaacagtcaaatgaactcgcgtttgtcaaaattaaaggttaatcaggtttgggataaactttttttttatgctgaaaatcgtcttgttatgattactttttttttaataaaagatgctcatgtaaaatatattctcccatatcttgggtagaacaaaatacagtataatttttacaaactcaagctcattttgattgggcattgaaatattaagttttatattccgtggttcaagtttatctaataaaaacttttgatgaatttgtgtttttctaatttcagagaaggtgttttattcgatctgtcgttttcaccaaactttctattttgatatatcgtcgcgcgtctctcaacaattattactataagtcttcattttttatttgggtcaaataaaagtcttgatttttcagcaatggtcctcacaaacagataagattggacggctgtgattttggtttcaatgtcagctaataatatgtaccgtgagattctctttgatacatttcgtcaaaggtcaaaagtaaacatgccacgtagggtgagaacattagatatttccatttgtagcctccccatccatgcccataaagttccagaagccactaaatgcaaaaaccctaaagcactgagaaagcttgtacctttgttgaatcatg

SEQ ID NO: 11761 - DNA, 3000 bp, Unknown
  misc_feature (1)..( 3000): cDNA_ID_3022938_gDNA_ID_2214515_Annot_ID_184415 3000 nt of promoter + ATG
agctaaaagtgttatgatctgatcaatgtgagtgggttccagtttgagtcattggccagttgttgtgtgtgtgaactgatttatttatatatttggataatgaatctttgccaatcaatggagaataatcgaaaaataatgttacccccgtgaccacaaaagaaaggaattataatgatatggtcttaattcgattaggacttattaatacaacagtactagtatactactcacattgcaactggatctcttaaataattttctaacctgcagatttcagaaagtgtttttttttatacgttcaatattcgtattttgtacgtagacgtttagcactactatacgtttttaagattccgatttaaaacacatttgctactatatttgtagcaactaaaaccaactccaaccgtagttttttagtagaaactcatacaattacaaaaaaaaattataaattaaaaaagagatgagagagaatctctaaaattgggaggatcgtttctattattcatataggttgtttttttttgttttttggatataaaaataaaatattaatactttttgtttttttagaaactatatgaatcctatacattggaggtgctctaatgtacaatccgttcggacacgttaattacagatgggggtgtatggctatatacttcacattcatacgattgttgaaccttgtgagataattgagatgattagctttagcaagaagagatgattttgttggattgtgtgcaggtttaaaacaatctgatttgcattgaggactctctgttataaaccaacatttttttattattcttaaaggactctctgttataaaccaacatttttttattattcttaaaggactctcttaattacttaaactaaaattttgattagcattgtatgttaaaataaaataatacattggataaataaattaaacaaaaacatacattggataaacttattaaccatcatacaattaacaaattaatgacatcgtcaataagatcggaagataaatgattggattttaccaatggtgtcaaagagttttacatgagaaaaaaagtagatttaatgtattgtttttcttaattacttcaaattaaagtattgtttcacatacttaataatgggctgacaagttttcggacacacattttcaaagacatgttaggattgagctgacaagtgaatctggatttacttgtattttaacttctaacttttttcaactagaaaagtagtggatatggatttcacttgaggaacaaaaatacaaaaatagaaacttagaaagcacgagggatgtacgtattttgttgcatggggagatattgacaaagaccatcgagttgggttttgttaaatatagtaatattttatgttatgatttgacgtacgctctataatttatgtgtaatgtatattagaaaattcatggaatcgtatcttgtcatataatacatatcaaataatgtgtattgtttttgttaaatataacataacgaaagattaattaattcaaacataaaatctatgtatctgtcaatcaagaatattgtgtaatgtagttaataaaatatgcttattagttgctatagtcgacgtatcacgtatgaatggttcgaattgatcccacagcatacgtgtttgtttctcaaccacaacctttattcgtccaactaaaacaaaaatgatcattatgagatttaccacaaaccacaagcatgactacaaatatcaaaactaataaaaattgattatataccaaaacggtatcaccaatttatgatgtactacgtatactttctagtaccgttatctgatttttaattatcattatataggatttttttttaaatgtctcttttacaatatttatataaaatcatattgtaatttacaaaagctgaggtgattggtaatcctaaaggcttccatatgcatataaaatcataatttacaaaattcttagatatctcgagagttttgaagattgcaaaccggaatgtgttccaaaaagttgtaatcaagcggcaattaaaaaactctaattaacttaactttaactatttttgatattgttcaaagttatggatttaaggattgataatttcggtttgagtcaactctcccagtaaacaaatgctagcaatataggggcgtttcaagttgcagaaaaacacactaattgtctctaaagtctacagccagaaacacaatctgataggtcccaaaagcaacaaacacacacaaaatccctttttaatggtagtttaaactacctatttgttttgattttctgatcaatatatggaaacaaatgaacgatggaaatggaatcaatcatgattcttacaacttaggggagacggagagatggtgaattgcataaacaactaaaagaaaagcactcattcaaaatcaacgtgaaccaactcaaccttcatgtccgcgttatcccttttggtctcacaatctattccatgttatgcccattattgtctatggataatgtttggcatataccagtgaaatttgttggacgaaatggtttaacatcccgtatattgacaaagaggtcgtgggttcggaacctttgttttgcaaaaaaatacgttttcttaaatttaagtataaaattcatataaaaatacggtttaggtatgaaaaatgccctataaatttatttgggtatgcaaatgcactcagaatgggtattaactcttttcaccagtcgagagactagagatagaacaaaatagaacaataaaacaatttaggggcttttttgcaaatatcaaaacccctcctaatttaactcttccgccgccaaatgctaaacccccaaaggccaaagcttctcctcctccttcacttcctcttcgtctacatcaatctgatttgagggatcatctcctgacgaagtttagggtttagggtttcatttatccctcccaaagtttctttctagtctcttcaattacg

SEQ ID NO: 11762 - DNA, 3000 bp, Unknown; identical to SEQ ID NO: 11754
  misc_feature (1)..( 3000): cDNA_ID_2707372_gDNA_ID_2214515_Annot_ID_184412 3000 nt of promoter + ATG

SEQ ID NO: 11763 - DNA, 3000 bp, Unknown
  misc_feature (1)..( 3000): cDNA_ID_2707440_gDNA_ID_2214515_Annot_ID_184409 3000 nt of promoter + ATG
tttctgtcacaccgcctttttccttcttctaggtgaggtcagttggctagtactcaagctctgagacttgaatcagtgacttaaatgtcttatacctatcctcatttcttgtttcaggtattcaatttggctagatagtaagatgagactcactacagatcctatgctgatcattgacttcttcttatggagaacaaaatcagaattcgctatctccaaccattatgaccggcattgtgtgtgggatgaagtgttacagaacaaacggctgaataagtacaaccattcggccattgatgaacagtttatgttttaccgatcagatggtctcaagaaatttgatccttcagatcctaattctcctcttccaagttgtaagtaatcaatcaacccttaacttctctcacaccatacacatttactagttttgtttgtttaatgtttattgagtgttatgtcttgttgttgttagatgtaccggaaggttcttttattgtaagggctcatacaccaatgtcaaacctcttcacttgcctttggttcaatgaagttgatcggtttacctcacgagatcagttgagttttgcatacacataccttaaacttcagagactgaattcggatagacccttgcgcctaaacatgttcaaggtaaaatagaaagaaaaaaaaaagtatataagagagtgatcattggtctcagttctttcatgagtacataaaaatcataatcaacttggttttcatttcaggattgtgagcgtcgagcattaactaagctcttccaccatcgcgtagattcatcgcctccttcacctcctacttgattgattaagtatagatagtgttcttatgtttctacaatttttgtacttttctcctctttatacttttagtctaactttgaaggagatgaaacatggaagaggaacctaattgacattgtgtatgagccattatagtaactttacagcaaaattcactgcagatatataccaaaaaaaacagcactgaaccagttactgcttaaggttagtggaaaacacaactacagtagggattttgactggaaaaaactggaaaaaaagaagtaccaattctgaagacctctaattgagaatatggtgaatttttttctaaataaaagtagatttcagctgggaaaaaaacacacttttttcaattttgttgatcatataaatataataaatatacaaaacatgttgatatgaatggggatgtagctcagatggtagagcgctcgcttagcatgcgagaggtacggggatcgataccccgcatctccatttcttttttgcatttgttttaacattatgtggcttagggtgtgagtaagagacgtaacttgtcggagaagttacaacttttaccaacggttacgtagagtaagctatgtaaacatatagataagtgtgtatgttgtcttaagtaaaaattgtcgagaataataaagaagtggaaataaaaattgtcgagaataataaaagaagtttttccactttttcatcctttgttttctctaccatgctctgtactggaagcaatgcttctacaattattcaagagcaaaaacaccaacaagactctgcttccgctggtgattgagccactgtttgttgcttgctagattgccaacaaaacactgctgatccaagagtgaaagcatacaccagaggtgttctttttgtatcttcatttgagccaccccaatcactgtcttgagtaaccgaacaactctggattttctacacttgtaaattgaactcaaaagttagatgtagctttgacatatcttcaaactctcttggcttcttggtagtgcttgatgagtggcacagacatgacccgtgatagataagagcatgcaatcattaaatctggtcacacgagcccacaaacaatgcttctgaactttgtcgcttcaccatattcctcatctagaccaccggagcacactgcttggtctagaaactgagctaaagaaggattcaagatcattgttattttcttgctgctgcttagctttagcttgggcagctgcacttccacgtgcctcagcagcggctcgttctgccctaacccttgcttcagcatttaccctttctctagcttctacagcagctttctcagtcttttctctagcttcggcttatgctccggctttgctctgtttctgtgagacttttggaagcctaaaaggttatgaagtggaaaatcacatgaatgcttcagttactatgttggaggaggcaagttagtgataatgagattggttctgatattagagcagctattttgaagaatgggggtggttcaaaagaataatgggggtggttagaaagaagtgttgaaaggactcacaaacgttagttcgctcttctctctatctctcacactctgtttttgttccagtttgtagtgtacacgtttaagaacttataagactacattgataaaaaaacttggaaacaatcttacacaacactgtcaacacacacgcacttacacacagtcatgctcttaaacacataattactacattggaattctaacagcaacacttgcacactactttgctttaactaaacttcaacctcaagctaaccaaaaaaaaacactttctcttgtttaggcctcaaccaaagctgcagtcctctgttgacgagtcatctccgacccatcttcttcttcgcttgttattctgttgctttgcttctcatcttcatcacactgattctttcttttcttgttgcaggtttgatctccaacaagaagatctcttattgctagtggcccacttgaaggttaaaattagcccatttttgttttacttaaccgactacaatcggaaaatatataatggtagctaggtctcgtatttctaggtttctctacgtcttttgttacttgttttttctagggcttattacataatatataagttttaacagatctttcttcgttcgatccgcagtcatg

SEQ ID NO: 11764 - DNA, 3000 bp, Unknown; identical to SEQ ID NO: 11752
  misc_feature (1)..( 3000): cDNA_ID_2707394_gDNA_ID_2214515_Annot_ID_184408 3000 nt of promoter + ATG

SEQ ID NO: 11765 - DNA, 3000 bp, Unknown; identical to SEQ ID NO: 11751
  misc_feature (1)..( 3000): cDNA_ID_2707398_gDNA_ID_2214515_Annot_ID_184406 3000 nt of promoter + ATG

SEQ ID NO: 11766 - DNA, 3000 bp, Unknown
  misc_feature (1)..( 3000): cDNA_ID_3022899_gDNA_ID_2214515_Annot_ID_184432 3000 nt of promoter + ATG
ctaaactcagagcacttgcaagtgacaatttggcaaaaaaaataatcaaaattttagatagttttggacgtttggttatccattctattttggtacgtatccatacgattatcggttttttggattccaaagtttagtatccattcggttattttgctttgaaatgttttcggatatctcggttatttttggatattttcagtcaactgtttttgatattttagagtatttttactattttatatatattctcaactatttttaattatttagtttaaaaatcactaatatttttgaaaatatatttatatttttgattatctgaaatatttcggtacgaatccatcaaatttggttctttctgttataaaatttaatatttgatttttttggattttttttgtttgattttggttcgaatttatttgcattgtgcagacaacgaatcatatgtgctcgtgcaacatgtatcaatcctatccgttaaatttaatattatcaacggtctagataaactcttaaaaagttgtagacaattacctcaaaagaagaggaataccaaaaagctgcctttggaaatcttgaaatgtagttgaacggttagtggtcgttagactgaaatgtattttattttcgtaattattttaatttactagtttatattttaaaattttgaaagttagaggtctaatatcatatttgaaaagtactatgaaaagtggtaatacagcaacacagtcaaagcatactcgaaccaacagtaaaaaaaaaaacataatgtcagaaaaaacatgggttgtatattaagacaacttatattaagacaacttttttttaagacaaaagaacaaatttgggaattgaagactctgcaaaatactgcaaggaagacataagagcaaacgaactttcacagtttttgagaaagccaattttcttttaagattttattaattttattgatgagaagatggagaaatgaccttttccgtagtaaaattgttttgaccgcattggagctagtgaatctgattctgattagggtttagaaaaagtaaaaatataaacatgattttctccaaaaatcacggtgttaatgactaggctccagacaacaaatcatactagtagatactcgttaaccgtgacgcagcgttggaaaagatatgtttagtattattttaaaatacatttgcatgctttatgcaatgtggtgcaattattctataattcaaagtcccaaacttgccggttagaattaaagactgatttttcgaatcttcatttattttgataatatgctgctgaattaatactactaaatagtaagaagcaaaattctttattcatgattatatatatgttttctataccacattatcaaagcatgcatggtaatgtgattggctcaatgattatctcaaagatagaagttttatattttcaatgcaaattttaaaactgttttcctgttttacccttactaaataattagataaatatttattattatttttaaagtatattagaggataaaattgtctttatacaatatttcttaaagaatgtgaaatttctaaaaaattcatcttactgagggaatggagggaatatactacaccgagatatgcacataataatacacgaatgtattttatagatacacttattagctatagagataatatttaggttaacataaataatcttaggttttgaatagatgttgtggttaatacgaactaatctttcatcggtttagtacatactattttcataagcggacaataaactgctgtggacttagtttaaagacgatttgtccgcaaaagttttattttatttttttggatccacaccattacggattataatttgtgaatgataaatgaaaaacgatccggtctataaaaagttttgcccaactgaaacgcggtaaccatttaaaactttaataatgacctccgataaattactaaaattatttagaataagtgatgttaattaaagactaaaaagtagagatggcccatttggatactaaaggaagaaaaggttgcagaagaaaagtcacacgcttccaaagttcctaaccatcaaaaccgcctgcgaccctcccatgtgctttctctctctccctctagctcactaccaaatttgtttagggatgctcgtgattatttcaaaactttgcagctacattttaaaatctttactttttttcttctaaatacctccaatatagtagtagaaatcatcacaagaaagaaaagaatccgacctttttttcttcttgctttggtgcaggaatccaactttttgtgaaatttaaccattgataaaaacctaaaatttttgaaattttaaaattttgttgaaaaatcaaagtttacctctatatatgtgtaacaataaattatgaaacgaatcataaaaataaatatgaaagttaatgtcaaacgtgtaagaacaggtgaacaagccaacaaatgtaacaaaacattcaatgatgtttgggtttatatactccaataactaccaaaataaccatttcttttttctttttcttaaaaccatgtttcaaagtacatgcgcttgtgcccatatgttttgctgcaaaataataaattcaccattgaaaccctaaatataactttttttttgcagagtttttttttttaaagtaaagaaagatcaaaaagtaaaaaataaataaaaggtagggaaaacagttaaagcagtaaatgaacattctataaattccacttcaaccatcaaccttcttcactcccatcaaagcaaaactatctttctccttctcattcctttttctctcactctcctccattaaagctctgcactttctcaaagagaatgttcatgtaatataacatcttcctttcaaagtctttcttttactgttttttttcttctatctttctaataaccaataaaggtataatttttgtttgaaatttgttctattgcaggggtaagatg

SEQ ID NO: 11767 - DNA, 3000 bp, Unknown; identical to SEQ ID NO: 11750
  misc_feature (1)..( 3000): cDNA_ID_1441000_gDNA_ID_2214515_Annot_ID_184405 3000 nt of promoter + ATG

SEQ ID NO: 11768 - DNA, 3000 bp, Unknown; identical to SEQ ID NO: 11759
  misc_feature (1)..( 3000): cDNA_ID_2707406_gDNA_ID_2214515_Annot_ID_133945 3000 nt of promoter + ATG

SEQ ID NO: 11769 - DNA, 3000 bp, Unknown; identical to SEQ ID NO: 11758
  misc_feature (1)..( 3000): cDNA_ID_2707402_gDNA_ID_2214515_Annot_ID_133946 3000 nt of promoter + ATG

SEQ ID NO: 11770 - DNA, 3000 bp, Unknown; identical to SEQ ID NO: 11766
  misc_feature (1)..( 3000): cDNA_ID_3022899_gDNA_ID_2214515_Annot_ID_133948 3000 nt of promoter + ATG

SEQ ID NO: 11771 - DNA, 2810 bp, Unknown
  misc_feature (1)..( 2810): cDNA_ID_1808676_gDNA_ID_2214516_Annot_ID_133950 3000 nt of promoter + ATG
atactggttgagaaaaagaatagtaggcccataaagcgcatattgcagtatttatggcccatgatggatctgaacttatagatcacttgcagtagccatggcccattgatggatctgaagttcagaacttatagatcactcatctccctccggttttcaatttgacccacccggtttagtatacgaactccggtttatataactttgacccagatctaattttattttaaccagcaaatacaaaaaacttccgatcccccttagcgtttccttctccggcgatattcttcttcttcggctcacattgcatcgtctctcactcgatccttcgttctttcaggtttgttatctcttccctgatattttatgcgcagttcgatcttcctcctttctctttttgttagctttatcgacaaatgtaagctagggttctcgcagagtaattgatcgatagcttccttcgtttgatctgttttgtgttgtgattccgacctcttgaaccgtataattgaatcgcgtttccatagtttcctctcgatttttgaatcgcgttatacaattgtctactttatgtacatttcgcttcggattcgtaaccgtagcttcgatttttgtgtttgaatcggtttgattagataatttatgcctttaggatctgcatcgattcgaatttcgatcttgaaatctatactactggtgattgttgcttgaggtttatattgatctctgagaattgactgtttcatggtgatctatttcgactaaatctttgttgatacatgtgtctggtgagatatgttgctcattgcttgagcaagcgaagtgaaaataagaaagatgttattatacttccctaagattgaaatccattggaagagatgtgaattacccactattgatcatcaaattcgtttcctgtgttccttttcaacttgcataccgtagcttatgtcttattgtttatatagtttcctgttggaactggcggagaatcacttagttgagtttttctgtggcagatgcgattgttttgaaagtgttataattgatcttgcttctgctgtgttgtatcttgtacttacatgtgatgtatgagtatcgaagttgttgtgacagatagcatatgagcctttacattgtttcaactattagctgtgagatatttgtgaaccttgtagtttatgatctctgcttttcttccatgagctgtgttttacaggctattttgctgtgtgtgttgttccacacagatgatctcattcaacaattttgcaattttacttctatttgcagggacaatcatttcggaaacatgccaggtcagaagattgaaacgggtcatgaggacattgtccatgatgtgcagatggattactatggaaagcgaattgcaactgcatcatctgactgcaccatcaagataaccggtgtcagcaacaacggtggatcgcagcaactagccacattaaccggccaccgtggtcctgtctgggaagtcgcgtgggcacacccaaagtatggatcaatccttgcttcatgctcctatgatggtcaagtcatactctggaaagaaggcaaccagaaccaatggacccaagatcatgttttcacagaccacaaatcttcagtcaactccattgcatgggctcctcatgatatcggactatccttggcctgcgggtcatctgatggcaacatttcggttttcacagcccgtgctgacggtggctgggacacatcaaggattgaccaagcacatccggttggagtcacttcagtctcatgggccccagccacagcgcctggtgctcttgtgagctctggtcttctcgatccggtttacaagctagcttctggtggatgtgataataccgtgaaagtgtggaagctcgctaacgggtcatggaagatggattgctttccagctcttcaaaagcacactgattgggtccgtgatgtggcttgggcaccaaacttgggtctccccaagtccaccatagccagtggttcccaagatgggaaagttatcatatggacagtgggaaaagaaggtgagcaatgggaaggtaaggttctcaaggactttatgactcctgtgtggcgggtctcgtggtcgttgaccggtaacttattggccgtatccgatgggaacaacaacgtgactgtgtggaaagaggctgttgatggagagtgggaacaagttactgctgttgagccttaggtttttgatgctttgctatctctctgctcttcctttaaggaactgaatcaaacattttttctttactcttttcttagtccggtttggtggtctttttcagggaatgttgaattggttttcttaaagacttttggattattttttttcttattcttttcatagacaccattttaaaattctaaaaaccaagatcttcatgatatatagtttgtctcttcatttgattttcttttttctatatggtaaagagtttaatttgaaggaattttgagttttgaccttcttccataaaattagatacgtgttgtctgtattttgaaccaattggttctacaaaaaaagaagcagatatataaataggcccaaaagggcccattataagtttatagggtatatgtggcctataggccttgtcttagacccatttagttcttctctatagaccgtctctctttcggcgtctcgtataaaaatctcatttgcttttctacaaatcactcccaaaattctctccatcaatctctcttacacactacacaaattcaacaactgaaaccaactcagagcaaaagcttgatttgacactatg

SEQ ID NO: 11772 - DNA, 3000 bp, Unknown
  misc_feature (1)..( 3000): cDNA_ID_2708417_gDNA_ID_2214516_Annot_ID_133951 3000 nt of promoter + ATG
catttgtgagagttaagacagagttaggtctgctttctgatttcacatgaacttatcgtgagagtttcttactaaacaattcacacactttatatgtatgcgtgttaaattttggtgagaaaaatgttagaagaaaagcaagattacgcttttatttaaccatcccctgattatcaaattctcgttatcaaaaaaatagttgccgataatatcttcacttgtctatacacatttaaataaaattatttaatttgaacagtcattattgtcagttggatgaggaaccctaaagataagaattattgccatttaagtattgataaagatatttaattaattgtaacttcagtgaaatttcatagaaagaaaaatatatattcatttgtttggttcttatcataatggtcccaagaattgctgcaccaaatggttgtatctcgaggcatcgatgccattacggtaaaagcaaatggtaaagtagctcataaagctacactccacaacatcaataccaatttaacattttcagatattctaattttttagctaacgtctgaattaacatattctaatttataatatgaagaaacgtaaatatttgaacatttatatccttaataactgcttagatataggagctctaaacataatctacactaattttcgcatgtgattatgcaaatatcaatactttgatgataaactattagtttgattaaagaatggcagtgtagtgatagataagttatctctaaacatagaaagagttggaccaaagtctcattctatcgctttcttttttcccatctatttgaatatttgactattcaggtggatattattctcgtataagaagttaaatatataattaactaaaattgggttcaaatatcttttattaattaagattatagtgaaacatgattttttttgtcataataaatctatagtgtcaagttcaatgtaaaatattttaagtcaaagtgaaatcatattaagacaaccgaacaaccacacaaaaaaatacataaaccattttgttttcatttctttatattcaaactaatcatcaccaaaataaaacctaacaaataaaggaagtgaaccttgtaatttaaaccttacttaacccctttatcagaataaggttttaattttaatgaaatctcacaaataattttttttctttctttcaccttaaattgactccaaacaaaaacggaaaccatgatgagccaaactaactgacatattcattactatatcttatttgttttgaattttaaaattaatagaaacctaaaagtaactctagtttttatgaacttatctctatttaacataataataactggtgtaatagttagtctttcgtataagtatggactgacatttgtttcttacccaattctagaatcacaatttaaaaacgtaggtttgcttcttcacttgaacaaacttgaaaaaaaatttcatcatttaactaagctcacttttaccaatcaacatatcctgcatactatttttcaccattacgatatatttatgtcgactaaaggaatctccaaggctaaacactattttggtgttcaaattacaccatttttagcactaaaacttctgttctatccaaccataacaccaaaaatcacactaaaaaaagaatctattattatataatttatttaaaagattttttttgttatttaatagttttgattagtatttattattagtataggattacataacattataaacatagtatattaaaatatatatttaaaaatacataaaattgtaattattttaagtattttcatacataataatataaaaatatcataattaaataaactatttcaagagatataatatattaatgtatccattcatttttatattttatatctattaatcatttgtaattttatatttattaattgaatttttattgatataataagtgaatagtgtttagagttatgaatagtatcacaccaaatttgatgtaacactgtagcattacactaaaatggtgtgaattttagagttccattggaaagcttttagtgcaaaaattacactaaaatggtgttttagagtcccattggagttggcctaagtagaaccactgaaccaatgcaacaaagttagacatatattataataatagacctctatctatgctatatatatgtaattttgcattaaataggccagtgtttgtggataactatcacgattaaatagtgctaatcatgtttaaatagtggtaaatttacccatcaaaaacaaaacaaaaaagattaaatagttctaaataacaaatattacagcccatcattagttgtcttgttacaaaggtagatgatgtagcaatagactaatagtacccattatatcgaagataaattactattcaactatacaaaactatacaattatatattatcacctttttttgttaggtttcttttgctgtttaattattattattcaaaaataaactctcaaaacattatcttatttaatcaacgcaacaaatatcgtaagcaaacatgctaaaattaaccactgtaaaacatatatttgtttctgtcgaacattttaataaaatattcttacaagactatttcaaaaaataacaaaaatataaaagtgtttgtcaacgaaaaataatttttaattaaataaggaaataatataataaaaaggtataaagtaaacttgaaatcggaaaaaaactaaaaaaggagaaagaacaaagcaataaatgaaaacctgcaaagtttcgtctttgcaccaaaaaacacatcaccactctcttcctctctttcctcacttcgctctttcttcttctcctcctacttcccaacttctctcctctctcttcacattattatattctctctgtttcttccaatccaatccaatctctctctctctctctctctcagaaactaaactgaaatattgcagagttttgaatacacggcc

SEQ ID NO: 11773 - DNA, 3000 bp, Unknown
  misc_feature (1)..( 3000): cDNA_ID_2708428_gDNA_ID_2214516_Annot_ID_133952 3000 nt of promoter + ATG
aattatgatttttgttttatttcgggatctaatgtatgataaatcattgttctaaatattgtatctaaaaagatttcctcaagtaggtgccaccatttgttgtccttggcattcttcctatcttgtttgagctataaagtagttaaagaatagtcaattttcatatgttttttatttaataaaaatgtatttttactcgaaatcattgttaatcgtaatttgtaatgttcatatttctcaatattgtgaaattaatacgaatgaaattggttgtgcaggtgatggtggtcttttatgtcccctttttattaggttttaaaccgaatttttattgatggaccgtcctctatttgaataatagatataactcatttcctgattagtcgaattactccatgtgatatacatatggctcgcacaaatttatgtacatgtacatttatgtgtgtatatatatttagtcttactaaattgagtggagggaatttttgttgtagcttttttgttttctttttaacgtcaatatgcagatgtatttaaaacatgttcatgcagccaaatttgctttatggtaaaatcatatatatactctctcttttttttttgtttaagtatttatcttattttattatcaccgatatagaagattgttcttatttcctttgtttcatataaactatattttttaattgatatgtgaatttcctcttcttttctatagttcccctcttcattttcatttataagttaacatataatatcatggatgatgtagtacttaattataatgaaatgataaatttattggagctgaaaaaaaaaattgggaaattatttcatagactgagtttaatgatattgaaattgaatttgatgtcgtgatgtactactgatcgattttaaatacacatattatataaaaattatatattatgaaattcacatataggatgcacaataaatattttttcttagagttacatgtatttatttatacataaagaggagaaatctgaatatatttttcttggttacaaagtagctccatctctgtagtccactcactgataatttacttcatttttttcattcttttaaacaactgataatttacttcacatgttaggaacatgtcaacttcattagcagtatgaagttgaataacatatctaatgaaatgttaatcatgcaatcattagatataaaatccacagttattaaatacttactaatcacacaatcgttcaattgtgtttatgtgagaggattcaaatcagtagtcatagtctgagtaccttagaaagataaagcagcccccagttaggtgttgatgtcctcttgccaaactaggaagctgatgagtgtactttatctgcccccatctttctgcataagtcgaaccaattattggttcatttttctcatttttttatttttattttcaaatagtttggggcaaaatattaagtggtgacacaataaaatgtggtgcattgccgtgtgtttcaaccgtacgatccgaagtgtttttttcaccattctcaaaattttgtggtatttgttttaggtggtgctgcgttgcaggacggtgatattttcttttttatatgttttgtgaaacgcatttttaaaattgtacatgttaacttttatcaatcaatataagattttggaaagatataattgttttggccatttaaaatgataagaaaaaaacaaatattcaaagtttgataatcatttatatgtgcaccacatttttatagttaccgtttaacttttgtttcacctgctggttgacagacggcactatccaacatatgttagcttgtttcacttgacatctcgtttgtttcatcaacatatatcgactatgggcgaacctcgaacccaaactaatcttttcggtgagtatatcttttgaattccatgttcataatgggttaatgggtctaaaacgtgatacaatttcgacttagataaatagaaatgaaacggtaggaatcaaaattgaaagggagcaaattgacgtcatatcttttagtattttacatcactactacttcgttacttttcaattttacattataaataaattactttttctgaacaaaataacttgttatatttttttcgaggtattttcacgaacatagcaaaagcctgcatagtggtaatatatacgaacaactaatgaattctcaaacaaaaatccaaacactaaggtttcgaatagagatgtgctgtgataataacgtatatatatacagaaaaatttgttactattggaactgcacagtctgaaccgcatcgtgcggtttggtctccaaatactagattaaaacgtgagatccgcaatacgtggtaaaaaaaaatattacaaagtacggaacctatttttgctttgaattgatatcacttttgttgggcttaaaagttgaaactaattggttgggaaaaggtccatagggcgatggtcaaagctcaaacacagaaagtaaaaaggaacacgtaccagtctaacttcatagagtgggcattgtgtaaccgaaccaagtaaacccaaactgatcacaaatcaaactgaaccactaatccactctgcttagttgagtattgttaattaaaagatgataactcctttaattcgataactactaataaatcctttgatggtttgtattctgtaaaaataaatctaaccgaactaataacatcaagcacaaacatatttgggctcaggctactcagtcataatgggcctttaaacggcccatactaagtcagaacaaagagcaagtaatctcaaaatgtcatcttcttcaaagaaagcaaaagaacaaaaacaaaaaatggaaaaagaataagtttcctttaaatttccccaatatcaaaaatggaagtcttactcaacaacgcacttcttttataaccgtttgacgtgtaagtggtccgcgcactaatctctctctccctctctttcttcttcttccacaaatg

SEQ ID NO: 11774 - DNA, 3000 bp, Unknown
  misc_feature (1)..( 3000): cDNA_ID_1832424_gDNA_ID_2214516_Annot_ID_133954 3000 nt of promoter + ATG
gataaacgttatttatatcaatcccaacagtagttcacttaataagccgtattactatatatacatatataaattaacacatttcaaagttaacaaacctagcgtctttcggcttatagaatcataaatgtttgtatagccaaaaacaacaactatatacagtatcttacataataaagtagtttatcacctatatttttaatagatgatgttttacattttatagagattaataaagatgtatgacatgttaatacatctcacttttttttccatatctctatttaatatagctcatctagtaaaactatacaattaataggaaatttaaaagcacattcaagcaaaaatgtgatttcataacactctttaaaaacacgaaggaaaatatatatattacgcgtgaatatatatatatatatatttgtgtcgatcaaaatgtaaatatattttctttaatcaaatttttgtacttttgaaagaagagaaccatctcatatttggatataattttttaaaaaaattaaggtataatcctgaagagaatagaaagaaaaagagagtgagaaattaaccagcataatgaagaaaggactatttcggattctgcagatgggatcacctaaagtgtcagtgaagagaagagtttggtggtcgtgaccaatctcacaactcttctccatacgacccatttgaattctgtccctacgatcatcgtagcatctgatcaccacctcttcatcaacttcttcttcccattgccccaccattctctatctctatctctctctttctctttctctttctctttatttataggggaaatgaaatgagaagagggataacaattcatacaaggaggagacccatcctatgttataatgtggaaaccttataaatagacacacaatatggaagttattaaagtgtcaggacgactaatatatatggatatgtcattatgtttttgtatattagttgtaaaattcataaaaagtttactataacttcattgattctaggataacaatttatgtgcaatctctcagatttgtagactaaaaataagattttagtaacagaataaatttaattaatattaattccaaatgacatatactactattacttttggcaaactagccttcatactttgactcaatcttttaataagatagtaattgttccaagtttataaatttaccatctaaaagaattttatatttgactaatgttgttagacatgcataattttgttttagtaattaatttcacattttgaaaataaaatttcaaatctttgttagggtgtgataatcacgtgttcgcattaaacttttcctaaccagttcaaagatacatattttccattttgactattttgattaattagtatttctaagttagcttgatataatcatcagaatatataattatgtagattatgaatgtaattttcgtagttaagtatcccccatgttgataatttcttgctattttgattgtatattgaaccacgtacccttgtttgtcaaagttccatattgattgtgtttctatgaattgttagatccgttgattgtggacacggtacgttgtcaagtgtaatttcagagaaatgtgttgaatatattgaatgacaatgcaacttaaactaacttttgtcataccttgtaactataatttgtaagtttcttgctttttaaagagtactttaatatgtgatttaaacaaatagaaataaacttttcatccgaaaaaaaatacaagtagggaaattatgaactaaccatttctgttaccatactaaaataaaagttggcagaccaaaagcaaaattatacaataatatgattgggagatgttttgggagtggagagaagaagtacagaacgaatcatatcttcactaacttaactaaccaaagccaaaacgaatacgtaactcaatatagattagcaattttctttttaatttgagcatttgaaaaatgtttttaaatataagatttattaccatttatgatctatgcaatgtattttcttaacattgttgagttttaggagtgatggtccacaacagactttacatggagcacaagtttagagtggagaacaatattctcggatatgaaatatacacatataggagatttgattaacatatctaattgtctggattttgagtaattgtcacataattttcagtgcgactgcagatttttttttttttatcacaactgcagatttagtcttttaacaggttttctttataaattacaaattaatatagtatgttatttcttaattaattaataaattacaaattaataaatatataaataagttcaattgtagtctagtttgggtcacaggatacttaagctttctcacctgagagtccatgaaaggccttgaaagacattaataaagcccaacgtagcccagatagacccataaataaatctgtcacgtttaccacgctttaacggtcaacagccactagttattaaatttatttattttttaaaaaaactcatcaaaacaaagtccactagttatattcgaggttataaacgtaattcaaggttattgtgctgttgggagctttgaagcggcacgatgataaataagttgacgccatgacacgtaagccgcttagtagcctctttcttcaaaccaaagactattcaccgttggattaagaaagctcactcaatcttaacccttcattttattaaataaatcctacgaccagaaaataaaataaataatttggttctgttatcctttcattgtcttcttcattcctggtaaaggcttttaatttcatggattatcttagcttctactctcatggtggctatcgagaaatcactcacaccaaaatctttgaagttctgagtttcaaagtttttcgaatttgaaactttcccgaagcaattttaaaccttttctcttcctttcgattttttctcttctggaattagaaaacttagtt

SEQ ID NO: 11775 - DNA, 1609 bp, Unknown
  misc_feature (1)..( 1609): cDNA_ID_3022972_gDNA_ID_2214516_Annot_ID_184456 3000 nt of promoter + ATG
tctctctagtgcttcaatagtttggaattcaaagttttgtatggaatatttatgtgacactttacaggatatatgtattgagatatctttttagtttcagttgaagtgaagtgacaaaatctcaaatttgtgttactagtttttgggttttgctgctcaatcaaaaaaaaaagtaaaagaaatgagtgagctcagattatagcgaggttaatatcatatccgaagattcatcaccacagctcaagatattttcatcactgctcacatgctactagatgcaccagccgggaatcgaacccgggtctgtaccgtggcagggtactattctaccactagaccactggtgcttgttgtttcaactacgtaagtttagttaattgtatgttatttgaagtcgagtgatctggttgaaggttttatgctatgctaatcatggtttatggttttgatcttagcgggtatttattggatggtgattttacccagttcctaatgatacaagatgaatcagtttatacatgtcaaaattcttgtttttcaaatgtttcaacatgtatatgtgttgtatcatctattgtaaattaagtacttgatctttctcttatgactttcaggaatatagttacagttccaatgagaagttcataaaatggacagtgacaaacatgaacgttactaaccggtggaagttgggttcatgttatattttaaacaacttactttgtagcattcttcttttgggattctcattttgactcggacactctccactgaaactagttctatacccaataagttggtagaccatggttttttatgagttacatttagtttattctaaataatataattataagaatatgagttacgtgttgagctttgtggtattttaaatggacaaactcatgagttcttacaattaaaacaaggactttcaataattaaataataaaaaagctataaaacaaaatatagaaacaattgttaattaaaagaattagagtaaatttccttaagagacctatttgaagtgttaagagtttttataagagttgaagattttcatccaaattcatggatcatttattgaatattattgacaatatcaattttttggatgcgaaaaaacttatctttctttgagtatgtcacataaatgatcgagtgatttggatgtaagaaaattaattagaaacgttggttttacctttttttggccgagatgctttatttcaagaacagaaatagtatggaatatagtaagagaaattgagtgataatacaaaaaatgttacttgaaaaatttagtttacataagggaaaaaaaaaagagctcagaggtgtggcatatctcaactgataattcagaaaaatgcaaaggacccacccaatgcttaagccaatatcatcatagcttagtgcaccagccgggaatcgaacccgggtctgtaccgtggcagggtactattctaccactagaccactggtgcttattgattctatctcttctagttaataattatctctaaaattaaacaaccttcacacacaaagtacgcaccaccacaggattgaaagagaacgagagagcaagccattgcaggaaatg

SEQ ID NO: 11776 - DNA, 3000 bp, Unknown
  misc_feature (1)..( 3000): cDNA_ID_3022980_gDNA_ID_2214516_Annot_ID_184454 3000 nt of promoter + ATG
tcggacgaagaaagaataaatatggaggcccattactatagtatttggccttgaaatattttggtccgagaaataataaataaacagttatggcttttcggatttggttgctttcaattttctcaaatgtttggacaagtgttattacactcacctaaaacaggatcattccaatttcttgggctcagagtctgtactttcttcttctttaaaccaaggtcttataagtattctctaaaccaagtcactaaacaataattggtcttgggtctggttcaaacttggatcaatgttgccacatagccattagccacacaaaacaaaaattgtcttgcctttatatggaatgaagaaaaatcgaattttgtaaccatttttgactttaaagtcacactcgccgtatacggcacaccaaatgaccaaaaacatttgaccaccaactttgctttaatgttaaaactttttttttgcatcccactactctcttcttcacctcctcaagtcacagtgaccaaaatcacacacttcacaagaaacaacctatggatccaaatgaatctccaccaaaccaatttcgccacgtggtggccatgccttatccaggtcgaggacacatcaaccctatgatgaacctctgcaaacgccttgtccgtcgataccctaaccttcacgtcaccttcgtcgtcacagaagaatggctcgggtttattggacccgacccgaaacccgaccggatccatttctccactctccctaatctcatcccttccgagcttgtcagggccaaagacttcataggcttcattgatgccgtctacacaagattggaagaaccattcgagaagcttcttgacagcctcaattcaccacctccgagtgtaatattcgccgacacttacgtcatttgggctgtgcgagtcggcagaaaaaggaatattccggtggtttctctctggaccatgtcagccacgattctctccttcttcctccactctgatctactcataagtcatggccatgctctgttcgaaccatcaggtaaagcatcagtgaattagttttgattcttgaaacttggtatatattgattcttgttgaaacttaattagtattgattcttgaaaagttagtattgattcttggtttgttttggaatctaaagaagaagaggttgttgattacgtccccggtttatctccgacgaaactccgagatttgccgccgatatttgacggttacagcgaccgagtcttcaagacagctaagttgtgtttcgatgaactaccaggagctaggtctttactcttcaccaccgcctatgagcttgaacacaaagctattgacgctttcacctccaagctcgatatcccggtctacgctattggtcctttaataccttttgaagaactttctgttcaaaatgataacaaggaacctaattacatccagtggcttgaggaacaaccggaaggctctgttctttacatatctcagggaagttttctttcggtctcggaagctcagatggaggaaatagtgaaaggactgagagaaagtggagtccggtttctttgggtggctcgtgggggcgagttaaagcttaaggaggctcttgaaggtagcttaggtgtagtggtgagctggtgtgatcagcttcgggtgctgtgtcacaaagctgtaggcgggttttggactcattgcgggtttaactcgacattggaagggatatattcaggagtaccaatgctagcgtttccgttgttttgggatcagattctgaacgctaagatgattgttgaggactggagagtcggaatgaggatcgagaggacgaaaaagaatgagttgttgatagggagagaggagatcaaggaagtagtgaagaggtttatggatagagagagtgaagaagggaaagagatgagaagaagggcttgtgaccttagtgaaatcagtcgaggagctgttgcgaaaagcggttcgtctaatgtaaacatcgatgagttcgttcggcatattaccaatacaaattaaggctcaaagaggttttattgtttcaatacaatgtaaggctcaatggcatgctcactaaatcatatgtatcttttgaatgactaaaaagtaaaaaccaccaccaaattatagctaaatcaatttcttaccatatgtcaaaaatttatagaaattctaatggtgggaaagctccccgcttatgcattatgcatcatcattttgcttgcttataatctaaaatgatgctttctcattaatcaaaccccaagacgtcacaaaatacccaaaacacatcaaaaatacaaggaaaagaaaaagagaacaaaattgaagcaaaacttaaaacgggatttattatgaggcctatctctacaattcacgaaatgatcatacatcttatttttttggtaggtgagaatagacaattgtctctcgcaatttattaaactgcaactaaaaagaatattacaaccgaacatgacctgagaactctgcctctaacataatcgagtggactacattaggagaagagtccaatgaatgaaattaaacctaacagcactgaagaaaacacattgttatcaaaaaatttacaactatgtagattttttttgtcaactagattgttattctgttagttataaacagaatgataacaatctccctaatttgtcttaattaaaaaaaaaaaaaaaattagccatgtgttgttttcttaaacagtctgtttcttgggattaggttttgtttctttaaaaagcacaccggtcacttgagtgtctaaaaacgttataaaaaacaacaaatgtgataatcagcaaaaacagcttgaaagagaagtagacacaatcattaacattatgggtaatggcctaaacaattggaccacgtttgttgtaaaagctatcctctgcactctgcagctttctcagtcctcacttctctcacccacaaagtcacagtaaccagaaacacgttccacatcct

SEQ ID NO: 11777 - DNA, 3000 bp, Unknown
  misc_feature (1)..( 3000): cDNA_ID_2707463_gDNA_ID_2214516_Annot_ID_184453 3000 nt of promoter + ATG
agaaattgtgctacaaaatatgttctatatagaaaatgtttacatgattatttaaattgtcacaggagctaccagttcatcaaagagctgacgcggtgaatagtctggtttttgaagcaaacgcaagagtaagagatccggtctacggctgcgtaggagcaatctcctacttacaaaaccaagtctcgcagcttcagatgcaactagcagtggctcaagccgagattctttgcattcagatgcaaaatgagccaaccttacagtctcatcatcaagtacttgaactagaccaagaccacaaagctctcttactaaacaacaacaacatcaataactgcaacaccaacaacaacaataacaactttggttatgccatgtcttctggacagttcaactctaactttgcctcaccaagcagcataatgcaaatgcagatgcaaatgcaaatgcaagaccctcttaagcaagaatctctttggacttaatgtaataataataataataattaatgttcgacaagtttgctacttggttatgttgaaaaagagaatatgggaacaggtttcgtgtaaggaaagtagtataagtcaaagcttaaatgcatgcatgtgatggtgatgagatgtagttatgctttagtactggagatctgttttttttttttctttttctctctttaatttggtttctcacttccatttttcttttaccatcgtttgaacagtgaaaattagatctaattcaatccaatttttttgtaatatgaagtcgccaagacattgctctctaaccactacacactttttctcaaacaaaccgacacaactttgccgcgttcaaattaagagacatttagattgtcttatggaatagctaaaagactagctaaactcaaaatctcagatatacaaaaaaatttattaaacttatttaaagtagtcttagaaaacatgcaaaagcaatttttctttttatggaatcaattattttactatagactaaaaaagtagattgtatttctacatgcgataaactgaaattaaatcgaatagaaaaataaacctcaagttgcaaactacattttattcaaaaagaaaatctacatgattcaacctttacaatttgactcacaatagatttattcgaccgacctgatttgattaatcataagctacacgttagaacacaaagtcgcctctactgttgcttttgtactaatccttaaaaaaatcatatagatttaattcaccaaaattaagttaggaaagaagaggtggtggtgttgaatttgattatgttatctattgatagtattcatgtgatcagtagacgaaaaattttcaaaatattgcctgtcgacatgggaagaatcgaatgactaaaaaaataatcgatcatgttctttaatttcaaatttaattatatatctatataaatacccttaacttgtttttgacgatcctaccaagccagagaacttataactgtcatattcataccatatgctatataattagtgggatataatactctatctttaactttacgcgtaacaactttttaattaggatttaggaataagaacctttcttttgtttgttaaaaaattctttctctttctctctcaattttttcactatataaattattaagttagacgcatgtatatgtctttttactaacacgtagaccggtagacgtccatgtgctccatgcacgtgtgtaaatacatctttttttgccatgtgtgaactaatttttttaatttgccaagccaaagttataattaattaaatagcagaaagagtcttaagagaaataatatgattataatggcagaagaaaagttaagatttacagatacatccaatagtgtatagccgcttaattaatttatccacacctcaacgaaaatttccgttggtgcgctaacgaattcaggctgtgaagttaaaagaaaataaacaaaattatagcttcacataagcgatcgatcttcaaactctacacatgacagaagcaaataactaaattaaatagcgtaaattttgtaataatactagaaaacctaaaaaccaaatgtaaaaaaccttatgggaaaaaatgtgataaagcacctaaaccatagaataacttaaaatttcaatttcccaatcaaggtatgatataaaaaccatggaaaacaaattctcagccatatttctatctgaccgagtctttttcaaaataatatatagacggtagagtcttatatagtaaaaacatttttttaaaactaatttatcttctcatatgaaaatgaatgcaaataaaaatgaccatatatgctgtaatgatattcaaggaagagatatcacaacaaggtcgaagaaatatacaatatctgaaagtcgactatatggtccactttccaaattagagatggaaagaagaaacgattatgcagcaaacccattgatcggacgaagaaagaataaatatggaggcccattactatagtatttggccttgaaatattttggtccgagaaataataaataaacagttatggcttttcggatttggttgctttcaattttctcaaatgtttggacaagtgttattacactcacctaaaacaggatcattccaatttcttgggctcagagtctgtactttcttcttctttaaaccaaggtcttataagtattctctaaaccaagtcactaaacaataattggtcttgggtctggttcaaacttggatcaatgttgccacatagccattagccacacaaaacaaaaattgtcttgcctttatatggaatgaagaaaaatcgaattttgtaaccatttttgactttaaagtcacactcgccgtatacggcacaccaaatgaccaaaaacatttgaccaccaactttgctttaatgttaaaactttttttttgcatcccactactctcttcttcacctcctcaagtcacagtgaccaaaatcacacacttcacaagaaacaacct

SEQ ID NO: 11778 - DNA, 3000 bp, Unknown
  misc_feature (1)..( 3000): cDNA_ID_2711290_gDNA_ID_2214516_Annot_ID_184452 3000 nt of promoter + ATG
gtgggcatccaagacaagattgaattcattgtcaaaccgttccagccaggcatccgtgcaggtgtcacaggttcctcctgaaaggctgctctctcctctttctcaagcttcatagcatattgtttttcatgtatacgtgatacgtcggataataaaaatataagtgaacagatatattcacaatgatcttaaagagcatttaatcacaaggttaatatatatgccgtttgaaaacagcagtattaaaattgtaagatatgatcaacagtctaatttcatatctctcatgacaaatatcttaatgcttttggtacgtagatagacagaagaagtcatatgaaggcttggctagaaaaatcaaagcaacagtacacaaatacttgttctgtttggattcaaaaaggttaggtctttgaatactgtgtaaagaaactacatctacaactttttggacgttaattaggttattaggttgttcaaaacgatgttcaacgtctgtcttgttgtgcgaatttttatggattaattattagtccatcatctcccataatatttatcacaccactaaacttcacatccatattattaactatgtcatttaagtcctttgtatgtttaacgaaatccaaagttgtagttcactcatacctttcacaatatttatgatccacttttttttttttttttttttttttttttttttttttgtcaaacaatatttatgatccactaaactctaaatctttattgataaatctaacaatggttaaccgaatgataaagacttccgtgtatttatgtgagacaattaatcttgttttcaagccaatggtaaaagcaagaccactttttgactgctatcgtgcaacaaaacctatgttttactagaaatgtgtgaaaccacactcattcgttaatgctaaataaacattaaatttattttgtggtgccaagaaaaaacaattagtctgatacttaattaaaataaacaattgaggcgtttaccatggttttgtcttactttggttttagttaaataagacaagttttatcaccaaagatggagtttatgaattttcttagtctggctctacgtaatccgataaaaacaaatgttgcttttcacgcatcgaattcgctgacctaagatgcttcgcagagattctgtccagatttttgtatattctttaaatagggggagtcggggagaaaataatgataattatcccaagttcttaattcagtcccttgtttaatcagtgtcttcccatgaaaactcgggcctccccaacattattattctcataatcactttacaaaagtttaaaatagtgaatgtggattaattaatagtataaagaggaagtgtgtgtggaggagagattggttgaagttttgatgtgaatgtctttcaaggcaacaaacattcacgttggaggccatttccaaaggagtcttggtcctaattagggtttcacgtcattctcacttctatagtgtattatcctaacattacccactctctctctttttttttttttttttcattcttatttttaattacctaaccaactttggtttttcgttttttcattttgtgttagaataaagtcaaatatagggcgctagatgtttttcaacatgtataataatataaacggatgatatatttttaattgtttagggtgtagaaaatgtgacaattattagttttatattacacaaatatatggtttcaaatctatatatatatatatatatatataattctagacatccattaaaatacatatgttaggattagattcatatatcttataataattttattttgtgttggctttttctctttttgttgtaaaatctctttttgttttctctgttgaacgcttctttcattttagatcgactatattgttttgttgattatttttttaattataaatcgttagcccaaaattgtgttaacgtgtttttgttcttctattatatctataaataagttgtatgaaagcatggaacgaaactttttgttggttttctcacttccttaagtaagcgattctcaaacttctgagatcatcaaatgagttcttttgtaacttctaaacatactcgatcatcatgaactgtataaccatgcatgtgtagatcttcctcttcttcaaaagtttctaattacacaacctaataaatatctttccttgtaaccaccaatctcactttcctcgacttttgtaatttaaaaaagagagaagattaagacatcgagagactcgaataaataaaaaaaagagaggttagtaatggtacgactgtcgtgtgtatgtgttaaagaaataagagaagagtcaaaaggacaacgtggggaaacttctcaatatgcatcggacgccaacctatcacgcgcctttgcggtgctcacttctacatcttcttcttctcctaacttactatattgccctcaacattctcatggtcaaaacgtcattaccaacgtcttttttagccgttaatatgtacatatcccgtcctaagaatccaaattaaggatccatatacactgtacttttgaactatttaaattgcataagattcaaacaagacttaacttaaaatgacatctattttgaagatttttttttctaaaatgataattattttataacgaaaagaatacaactttgtggtgagaagaacaagaaaaactaagaataggtgttttcatatttaggttaaataataaaacatttaaagttaagacattaattataacacacaaaaaattaaagttggaattaaatgaacacatgtgaacaccaacctcgctctctctagaaagccttcaaaaccctattataaatacacacctctcaaactctctccctttaactctaagtttttctttcttctttctctgctctcaaagctcaagagaactctatccttattaacttacaaggataactaaaaccggtgtaatcacgatcatagtagaag

SEQ ID NO: 11779 - DNA, 3000 bp, Unknown
  misc_feature (1)..( 3000): cDNA_ID_2707456_gDNA_ID_2214516_Annot_ID_184449 3000 nt of promoter + ATG
tatacttgatttgacaatttttgttttagtgtatcttatttagcgagtgtattcaaccaaataatttatttgattgaagttcgaagaatttttctactctgtattctcagttcgatttttgaggtttacattaatttacatacctcatccaactataaacaaacaaggacaagagtttgtggtccttttagaattacaaatttttaaaactattccatttgatttgtacttaccaacatattaaatttgaatatataaggtatttagacagacatattgatggttctttgcatgaaaaatctctgctacattttgttagtgcattatttctctacaatttcttgaataccaactgtttgaaagaataaagaaaaaggcagagtgtgtttgttctgttccatgcaacctcttacacactcgagttcatcctcagtcacgggcaaacaacagttgatgcaattcctctctggcaaatttctccacctttacagaactaacttcacttgatttgtatcagtagctactgatacaaatcaatttgcaatctcctcctccaaaagttgtaataatgggtgctaggggataaaaagaaagaacagaggcatacatcaaaagctagctttatcaaaccacatgcacaaagtttactcaaatcaatatcagaatcagaaaaacaagcttaatcaacaagtttacattaaagtgtttccttatcatataagaaggggattcctctttctttttcccaagccttcacttcaatgattagatcttcaatcatggcttagaaaagaaacacaatactatcatcttaagtctttgttcattacttcaaaaagagagggtaatagggttacgcgtataaagactcaccaggaatttgcatgacaagactcttagcacgttctaagtgttcgtactctcctcttacgagttacaagattgaagaggtttccatcctataaagacgatcaagaatatataataagaaatgcttactttaatcaagtcaatcttctcttgatgtatcacaggtcttcacctaccttttcgtagtcacgaagccatttttcttcttccttagcttgcttccaggtttcaactgcatctattatgcctttccttcttaaagcttcagattttgcttcctcatattagcatccaatgcagcaccaatatcagatagagcacgatcacctgacaagataacttatcttttaagcatatctaaattgctgtttttttcttacaaatagaagagttcttcacttaccctcattatcagttagctcaatactgcctgtcgagctcgacaaaatgcctttaactcgtattgcttctgaagtacattcaccttcagggtttccccagttttagttttctttgccactttgtcagccttgtctttattagcaatcctcttcgttttgggagcaccagtggattcctttcttttaccagcatcattagtactcgtcttgggaagatattttgcacaactccatttttgttttttcttagggtgatgaatgacttggcctgaggtgagaaattgagagtgtagagacttttgcctttgtagttatactctgccaaactccatccttttagccaatcatccacaaactctatgggtaaatcatcatgataccttaagtaagctagtttagaagaagtgctcacaacttcttgacccatttgaaactgatgaacatagtaattgacactgccccactttataagagcaccattgcaattaaaatatccaagatgaacatttttagttggataaaagaagacccacgacttgttgctttctccctctagaaattgaaagttgatgaaatctcactcccatggactgcgatcaaatatttcaagatcgtctatccatggaattgcaacatcaactccaaaatctacacttttaaccaaactaatcataagttaaatttcaatttacaatcgtttattaatatagtgattaagtaagttatcaagtattaatttatagagttttatttttgtataaactaaccacgagttaaggaggtgttattggtttatgatttcaaaagagttttagtgacttaaagtatcatgtagaatctgttgttatttaatcaaaaaaatttaaaagtatgttaaaagtttgtgttattcattaaagatttgtaaaaagtaatctaaaaatcttcataaattttagattattgaattcatacttttataaagtcagtaaattttttgtgttattctattaaaacaaaaaaatctctgattgtttatgatttaaattattatgttattggttcatgactttctacattttctttcacaaaataaagtcatagaaagtcatgaattttttttcaaaagattgttttgagaaactttagaagaaaatgtatttaattataatattcatagctggaaattgatctaatatttaattataatattaaagtttccagttatccaaaagaagatgtgagtttttttgaacttggtaattaaaaaaagaaagcaatatttcagatttaatacagattcataagaaggatccataagaaattaactaaaccggatctggtcttgaaatagtgacggacgcgtgtcccccggtcagagagttgccgtcacaatcacgcggagaaagagcgacaaatcaaaccttaaccgttaaaacgtcatcgtttcatatccccccacaaccgaacccctttcgttcgcccgtctctcttaaataaatcttagagatttctgcaaaattcgtcacttcaatttcaattttcagatctcaaaaactttttctcttttccgattccaatcttctctcgtctgctttcctcaaaggtacgttttatcttccttctcatagcttccgaagaatcaatctagggttaggtatttcaattctgatcggattttctctcttcagtgttctctaatctaatgggaatttcacatgttttctccaggttttttcatcactttatg

SEQ ID NO: 11780 - DNA, 3000 bp, Unknown
  misc_feature (1)..( 3000): cDNA_ID_3022990_gDNA_ID_2214516_Annot_ID_184448 3000 nt of promoter + ATG
tatgcaatgtattttcttaacattgttgagttttaggagtgatggtccacaacagactttacatggagcacaagtttagagtggagaacaatattctcggatatgaaatatacacatataggagatttgattaacatatctaattgtctggattttgagtaattgtcacataattttcagtgcgactgcagatttttttttttttatcacaactgcagatttagtcttttaacaggttttctttataaattacaaattaatatagtatgttatttcttaattaattaataaattacaaattaataaatatataaataagttcaattgtagtctagtttgggtcacaggatacttaagctttctcacctgagagtccatgaaaggccttgaaagacattaataaagcccaacgtagcccagatagacccataaataaatctgtcacgtttaccacgctttaacggtcaacagccactagttattaaatttatttattttttaaaaaaactcatcaaaacaaagtccactagttatattcgaggttataaacgtaattcaaggttattgtgctgttgggagctttgaagcggcacgatgataaataagttgacgccatgacacgtaagccgcttagtagcctctttcttcaaaccaaagactattcaccgttggattaagaaagctcactcaatcttaacccttcattttattaaataaatcctacgaccagaaaataaaataaataatttggttctgttatcctttcattgtcttcttcattcctggtaaaggcttttaatttcatggattatcttagcttctactctcatggtggctatcgagaaatcactcacaccaaaatctttgaagttctgagtttcaaagtttttcgaatttgaaactttcccgaagcaattttaaaccttttctcttcctttcgattttttctcttctggaattagaaaacttagttatggcttatgctcatgttttcgcttcgttgactatctcgacgatttctctccgacgattcctcccccgacttcatcgaaaccacagcgtaaaacccaattcccgaatcatatgcaatctgaaactaaactactctgctggaaaatttcgcgagatgggactatcacgttccgtggagctagaccaattcatcacaagcgaggaggaagaaggagaagcagaggagataggagaaggatttttcgaagcgattgaggaactagagaggatgactagagaaccatcagatatactcgaagagatgaatcatcgattatcttctagagaattgcaattgatgcttgtttacttcgcacaagaaggtagagattcatggtgtactttagaagtgtttgaatggttgaaaaaggagaatagagttgatgaagagataatggagttaatggtttcgattatgtgtggttgggttaagaaattgattgaagatgaatgtaatgcacaccaagtgttcgacttattgattgagatggattgtgttggtttaaaacctggttttagtatgatggacaaagttattgctttgtattgtgagatggggaagaaagaaagtgcggttttgtttgtcaaggaggttttaagaaggagagatggttttggttatagtgttgttggtggtggtggttctgaaggtagaaaaggtggacctgttgggtatcttgcttggaaatttatggtaaagttttgaacttttttcatagtttttatttttttttataattttggtggatttgagatcaaaaagatgtgatatgaagtggttaagatgactatagttgttataccttcttgttagttatcggtttcttggtctagctttgttgatgtggatatgtgtcttttgtttcttctaataggttgatggagattataggaaggcagttgatatggttatggagttaagactttcagggctgaaaccagaagcgtacagctatcttattgcgatgacagctatagtgaaagagctgaatagtcttggaaagacattacgcgagttgaaacgctttgcacgggctggttttgttgctgagattgatgatcacgatagggtactcattgagaagtatcaatcagaaacattatctcgtggactgcagttagcaacttgggcggttgaggaaggccaagaaaatgattccattattggggtggtccatgagaggctactcgctatgtatatatgtgcgggacgtggaccagaagcagagaaacagctctggaagatgaaacttgcagggagagaacctgaagctgacctccacgacattgttatggcgatctgcgcttcacagaaagaggttaatgcagtttctcggctactgacacgagttgagttcatgggatctcagagaaagaagaagactctgtcatggttgctcagagggtatgtgaaaggagggcacttcgaagaggctgcagagacattggtatcgatgatcgactctgggttgcatccggagtatattgatcgagtggctgtgatgcaaggaatgacaaggaagatccaacggccgagagatgttgaagcatatatgagtctgtgcaagaggctctttgacgctggtttggtagggccttgtcttgtgtatatgtacatagataaatataagttgtggatagtgaagatgatgtgataaaaaaagaggaaagagtatgaaatagctgagaaacaagtctaaagacaccgtctaagatggagggatcggaagtttctatttttgtgtatataaatctgtatgtagtaaacaataatatttgtctcaaatatgctgaagttccaacggcccacgtttttaaatgggcctatatattaaatattgtgagcccaaaacaaaccttaatgacttgaggacatctgtttcctcgtacgtatttctgaaattaagtgaatctgaaggtgaaagcaaagccggaggaagaaataagaatcacagaggtaaaattgtgatggagctcgaagatccaaca

SEQ ID NO: 11781 - DNA, 3000 bp, Unknown; identical to SEQ ID NO: 11774
  misc_feature (1)..( 3000): cDNA_ID_3022994_gDNA_ID_2214516_Annot_ID_184447 3000 nt of promoter + ATG

SEQ ID NO: 11782 - DNA, 3000 bp, Unknown; identical to SEQ ID NO: 11773
  misc_feature (1)..( 3000): cDNA_ID_2708428_gDNA_ID_2214516_Annot_ID_184444 3000 nt of promoter + ATG

SEQ ID NO: 11783 - DNA, 3000 bp, Unknown; identical to SEQ ID NO: 11772
  misc_feature (1)..( 3000): cDNA_ID_2708417_gDNA_ID_2214516_Annot_ID_184443 3000 nt of promoter + ATG

SEQ ID NO: 11784 - DNA, 2810 bp, Unknown; identical to SEQ ID NO: 11771
  misc_feature (1)..( 2810): cDNA_ID_1808676_gDNA_ID_2214516_Annot_ID_184442 3000 nt of promoter + ATG

SEQ ID NO: 11785 - DNA, 3000 bp, Unknown; identical to SEQ ID NO: 11779
  misc_feature (1)..( 3000): cDNA_ID_2707456_gDNA_ID_2214516_Annot_ID_133955 3000 nt of promoter + ATG

SEQ ID NO: 11786 - DNA, 3000 bp, Unknown
  misc_feature (1)..( 3000): cDNA_ID_2707460_gDNA_ID_2214516_Annot_ID_133956 3000 nt of promoter + ATG
ataaatggtgttttgataaaagcctcaagaaatgtttcaaccatcacattaaatgaattccacatgagtccaagctttctaatccactctttcccaagtgaaacttctctcttttactctcatagctttccttggctccttcttatttatctcactaattaatttcatttttactaagtaatttatctcactaattaatttacagtttctactttacattttccattagaataaatgatgagcctatactaatttccaaatattgcagttgtcacgaatatataaaatcgcaatggctaaaatatacacgttcaacaaaaaattgaacacctgacctaaattggtactatcttattcaagaatttcgacctttttagttaaaataaaaatatatcatctaccaagaaaaacatactccataaccctagaaactatatatagtgttagaaagtggttatgattcttaataatatatcaaattcatgtgatgcatctaaggaatgtttttaaccccaaaatagcggggacatgcatgaaaaaaccatttgactagcttgtgaccatcgcccacaataatctctacaaacttattcgcttgatgacaagcataatgtttcacatattttatgtatatattaattaatgagtagttttattcacaaaattatcaacttgggtgtgtagctaggcccccacaattaatgtatgatgcatcagatttatctagaattgtcttactgcccctccaaatcgatatcatatcaagttgtattaaaaaagaacatgcatctcaagattagtttaattcattatatttaaagtagttcaacctaagtgactaaatcacaatcaacccctaacgtaactaagtctacaaattaaaccaacagtcaactacatcttttttttttttgggttgtaagtttaaatttactaatcaacaaaataaatgattatataaaaaagaactacaatttaatatttatgatcagcatattttttctaatgaatttttaaatagttgaatgaccaaatttcgatatatctaccaacatcgtcaattgatgattttttttataactaattttcagtgttttatttctaacttttactctatgtttttacggtaagattagaagtgtcaagacttggatattattttgctttttattagaattagtaaatataaggaaaacagaaagctaaatttttttaaaaaaagctaactcggtatttcttcttcatttttgtaacagaaaaaccccacaaaatttgtaactatgcaaagtccgagtggaaatataatttgagcttaggatcattaaatccctatatagttaattagtactaaaaggaattatagaaaagaaaatgactcagttaataggaccactctagaggaagaataaatagtttaggtgttaatggagggatatattttagaattagaactgtcacattgggaagtggttcttcttgctaatgtattttagaatcattcaaaagaaagaagaactaaataattctctaaactaaacatttaatcaaaattttagaagacaaaaaaagaagaagaagagagaacagacatctttgggcacctcggagaaaaataagcatgtgagactcgatgcacatcattaaatgctttgagatgacatggaagattcggttctcggtatttgctcttttgtttctattttattttcttacccaaagaaaaaaataaaatctttggaaacggtgggggaggagacaagaagcaatgtttgactgagttcagttaaaatttattgaagtctcttttgtgttgaagagttgggacaaaaaaaaaaaaaaactttaaagacctgagggtttggtttttgcttaaactttagttgaatgagtgaaagaaatgagtttctgtttatgtcggaatttaataagtctgtaagattctgtaagaaacaaaaagaagcaatctgaaacatcagagcttcgtgctaatccgtagacttggactctagctcttgccgcctcgtcttttcttattttacagttttaactctaccttcgatatcaattagcatatcattgattatcactttctgtcagtaaaaacttgtatatcgttagaaaaaacactaataaatgtaatatttggcgatacaaaattagattgtataggattttgtttttctttttttcaaaaataaactatttattagaatttccaacttagactatatagtttcataatcaaatttacgattactttttgttttccatatgaatatgattatatatttaagaatgttaaagaagactaattttttcatttattccggtttgtatataaataggttaccattagatatgtgttatcttggagtactctacaaatattttctttaccaattgaatcatttcaatctaaaaaaatactgaactaatgtcattggtgctatttataatttgacatataattttatttaattgtaaaatttaaattctaatctttctatacaaaatttaaacaaaaatgtaattaatctcgtttaattgtaaaatctaaattcaaactcttatttataaacacataatttatatttaaattttgtttaattaaaagtaaatagattttgaatatttaaactaatatgaatatttttaagatgcacatactttttttttttttttggtaaggtttaagatgcacatactttctctaggtatctagtaatttattccttcaacgtctgaatcggcctcaaattttctgatttgggcttagtttggtccaagtgggcttaatcaagcatatcataactgtagtttgggctcataacgttttttttttttttttttttttgcgctgcgcagtttagcttttgatggtacggcttattttaacaacgaactcggaataaaaaagcttttgacagagagaacgaccataattcaattagggaagtactttcacaaaccggagaagattatcggagatcgcaaactatg

SEQ ID NO: 11787 - DNA, 3000 bp, Unknown; identical to SEQ ID NO: 11778
  misc_feature (1)..( 3000): cDNA_ID_2711290_gDNA_ID_2214516_Annot_ID_133957 3000 nt of promoter + ATG

SEQ ID NO: 11788 - DNA, 3000 bp, Unknown; identical to SEQ ID NO: 11777
  misc_feature (1)..( 3000): cDNA_ID_2707463_gDNA_ID_2214516_Annot_ID_133958 3000 nt of promoter + ATG

SEQ ID NO: 11789 - DNA, 3000 bp, Unknown
  misc_feature (1)..( 3000): cDNA_ID_3022980_gDNA_ID_2214516_Annot_ID_133959 3000 nt of promoter + ATG
ccttgaaatattttggtccgagaaataataaataaacagttatggcttttcggatttggttgctttcaattttctcaaatgtttggacaagtgttattacactcacctaaaacaggatcattccaatttcttgggctcagagtctgtactttcttcttctttaaaccaaggtcttataagtattctctaaaccaagtcactaaacaataattggtcttgggtctggttcaaacttggatcaatgttgccacatagccattagccacacaaaacaaaaattgtcttgcctttatatggaatgaagaaaaatcgaattttgtaaccatttttgactttaaagtcacactcgccgtatacggcacaccaaatgaccaaaaacatttgaccaccaactttgctttaatgttaaaactttttttttgcatcccactactctcttcttcacctcctcaagtcacagtgaccaaaatcacacacttcacaagaaacaacctatggatccaaatgaatctccaccaaaccaatttcgccacgtggtggccatgccttatccaggtcgaggacacatcaaccctatgatgaacctctgcaaacgccttgtccgtcgataccctaaccttcacgtcaccttcgtcgtcacagaagaatggctcgggtttattggacccgacccgaaacccgaccggatccatttctccactctccctaatctcatcccttccgagcttgtcagggccaaagacttcataggcttcattgatgccgtctacacaagattggaagaaccattcgagaagcttcttgacagcctcaattcaccacctccgagtgtaatattcgccgacacttacgtcatttgggctgtgcgagtcggcagaaaaaggaatattccggtggtttctctctggaccatgtcagccacgattctctccttcttcctccactctgatctactcataagtcatggccatgctctgttcgaaccatcaggtaaagcatcagtgaattagttttgattcttgaaacttggtatatattgattcttgttgaaacttaattagtattgattcttgaaaagttagtattgattcttggtttgttttggaatctaaagaagaagaggttgttgattacgtccccggtttatctccgacgaaactccgagatttgccgccgatatttgacggttacagcgaccgagtcttcaagacagctaagttgtgtttcgatgaactaccaggagctaggtctttactcttcaccaccgcctatgagcttgaacacaaagctattgacgctttcacctccaagctcgatatcccggtctacgctattggtcctttaataccttttgaagaactttctgttcaaaatgataacaaggaacctaattacatccagtggcttgaggaacaaccggaaggctctgttctttacatatctcagggaagttttctttcggtctcggaagctcagatggaggaaatagtgaaaggactgagagaaagtggagtccggtttctttgggtggctcgtgggggcgagttaaagcttaaggaggctcttgaaggtagcttaggtgtagtggtgagctggtgtgatcagcttcgggtgctgtgtcacaaagctgtaggcgggttttggactcattgcgggtttaactcgacattggaagggatatattcaggagtaccaatgctagcgtttccgttgttttgggatcagattctgaacgctaagatgattgttgaggactggagagtcggaatgaggatcgagaggacgaaaaagaatgagttgttgatagggagagaggagatcaaggaagtagtgaagaggtttatggatagagagagtgaagaagggaaagagatgagaagaagggcttgtgaccttagtgaaatcagtcgaggagctgttgcgaaaagcggttcgtctaatgtaaacatcgatgagttcgttcggcatattaccaatacaaattaaggctcaaagaggttttattgtttcaatacaatgtaaggctcaatggcatgctcactaaatcatatgtatcttttgaatgactaaaaagtaaaaaccaccaccaaattatagctaaatcaatttcttaccatatgtcaaaaatttatagaaattctaatggtgggaaagctccccgcttatgcattatgcatcatcattttgcttgcttataatctaaaatgatgctttctcattaatcaaaccccaagacgtcacaaaatacccaaaacacatcaaaaatacaaggaaaagaaaaagagaacaaaattgaagcaaaacttaaaacgggatttattatgaggcctatctctacaattcacgaaatgatcatacatcttatttttttggtaggtgagaatagacaattgtctctcgcaatttattaaactgcaactaaaaagaatattacaaccgaacatgacctgagaactctgcctctaacataatcgagtggactacattaggagaagagtccaatgaatgaaattaaacctaacagcactgaagaaaacacattgttatcaaaaaatttacaactatgtagattttttttgtcaactagattgttattctgttagttataaacagaatgataacaatctccctaatttgtcttaattaaaaaaaaaaaaaaaattagccatgtgttgttttcttaaacagtctgtttcttgggattaggttttgtttctttaaaaagcacaccggtcacttgagtgtctaaaaacgttataaaaaacaacaaatgtgataatcagcaaaaacagcttgaaagagaagtagacacaatcattaacattatgggtaatggcctaaacaattggaccacgtttgttgtaaaagctatcctctgcactctgcagctttctcagtcctcacttctctcacccacaaagtcacagtaaccagaaacacgttccacatcctatgaatccaatcaaacctcagccactcggagtccgccacgtggtggcc

SEQ ID NO: 11790 - DNA, 3000 bp, Unknown
  misc_feature (1)..( 3000): cDNA_ID_1033366_gDNA_ID_2214517_Annot_ID_133965 3000 nt of promoter + ATG
tcgtaggtaaagtataggactacaagtttgccaaaaaaaaaaatataggactacacaagtacataaaccgctgcaaaaaaaagggtacataaacaatgctatcgttcacttatttatgcttcaagaatccatcatgcttatgttttagctgactctctaaccctccgttcgaatctgtggctctatcttccaaccagtttatgatatcaccaaacacaatttctgaattttcattagtttccccatacaacaaagcatgccacattttggggtacagcttgaatgtcttgtccgagcttgaagccacttcgtataacattttgcttatgcttttatccgtcactttatcatcttctccgtgaagaacaatgaaaggaattgatacctagttcaaaagccatatatatataactaattaataaacaaggtttgtaaaatgttttcttcattatataaccaaatatacatatccataaatatgtctaaaaaaattagaacctggtgaagattcttctcaagatctaagctaaccaacaagagttggtaggcggtgttgaggcgaggccggcctttatagcaatacttgttctccctcacctgtaaaattcacataaatcatatgtatatatggttaataacaagctgatattacaagtaaaatttggcgtcttagatcagtatcactcacctgatttctgatgtgaggttctttaattgcaatgtcaataatatcatttcctggaactattttccacgttggaataaacttggctaacttgataaggattgagatcactactggatgtggctttatctcgtctgctaactgtccataacaacattcattgtattagttgataaacaaaacattttgattatctctgtgggactttcggtagttgatataatcatttcgataattgagttttgattacttgtttaattagtggtatatatactggtatttggttgtaacaagtagttgtgtatatatagaaactatgagacaaatgactaatgaagagtgattgaaccatttttctgtattatctaagggcatttattaccaatccaataagtagagaacattattgaaaaatatggattagtcccactttaagaaactatttttcgtttttgatttggactttttatctgattcttaaaccatcattgaaattaaatgaaaactatgaaataattttgggttcttaaaacaccaataaataatgcaagactaaagataactaaaaataattaactgaaaaaagagattactaaccttacacatgggtgctaccaaaacggcaccgtcccaaaaatcaggcttctttctggctaagagcaacacaactgctcctcccatggattctccaagtaggaacctcatcttccccttgttctcttccctctctacaaattatttttaccatttcttttagtatattaatgaaaatctaaacacatatcaaattaaggggtttctaagagaattaccacaaattgtagaataatgattagagacatcatcaacgagatcatcaaagttactgatgtaaccatttagaccctcagattttccatgtccttcatagtccattccatatacggcaaaaccggcattggctaacctcgtggctgcgcctgattaatcccatataattcgttatgtcgttagtacataactaaatataataacaatttgatcaacgttagtaaatattttaatatctgactgaactgttcatggtgatgctggactccatagcgtagccatggcagaggaagagcaatgcctttggttcttgcttcactggtttccatacacaagtgaacaacttcatgcctcgtgagttcaacacaaaatcctgccaaaagaaaaaacacacacacttgcattagacctaatagaatgattctgctagatcgagattataggatcaaaaaaagaaaggaataactatcacttttctacagtcacagagctctacatgagcttggaaacatatataaagacactaacctcttcatacataaccatgatcctctgtttttttgtcctgtttttatacaaagttaagatatgatcttgtttcaaagggatttatgcggagagcgagagggaaagagttagttgttgtctgatttatagaagatgaaaagagaggagtcacagaggaataaagcgaccccaaaaaaacaggggaccatgcaattacgctgcgttttggttgggatattttcctcgtagtagatgacgtcaccagaaacattgaacgagtccaagattttacttttcatatttgaatatgaatgtttcagccgttggtgcttgaccggcttggtttttcatttgaccaaatggcatactgagtcattatgaaatgctcataatttagtctttgaatattgaacttggggatggataaacatgcatttatgtctttgtatcaacttgttgacaaatgtatggttggttcattacgcgactcataattacacttttccatcacattattgattacgataacgtctttaaccaaaacttcttctaagattactccttcattcacaatctaattagacatgtcaaaaagaaaaagaaaagagaagaaatttattctgaaaagctaaattatgttattattatatttgaaatcaaataattctccttcaaaaacaaaaaataacagttcaatcggcgcgtgtctaattatacaactctctattcacttttttagtattttcttgcattaataaatgattttggtacaagatttcactactaggattttataatccctggcccataagatataaaactcagcccattagatgtgtgttgggttttatactcacagtcaaagcccaaatataacctaaaatctgattattaactcttagccgtcttcttcttcatttttctctagggtttctaatctcttataacaacaccgcaaaagagtaaagggacgctagagagagctcgaagacgcaatg

SEQ ID NO: 11791 - DNA, 3000 bp, Unknown
  misc_feature (1)..( 3000): cDNA_ID_2707532_gDNA_ID_2214517_Annot_ID_133966 3000 nt of promoter + ATG
tggtcacttggatttcggctcatatgctttatctgtgtgacgaatttgaagaatattcatcctacagaaccaaaagaactaaaaggaacattcaaaagaatagagaatgtgtgaaaacaatttggcacaagagattatgcgaaagtcaactcttgccctataagacaagtaatcacaaagtcaaatttctcaaaatttgtctttttctcagaaataaattataaacaactgatgtttacatatgttcaacttcaaatttcaaacacgattacttaacaaaactacgatagtctctgatatattgcggatatatatcgccagcccccacctcttcatcttggtctaacaaatcttagtgaccaacaaagtgattcacacaagaggacatattttggtgtatcaattcttcttcttcttctttttggtcaaaatggtattatcaattcttcaaaatctcagattttttacctaatgattctctattggtgtgtaggtttcatatctgtcaacttatcttgcaaatcaccgcatcactttcgtttcttttaatatgattttttctcgggtcaaacatatgtacgcaattaaaagttttctaagaaagaatcacattgcctagagtttaccactggttgagtaatatgctagagagagtcatgtcgctgcgcgatcgagttgggtttagttgataagcaatgaactgctcaaggcaagatcgagttggagtgaagagtaatgtatagagatcactaccctaacaagctaaccctcaactgagtaatataaaagatgctatgatccaataatataacaatactgtttttctgaatcaatctttcattaagatgagcttttaatatctttaacaaggaaggaaaacaaagcaaaaactcacacgagctcaaattcaaacacaaaaattgatgtgatcaagataaaagcttacaccttaatagcatacttccttattggaaagtacatttctttcttcttctccctctctgtcttcaacgatgcctattcaaatcagccagcaattattccattcagtacaataaaacacaggatttgttcatcacttctcaatatcaatctgaatcacactaaagaatatacaaatacctgatgcttagtgagtctcctcctgatggctctagtcttcttgggacgaagatcaagaggcaaaagcttcttgttcttgtatgcctctctcaaagcagacttttgtttctgtgagatcactgtcaacacctgagcaatcgacttcctcaccaccttgctgaaatcaacataaaacataacccatttgagatcaatgtgattaaaaaccagtgaccgaacaatccaacagtgatataactaagcaagtaagctactttatctatctatagaggataatgataggacctaggatacaaaaattacactaaacaacttgcaaaacataagcagaacttaggtaataatatatgtccataacaacacataaacataattaaacctagctaaatatgattactacataaccctgactaaccactaacaccagcaagatcataaacaaagctatgaagaattcagaatccaaaaaaaaaaagagttaaccaaaatcagaaaaatgtaacatttgatcacacaaagtgtgtatagaggaaacacatacatcttagagagcttattaggagcacctccagtgaccttagcgacacgaaggagagcaagctctgccttaaattccttcaactgacccgaaagatcagcttttgatttctccctcagctcatgaaccttgattctcgctgttcagattccatttcacaatataaaatcaaatctcataacctaaacgtacgaaattgtgtgttaacagaggaaaaagtttgagaatttaggcttacccattgcgtcttcgagctctctctagcgtccctttactcttttgcggtgttgttataagagattagaaaccctagagaaaaatgaagaagaagacggctaagagttaataatcagattttaggttatatttgggctttgactgtgagtataaaacccaacacacatctaatgggctgagttttatatcttatgggccagggattataaaatcctagtagtgaaatcttgtaccaaaatcatttattaatgcaagaaaatactaaaaaagtgaatagagagttgtataattagacacgcgccgattgaactgttattttttgtttttgaaggagaattatttgatttcaaatataataataacataatttagcttttcagaataaatttcttctcttttctttttctttttgacatgtctaattagattgtgaatgaaggagtaatcttagaagaagttttggttaaagacgttatcgtaatcaataatgtgatggaaaagtgtaattatgagtcgcgtaatgaaccaaccatacatttgtcaacaagttgatacaaagacataaatgcatgtttatccatccccaagttcaatattcaaagactaaattatgagcatttcataatgactcagtatgccatttggtcaaatgaaaaaccaagccggtcaagcaccaacggctgaaacattcatattcaaatatgaaaagtaaaatcttggactcgttcaatgtttctggtgacgtcatctactacgaggaaaatatcccaaccaaaacgcagcgtaattgcatggtcccctgtttttttggggtcgctttattcctctgtgactcctctcttttcatcttctataaatcagacaacaactaactctttccctctcgctctccgcataaatccctttgaaacaagatcatatcttaactttgtataaaaacaggacaaaaaaacagaggatcatggttatgtatgaagaggttagtgtctttatatatgtttccaagctcatgtagagctctgtgactgtagaaaagtgatagttattcctttctttttttgatcctataatctcgatctagcagaatcattctattaggtcta

SEQ ID NO: 11792 - DNA, 3000 bp, Unknown
  misc_feature (1)..( 3000): cDNA_ID_2711297_gDNA_ID_2214517_Annot_ID_133968 3000 nt of promoter + ATG
tatgtttctatataacatttagtaatcaaaaatgattagtttatcaaaaatctgtgtaagaaactgatcaatatgcttgatttaatttttgtacattttgctatatacgactaattaaggttagagaaaatcctttatgctcgaaaggacgaccacgcttgaaaactgcgtatgagctcttaaggatcagcaacgacttggagaagagacttcaagaggtaaattataagtgattacatatatatatatatatccaagatttccataaatgcatatgatattcagattggactcaaatagtggtaattaagattctaacgttagattttttttgtctctgtaaaatataaatcatccgatcgagaactaatgcacataatgatgataataggtttcattgccgtttttggtattacacggagatgatgataaagtaacagataaagcagtgagccaagaactgtacaaggttgcgttgagcgctgacaagaccttaaagttgtaccctgggatgtggcacggtttgctcaccggcgagacaccagagaacatcgaaattgtctttgccgacgtcatcagttggttggaaaaaagaagtgattatggaaatgataggtttgagtcagagcttaaacagcgtaatgatcgtttaaatttcaagaaatagtcgtttgacttattttttacacataaaagtgttttaatgaaattctggtgttttgcattttgatgtttaacgttgctattgtgaattgtactatatattttaagaaaacttatactatagtccaataatatttcctaaatagtccaacaaaataaagaaaaagttttcatcatctagtatgattttaaaatgagatttgatataacatagccaataagactccagaggaaactctctgattcggcttggtttggctaatgtttttagacgcaacgatttacttagatctagaaccatcagattaacaacataaaacaactttaagctttcgagaaacggaaaaccacaaagattcttagcaaagaattcatcaatgtaaagaacattgtctaaaatattttggtatagaggtgaaaactcataatcttgggaagcttgtatcgagctagggttttgtttatcgtatcagccttcagtcccctatacaaagttcctggtccatcaaagtatatgtaaggtgtgtcagaccatacatgcctccatcgtgtggacaagactgaagttctgatagctaaattggtcggaagagaggagaggatttgttggaggatcacatcaggaagcgagctgattgagtctatattttcacttgcatctcttgctagtttgacatctctgtagtgatgatgagcgtagcagtcaccggcggtggcaccgtctccgtttccgccgtcgtctgcctctgccattacgttatcaaccaccgattgtaaacctagatatttgtttgcaatgacatagctttttgagtttttgggtttatcacaaagcccagctatatatatccaaaatattttaaaaagcccattactaaacacgcacaacttttttcttgtccggaactcaaaatatgtatgtacttaacaacttaatctgtgaaaaaaaaaaaaaaaaaatgtactaccaacttagtcatgttgatgtgatcatcttcttcttggattgatattactagttgcagaaagtgacaatttgatctattagaaaataattgcttatactacacatttgttttctttcgtaacagattggtgggatctttaagaatgtatcgtcatgattctgattttatagaagaacaactttatttaagatgtgcttacatattctgcgaaaaaaccggcatgttgaatggttttagtctctctgaaccgacaacaagttttgtaatttttaattttatcttacagtcgtcacttgaatcttgatcgccaatttttacatacttgagaagaaaaatatttaaaaagccaaccgatttattcgtcaaagcctcaaaggctacagatttttttagccaacgagcaaatgatatgcacacgcggatatgggggatccaaaaattaaaatatttgttggtgtaactttgaagcattgacttaaaaaatagtggttttatcatatgaaattaaacacttaaaaatttttgtggaagttgatacgggatcacaattttacaaaaacaaatagttagtcaacggagtataacttagttttacgtctaatattgttagagttgacattttataacatgttaagtagtagaaattgtagatttgactttctagattcttcatttgatggttcttatgatcgttcgtttataaatttgtactacagaaacgattaatctaacattattttacgatgaagaactaaaatttgaacatatagtgtcactaggaaaaaagattgattttcaccttaacatctccaaacgtagtaagtagatgtgagtttgatttgctaaatcctaaatgaaaaaaaactaacaaaacacagtcaaacgtgaaagaatttttgagggggtgtttctgataaatttacgacttaaggtactagtttaatgttattttgaaagtttagggggtggttttgaaacgtcgccaaacttgaattgccacttgtcagggaatattttatcattttaaaaagaagtaacaaaaaaaacgtgttgccgtgtagaggggtgcgaggagaatctgttaaatcgtcgctatcaaacaagaaacggtgtcgcattatcgtatagtcctcttcctcaaaatcctacccaatataaacagagccgtacaacaaaaaactcgatatcttatcaaaaactcgctctccatccaacaaaacccgaagaaagagagattcagactcaaatctctcagtaggaatggttagttacgttaagatcaaatactctctggtttatatctctgtcagaccatatctgaaaatgttttaaatttgttcttcttatgtaacgaattggggtatttggt

SEQ ID NO: 11793 - DNA, 3000 bp, Unknown; identical to SEQ ID NO: 11790
  misc_feature (1)..( 3000): cDNA_ID_1033366_gDNA_ID_2214517_Annot_ID_184467 3000 nt of promoter + ATG

SEQ ID NO: 11794 - DNA, 3000 bp, Unknown
  misc_feature (1)..( 3000): cDNA_ID_2711293_gDNA_ID_2214517_Annot_ID_133971 3000 nt of promoter + ATG
agttgctggaattgaagttgccactaaagttcctactcccacaagagcttgccttctcttccaattgtttccgctgcctttttggtaagctattgaattttaataaaaatcaatccacacaagtcaatgtattacgtatgagaaggaaaatgtcacaagagtttagtttcttactactctccgaggagtcggccttaccaccggatgaaagtaaacaacaagctttgagtgatggatttggacagagaatttctgtctggtaagaaatatgaatcaatgaacaataatgatttttagttttcagaaatggagactggaatcagaacagtgttattaaccttgtgggagattgttggtgagaaaccaccacagcggattgagagtgaggagactgccatagtggctacaattcacaagacttttgatgatcaatgaacattgccttagtgttctatgtggataagaaatttctgattttcgtcatttctcggacttctccattcatcaacatgtggataaaaggataatgaaagatgcaaacaatatgtggtgatagatcgatttatgatcatttactggttagagaagatactgcatttgtatgtttacagtttataagttagtgagttttaaaaagagaatcttgataagtcaaaaacatagaacttgaattcaacaataaactgcaacatgaatgtattgtaaaacgtttttgctccaaaatactacaattaccagatgatagtaataataaatatcttaaaagcaaaactgagactacaagagacaaaaccacaatagtctttataactgcagagatagatagacttagatgatgccgatcttgttagcaacatccaaagcatcatagtctggtgtaagcctcacgtaagccttcttggttccatcaggcctgtaacaaaaccaaaccatagtgtcaaatatattgaacataatcaatctcacaacaaggcttcatagaaaaatactctttaaagtacctgatgagtgtgttcactttcttggtctggatgtcatacatcttcttaacagcatccttaatcttcttcttgtcagcacgaatgtcaacaatgaaaacaagagtgttgttgtcttcaatcttcttcatcgcagattcagtggtgagtgggtacttaaggatttggtagtgatccaacttgttccttggagtagcgctgatttttgggtacttaccagttctaggcttggtaagagtctttggcctgtggaaggtgaccttggtcctaatctttttgtccttcttcttgaaggcttgaccagacttcacagcctttgccgccttcaaggccttggccttaggatcagccttcttggtagtatcaactgcaaattacatacaacagagagtttaagcatcatataatactttgatacaaatctgacttcaatacatgaatactcagaaacacgtctacagacaaaattcatttggatactacattaatctcacttagttgaagctaatcaggaagatattgaaactaatcacctaacgaaacatgattagaaaacattaatcgagaccagatactagcgggttcagcaaaactaaagtctagtagaagaagatccaaatccatcatgttccagtgaagattcaagtggttatcaatgaaaagatcgtacctttagccggagacatggcttgaaatgattcttcacacacgaaatctgtgaaatttttagatagaaacccagaaagcgaagctcagtaatgaatctgaagaaagaaatgtaggacgatttcgagagatagtttgcaaaatcgagacacgaacctggagaggtgaagccgctgattctcaaaaccctaacttacgccgcaacaagttttatagtggaaactgaaaccctaagatacttagttgggtctataatgggcctttttaccacaatcatcatctaacccagtaagctttggattgaataaatgggccttttaccataatcgtccatcggacgcataagccataagtgacgaaaaatttcattagaaaaaaatgaaaatgagcataagatcactgattcttttggttgcacaaaaagatacttaaaagataatatgggcttgcaacattgtaaataggcctttgaccaaaatcatcatgtaaaacccaaatagaaagtgagcgtaaatttaagttactagtttatttttaacgtaatggtattggcgtaagaaacatacaaacgtgtcttttgtcttaccatacaaacgtgtcttttggcgtaagaaacatatttgcttcttctcttgtgtctatgacctttctttggttttgccattccaaagtaaattattacagaataaaatttagtcagctttggtttgacttgaaagcatacaatctttgaccaaaccaaagcaaatcgaacaatggctaaccaaaaaacaaaccaattggtcacgaaactaaacaataatcatttacttacgcttgacaataagagaacaacaagcctgctctacatgtctaatattttacgataattgtgaagaagaaagctttagctgaactggcttctaccatttttcaaaggttcttctatatcttgggtcggttgtatctaatacagtttttatactacataatagagtttgagagggcacatatgtgactcataaccatgtcatgtcacggggtcgtttaattgcagttgaatctcaactgtacacgtgtgtatgatgactcctccaatcacgtgcgagatcccaaatccattgagagaacgccacgtggataattagcagagacgtctcttctaaaggctggtccaagtatctctgtggaggaatgtcttactaccacaacagtcgtagtagctagcctcaatctttcttaattaccgattttaccctcgccgtctcttcaaatttcccatttccttaccactctctctctctctcaaaaaaaaaaaaaaaaaaatacaaagtctctctccgccgccggaaaaatg

SEQ ID NO: 11795 - DNA, 3000 bp, Unknown
  misc_feature (1)..( 3000): cDNA_ID_4262156_gDNA_ID_2214517_Annot_ID_133972 3000 nt of promoter + ATG
ccaagaccgtcattgaccatgtccgtattgtgtataatgcaagctgcatgaattaagaaacaattttcagcaacgaggaaaaaaagacttgattttgttttcataaacttggaaacttacaatgatagctccaactggatcaatccaataatcaatgtaattggccaggattactgcaatgagtccaatgatgtttgtgatgacgtcgaagaaatgatcttgagcataagctttaacgatctcgttagtgaaggatctgcagtaaagaaccagaagcagtttgaccaatgtaacagaaagcatgatcccaactacccaactctcttgctcttttgttaggttgaactccttgtgctgtatgaaagagatttcgtgaataatgtatgactttcaaagctctagaccaaagctaggtgatcaagattcagacatacgctggataacattgtgcgaagagattccaagataatctgcaatccaagtgttgccatcactgatgcaaagactaggattccctgaaaggatttgaaccaaaaatcacatattgagaaatcggaaaaactttattgacttgtcgaaggtgttaatagttgcacagagatatcaatagcagaaaacaagcttgcttaggccgattcaataacataacatataatagaaatatactaatggaagacagatcatgtgcattagtctttaaaaggatgatacaaaccagtggttgcatgcgtttcttgccaatgggatactgatacgggttgggtgtctgcatggagaaggcggtaaaccagaggatgaagccagaaagaagatcaagaagagagtccaatgtagaggcaatgatagctaaagagccactagtgacagaagcatagactttagcagcaaaaagaagcatgtttgcaatgtttgatattctaatcgccaatgtctcgcttttagccaaattatcctgctcttcctatgtacacaaaacacaaagaaattcagaaaagtatcaatcaacaagaacaaatgcatcatggtttcaacaaatgtgacaagtagtagcctcatttaggctaacctttgacattccaggaacaaagccacgttctgcaagttcatccatttcagtaaagccctcaagcatctctacttgctgctggtaataatctgccacattgtcttccggacctgaaaacaccaagacacatagcttcacaaaatcatatttgatctcttcacaaaatcatatttgatcacaaaatcatatttgttgacattacttccacatccaaaagaaagattagagacaaaaatcaaggatcgggattaatgaactctagactaatcaataccaagattcaactaaatctcaacttcataacaagagtaaaaatatatctttgaagaatcaaaaatgctaaagatagcaaacaaaagaggccgaattcaaatgttatcagctgctgctaaagattgaaactgaagaagacgataagaaaatggaaatgcggagaggaggagcaaattgtttacccaaacaaccaagacagttgtgtagtttactcggagatttcttctccttgtgttccggtgaaacctggaaatcatcgaaatttaactgccaggaacggtcaccgttaccgtgaaactcgagcagcgagatcccttcgtcggaatctggactagctggctcaaccatttttccggcggcggagagagactttgtatttttttttttttttttttgagagagagagagagtggtaaggaaatgggaaatttgaagagacggcgagggtaaaatcggtaattaagaaagattgaggctagctactacgactgttgtggtagtaagacattcctccacagagatacttggaccagcctttagaagagacgtctctgctaattatccacgtggcgttctctcaatggatttgggatctcgcacgtgattggaggagtcatcatacacacgtgtacagttgagattcaactgcaattaaacgaccccgtgacatgacatggttatgagtcacatatgtgccctctcaaactctattatgtagtataaaaactgtattagatacaaccgacccaagatatagaagaacctttgaaaaatggtagaagccagttcagctaaagctttcttcttcacaattatcgtaaaatattagacatgtagagcaggcttgttgttctcttattgtcaagcgtaagtaaatgattattgtttagtttcgtgaccaattggtttgttttttggttagccattgttcgatttgctttggtttggtcaaagattgtatgctttcaagtcaaaccaaagctgactaaattttattctgtaataatttactttggaatggcaaaaccaaagaaaggtcatagacacaagagaagaagcaaatatgtttcttacgccaaaagacacgtttgtatggtaagacaaaagacacgtttgtatgtttcttacgccaataccattacgttaaaaataaactagtaacttaaatttacgctcactttctatttgggttttacatgatgattttggtcaaaggcctatttacaatgttgcaagcccatattatcttttaagtatctttttgtgcaaccaaaagaatcagtgatcttatgctcattttcatttttttctaatgaaatttttcgtcacttatggcttatgcgtccgatggacgattatggtaaaaggcccatttattcaatccaaagcttactgggttagatgatgattgtggtaaaaaggcccattatagacccaactaagtatcttagggtttcagtttccactataaaacttgttgcggcgtaagttagggttttgagaatcagcggcttcacctctccaggttcgtgtctcgattttgcaaactatctctcgaaatcgtcctacatttctttcttcagattcattactgagcttcgctttctgggtttctatctaaaaatttcacagatttcgtgtgtgaagaatcatttcaagcc

SEQ ID NO: 11796 - DNA, 3000 bp, Unknown
  misc_feature (1)..( 3000): cDNA_ID_2707520_gDNA_ID_2214517_Annot_ID_133974 3000 nt of promoter + ATG
accaaggatctctacctttgatcaagattcatgaacatttcaacttgaccaaggcggttttcgatgtaacacaaggcccaagctattacaacaacgcgttagacatcggtcctctctcgctgaccatcaagaattctcaatctcttacactatgcagatggatgttcgaggtaacaaagttagtctctaaattcttttgttctaagataattcgaaagttatatgttactatctttgttaataggaagtaatcaaaccgtccatatcatcatcttggagatcattccaattctacaagttacaagaattgcggtggatcgataactcgatgaaccaagaacaaattaattctttgatctcttttctcaaactttgtccatcaatagagcgcctcttcattactgtaagtgttacacacctaaaaccttgttactttgttagttcttgcgtcgtgctaatacctttatttattttgtaagatcgattcaaatacttatagttcaaacgaagaagttagtgttaatgctgaccatgcaagagtagtactaagggatctagaagtggtcaaattggaaggattcaagagtgaagaagataagaatcaactgatatttgctctacaagagatagtcagtatcgatcagcctctgcttgtactgtcttcaatttcttgacttcggcttggaatggaaacgacaaaagagttatgtctaaagatacacgtatgaacatgctttaattaacctgctgtcattttaacgcgtggatatattccatttcttgctatacaagaaatcctcgtgtaaacggaacttaaatttggctacgtcaagtttacagattaaagatttttcaccagtatgtattattgtaatgtacttactatgataaattacttaaaacaacatcaagttgattttcgcaagtatgtgtatatatataagggatccaaattctcgtacacacttgcaagttgcaacttaaacctataatgcccaaatatttggcttaggtgaagtatcgtttttaaaccatgtacgtgtcttcttctctttttttgacctgttcaacaaaagcatgcatgtgtggaaacttcagctgtcaacgaaagaaaagcgtgcatcaattcatcaaaaggtcattttaaatcgattaattaacgctaaaccaactaaaccattttgattacatcatcaagtttgctcgttggacttggttaaaatacaattgcctcggaaaatattgctaaggaattactttcttaaacttagtacaacttaattagttcgaaatgctctgagttctttttttaaagtaaatcaattacgtttagaaacaaaatgttatatatcatccaacggatgatgtgaagacacataacgtggacaaaacaatcactctaattaacaataattttgtggccaaaaatatactggacatttttacaccaaccccaaatggctcagacaggccttgtggtacaaaactttcaaatggacaccctaacaaagacttattcaagttccacgtgtaataaaacatgctgaaaaatgatatatagcacaagaatactcattactcacactattgcatggtacaacatatagtacaaatttagtttagaaatatcgatctatggacttctatattattatacaaacaattttactagactaaaatgacaagatctcagtcgtttttttaaacagactatctaagaagtgaccacattttatagtgacattcataagtccaccaagaactagtacaacctcactcaaaatcgaatctcttctatagcaatgaagtcaattgggctactgtcccgttgtggcccaatttaaagaaaaatagaagctatctcattgaatctgtcaacagtaaaactgttttgaaaacgtataatcccaactataaaggtcaagttccaaacaaattatatcatatgagcagttttgctaaagagagaaaaaaagtgtaagaatgagcaaaaagggaacagatcaaatgcactggcagaaaaagaagctccatgctgcctcaatcatacctgcccccactaggtatataagctaatctcacatgtggtaacactcttctcttctatcacccgcacctttcttctttctttgacagtgaaaatagaaagaaacaaagacagctgttgttgcattctccacggcacactaaccaacctcgcacatttctcaagtttcttacaatcttataactaatggtgattaatctttaactttgactaattactacataaaagtatttcatcaaacgaaactctcgtgatcatcattgtcatgggttggttagagcacgaatcatacaaggtttcaataatacagcaaaattggttaccaaaagattccgaaacagttcaatatttgtcgacaactaccttctgtatataaagtaatgacgcaaagacgttaataaatgttgcagtgcaataatctggtccggtctagtggtgtctagacccaacttatatcatttagtcaagtctcataatataatcgttgcataaatagacataaacgaagaatatctgaaacaaaaaaacaaaacttaaaactcgtcgccgtagttgaccgttactttttgatttttaattattatgaaatatcacattcaataattaaaactatgtgttaagaaaatttaattttatgtaagatgacacagaaatacacaaagacttgtctgtctttcacttttttagactctttgacccattttcttcataattcacgaaaacccaaaaattaaaaacaaaacaaaacaaaataaaatcaaaactaacaaaaaggaaaaaaaaaaaaaaaaaagtatctcaccggaaacgatttcttcgccgattccaagacttttcttcctaagctttttaacagatccggtgaaaatttcaaaatccgaagaattctctaaagctagggtttcttaattcacgagacggaggtgatataattcccccccgtcgtagctatg

SEQ ID NO: 11797 - DNA, 3000 bp, Unknown
  misc_feature (1)..( 3000): cDNA_ID_1808666_gDNA_ID_2214517_Annot_ID_133977 3000 nt of promoter + ATG
tgtcttgctgttttatctgttttctcatcctttgccatggccaaacgaaattaattctagtctgatcatcattatacaactttgtaatgttttccaatatgatttgaccagatatagctttgtcaccatgctatgctatatgtgtgttggtgtaattatgcatacgaagtcaaatgattgtttttgttacgaaagaattacatttaacaaaaaattatctatgtactcgttaaaattagtctgtatttaattaaaggaaacgtagaacttatctagctaaaattgtaccaaaccattatatactacatcggatttagttttccaaacacattacacatccgcccaatttatacacactatacctaaatctctgatccaaaaattcaaacatatcggagtatgtaccaaatcgaacagaatttaacataaaatatgcagatttgagtggagcaaagagtgatataataatggcaaaacctaaaccacgaaaccaacctgaagagcacaccaacacatatctgagatgtgtctcggcactatcttatctagagttttcttttatatatttacattaaataaaaaaataaagaaattccgcactatatgctaaagcttttcttagacaatggaagtcatcctttcctttgcttcttaatttggtttcatagcctcaattgctcctagttcaagaacaatattttcagatgaaatttatcacataacaaaattgcacaggtggtggtgggatgatgaatcatcttaagtcttaagcttcactataccacttgttttggcggagatgattcgacatttaaagatattattcatatatttcttgaagtttatggtagtcttcgagtgttgaaaatttctgcatttaccaaaaaaaaaaaaactgtattaatgtctacttggattttttaaagtttaaacttccagtttatgaagcattggcttttcctatatactgaattttcctattcatattaattttttaaaatttgttttgttttaggtcatgattcttaagattttttttatttatttatttatttataattaactgattttgtaccgagctaacaataatccactaaaatatttacattgaccaaccatgattgtaatcccagtaaaaaaattagtcatatagttaagtgtcaagcataaaaccaccattaattggttctttgagatattaattaatatccttttaagtaatgaatatgccgtctaatatccggctttgaaagctgtattgttttgagtctttcattttgaatgatatttttatttgggttcatgacttcttatctgtattcttctatatcgaataacaatagtaaaagaaaattgtgatattttattacgaataaactatcaaatcaattgtaatgcatccgctacttaaaaaatccagctaagttaattcggtgtcaactcagctttgccaaatttgtccaatatagtgggcaatttgacattatcacccaatctttttacagggtaatttgtgtaaattcatgatatgtctttatgagaaggaaaaagaaaaagagagttcatgatatgtataaacgcatgatatattacaattaaagaataattttgatcaggtttgaatttcactaaccatcataactgatttgacaaaaatagtatattcttaacaagttaaagtaacaaacatcatcactactcaaaattttattatccgaattaattttgtttagcaaatcacactgaaagatgattggaatatatatcgtcagggagggttcgcataacatgcctacgatacaaaattaggctgtcgggaattaaactctgtggcattcgtcagatacgtataaattcccttattatttttatcaaaacattactattattattctatgtaagagatataggttccaggtggggagaatcataaagtgccaaaaatctcaaccacgacgttggccaaaagttattttgttttctttccttccacatatgatccgattcggatttcataatgcgtttttccatttataaaatgtgttatgtggacatacatttactaattgtttttccagctcctttcaagtaatatttaatttggtgggttcaattatatatctcttcttatcttttttcataaacagcaaaagcataatcgacacggatccacttgtgttcctcaattgaatctcactatacccatttgttggctaaatgtcatattcgtttgctaactcttttatttttttctcttttttttatacagaaaaataaaaataaaattcagataataattattacattagtacaatagaaaataacttttaaattatataatgctatttttattcttagctattacaataatatttcttttttaagcttgttagttacaaaacagcaaaattaacagcaaacttgttaatttgggataattttgacatgtcttttttttttttaaatgtaaccacggtaacttgtttttctgtagtatgaaataatgtgaaatctatgggatatccaatggtattgaatattgttgaatccagtgagaagtactcagtttccttggttaaaagttcagacttaaaagaaaccaaggaccaaaaccggaagcttaatttaaaatttaataagtaacaattgtagttgatgtttccatcatcatcacgaccaccaattacttatataattatgtatgctcctataagaaatcagagataacatcaaaaccatgttgtattctacaaagcaagaatagcatatacaatatactctactatcaaaattgcattacttagtggaatccctagaattcctcctaactcaaaagtcatattttcttctttttttaattcccatgaaaaatattacaaaaccctaaaaaccctcctataaaaccaacctcaacccctcccacatttctccatcagctctttcttacatcatattccaatctatcactttataacaaattaaagtctacgttgagatatg

SEQ ID NO: 11798 - DNA, 3000 bp, Unknown
  misc_feature (1)..( 3000): cDNA_ID_2707509_gDNA_ID_2214517_Annot_ID_133980 3000 nt of promoter + ATG
ttattaatgtcaacgtcaaccatttttaaaaaaaatcatagaaatgcatattgtttattttttattattatttaattgcaaatttgcaatcgtgaaggactcaaaagccgtatataaacgaattatgtaaattactaataacatttttggaaaaaatgtgaatattcaggatataaaaatagtataatacttaaattattgttcgtacaagaatgacacgtaactgcaaacgcgttgacttcgtaggcctaattaaaacgcttatgaaattgccaataaacacacacgggaaaatagtaacatccaaacattgcatggaaaagagtttaaggtttgtgaaggaatttgagaattttcttccttactttttttttctttctgaaattaaaattgttttcttccttcaattttgatgaagaagaaaacacataaacgttgcaaaacgacactatacatgttgacttttggtaggcgtaaatgattcgttttactggcaaattatgaaaagttagggctttttaataacattttttaatgatccgacacaataataattttgcatgatgattagaaataagaagacttgaccttatagataggttggttacatatgttttcacagaaatagtactcccaaacatagccttgcgagatatgtagccaacaaagtaatatatgtatttggtaacgtgacccaaagaatcttaaaaagcgtataatcttattaaattccacgattggtgaattaaaatgaaggaagcataatgtagggttacaatgatcatatgtgtgtttatgagactggaactggtcgtttggaaagagcaagggatgagaaaacggataaaacggcaagagagacgaatgcgaagagaagaagactggccgatgcatatcctttactaaagaacttatccactggatcagtcgaatcaaattctattaatgctatgtatgtgtctttcaaatctttgctcactccaaatcctgccgccgaacccgttgcaagtaaatatgatattacctgtccaaatttgaaccagattttgttatatatcaatatacagtatgacttataattttaatgtatttaaagatagtatttcctcaaaaatgatataaataccttatcaccgtagaaatcgaactgataagtaagaggatgtgtttttccggtggcaaattgggagattgttaagaacagttgtacaacggcgtaaactagtccgatgacggcagcggacagcatgtatcttcatgaatgatgaatccaaacatatatgcaaaaaataggtaaaaatagttagtcaaatattggatacaaaattttcacagagaaggtaaataatttatttacctataagcatagacatcgttgaaaggcaatttgatagacgtgcttgaaatttcgagagtgacggtgttggtgctgatgaggaccaccgttatgaggaggaaagccgcggtcaaaaccctaaggagaaggagcactgtcctcaacgtaacggacggtggtgccggaggtggtggagccatataaatcttcccgttaattaatcgttacgctttaaagagtaagatgaaaatgattaaggctaagatgttcgaatgcaagacatggaatgttgactaatttatagccaaaatttacgttgactcgagttcgaagagttgatttttgttacattataatatttaaccataatgtaaaatatatatatgcacaaattgtattcttcaattcgtgctggagcttgctggaactcgatcaccacttctaagttctaacttagtaattgaagtcgtgatatattttattgacatatggtattaatttagatttaaaacagtttttagccaaggaattgtaagtctaaattcatagtcttcgtagccagaaggcaacctttgatattatttttattatctatatctttttttttttttggacaaagcttgtatctacatctaactgagaaaaaagaatgtttttctttgtcatattattgttctcaaattctgattatacaacttttgacatcaaatcataattatgcaatcaaacaaacaaaccaaaaaagaaatatgcgactagcgtaatttttgcgccacaatgtattttatatgcatagcaaatcattagaatcctagtacaactgtacaaagttcgagttggacacctagcagcgataattcaaaccatgtttccatctaatgtaacagtatagacttagtcgtctatcaattttaggtgcaatcattcgtattaaaaagaaaacttagtttttttttcatactgtttagaggaacaaaatacatgtaacaagaggtacatttttgtttgagttaaattttacaatttttgaatatatagtcaacgaagaccgaaaaagttgagtcaattcctaagaatcaatctgccacatgcatcgccgtgcttgaagggcggctcactgtcttcttgcttattactacagttaaatctttttttttcaacatctaatgctatacttttaatctataatatatattagatgtgacttaaggaatttcaatagttatacataataataaaaatgaatatttgttagtgttacaaactgtgtgtcataatcatcattcatcaggatttcaaaaatatctcaaaattgttgtaagttcatgtaattcgaaatgaatgtgcactataagaaataaatttacaatttaaaaaatgcttcaatactggttacaaaaaaaactttcaatactagtattatactacttacttagtcaaaaaagtttatgaatatggttttttctgtatgttaatatttttaactgaaaatagtaccgacataacaagtaaagatatctttatttaaagtaacaaacattaatttcacttcaaattctcactattaaggattcctctctttgtagccacatttcaccatcactactttgttttcgcatatctttaaattttgtatacgtagcaaactctttcgagaaaacaag

SEQ ID NO: 11799 - DNA, 3000 bp, Unknown
  misc_feature (1)..( 3000): cDNA_ID_2707505_gDNA_ID_2214517_Annot_ID_133981 3000 nt of promoter + ATG
actggaactggtcgtttggaaagagcaagggatgagaaaacggataaaacggcaagagagacgaatgcgaagagaagaagactggccgatgcatatcctttactaaagaacttatccactggatcagtcgaatcaaattctattaatgctatgtatgtgtctttcaaatctttgctcactccaaatcctgccgccgaacccgttgcaagtaaatatgatattacctgtccaaatttgaaccagattttgttatatatcaatatacagtatgacttataattttaatgtatttaaagatagtatttcctcaaaaatgatataaataccttatcaccgtagaaatcgaactgataagtaagaggatgtgtttttccggtggcaaattgggagattgttaagaacagttgtacaacggcgtaaactagtccgatgacggcagcggacagcatgtatcttcatgaatgatgaatccaaacatatatgcaaaaaataggtaaaaatagttagtcaaatattggatacaaaattttcacagagaaggtaaataatttatttacctataagcatagacatcgttgaaaggcaatttgatagacgtgcttgaaatttcgagagtgacggtgttggtgctgatgaggaccaccgttatgaggaggaaagccgcggtcaaaaccctaaggagaaggagcactgtcctcaacgtaacggacggtggtgccggaggtggtggagccatataaatcttcccgttaattaatcgttacgctttaaagagtaagatgaaaatgattaaggctaagatgttcgaatgcaagacatggaatgttgactaatttatagccaaaatttacgttgactcgagttcgaagagttgatttttgttacattataatatttaaccataatgtaaaatatatatatgcacaaattgtattcttcaattcgtgctggagcttgctggaactcgatcaccacttctaagttctaacttagtaattgaagtcgtgatatattttattgacatatggtattaatttagatttaaaacagtttttagccaaggaattgtaagtctaaattcatagtcttcgtagccagaaggcaacctttgatattatttttattatctatatctttttttttttttggacaaagcttgtatctacatctaactgagaaaaaagaatgtttttctttgtcatattattgttctcaaattctgattatacaacttttgacatcaaatcataattatgcaatcaaacaaacaaaccaaaaaagaaatatgcgactagcgtaatttttgcgccacaatgtattttatatgcatagcaaatcattagaatcctagtacaactgtacaaagttcgagttggacacctagcagcgataattcaaaccatgtttccatctaatgtaacagtatagacttagtcgtctatcaattttaggtgcaatcattcgtattaaaaagaaaacttagtttttttttcatactgtttagaggaacaaaatacatgtaacaagaggtacatttttgtttgagttaaattttacaatttttgaatatatagtcaacgaagaccgaaaaagttgagtcaattcctaagaatcaatctgccacatgcatcgccgtgcttgaagggcggctcactgtcttcttgcttattactacagttaaatctttttttttcaacatctaatgctatacttttaatctataatatatattagatgtgacttaaggaatttcaatagttatacataataataaaaatgaatatttgttagtgttacaaactgtgtgtcataatcatcattcatcaggatttcaaaaatatctcaaaattgttgtaagttcatgtaattcgaaatgaatgtgcactataagaaataaatttacaatttaaaaaatgcttcaatactggttacaaaaaaaactttcaatactagtattatactacttacttagtcaaaaaagtttatgaatatggttttttctgtatgttaatatttttaactgaaaatagtaccgacataacaagtaaagatatctttatttaaagtaacaaacattaatttcacttcaaattctcactattaaggattcctctctttgtagccacatttcaccatcactactttgttttcgcatatctttaaattttgtatacgtagcaaactctttcgagaaaacaagatgaagctcgtggttgtacaattcttcataatctctcttctcctcacatcttcattttctgtactttcaagtgctgattcgtgtaagtgtttacttaatctagttaataattgtaggtcatgcatgtatcattttgaaacaagttttctgaaattctaagattttacatatatatgtgataaatgaattagcagcatgcggtggaaagtgcaatgtgagatgctcaaaggcaggacaacatgaagaatgcctcaagtactgcaatatatgttgccagaagtgtaattgtgttccttcgggaacttttggacacaaagatgaatgtccttgctaccgtgatatgaaaaactccaaaggtggatccaagtgtccttgaacgttctttgaagatcctcatcacatacatataacttctacgtactatatgtgtggaaatattaatcacattctatgtttgaaatatataaaataaaatcaatgcccccaatgttggaaatcttcaatgtgatatcttaatatatatcacgaataaaaaagtttaaatttctcaatctcatttttaatctttaatctaatttcttaacacatcaacgaatctttaatctttaatcatgtagataattatcagagcacctaaacattgcgccgttttgtgattatacaaagtaacatcgtgctgtttttgacttttgaaaaccacagatccaaaaactgtttactttcctctaagagaaagcaaagccgagtgagtccaagcgagttttgagagattcgttgactcactaccggagaacgacgct

SEQ ID NO: 11800 - DNA, 3000 bp, Unknown
  misc_feature (1)..( 3000): cDNA_ID_2707498_gDNA_ID_2214517_Annot_ID_133983 3000 nt of promoter + ATG
aaaaaatgttgatgattaaggacaattaaatcagactaaaaaccggtttaattctattaatcattcctggtttttctctcctagacctcatcttcttgaatcttgattaccaaatccgattcttgaactgtgttttaccaaacttttaccacttgaatttactaagcttctgcaatctccatcactttcttcttgtaaagcttctcctctgcatcccttaagaacttgaatctcgacaatggcgaagatgacggtgaatgtgatgatgacaatggagatgatctcactagtctattaaactcagcatcagaggatgactcaaacaaactcgagatctcttcttttctaccattacaagactccattagcaatggagttaaaggaggcgtgaacaacgaaggagaagcacgaggagtgagatatggaggagttatgacaccactttccatattaagaaacaaatcattcaaactctttccttttgtggaaaccacatcttcagattccatttcttccactgtttcttccatgattgtgaacagaaacctcggcacaagccctggaccaccaacattctcaaacccattattaagaggacactgttgttgagtgtcaatgggtttagggtttgagaaagaggaagaagaaggagaagaagaagaagggtttgtgctactactgcaacagaagatgaagagaagctctctggttccaggggtagaatagtcatttcgaaaatcaggtcttctcgtcgtcgacctcttcttacaccaaagcaagtaataaagctcagcgagaagagctaatagcaagcaaccaaagactatgcttagagcaagtcccacactgctcagagatctcatctttcttcttctagataagattcacttctcttgttcatcgttactccaacacaaagagaagacctttttatccgattcgaccaaatgtgaaatgcagaaggaatggacactatggcggttgtttatgattctgagaatagcaagggtttttgcagagacggaagaagaaaataaagttgggatgaaagaaaagcttgggaatgtggaaaaaaaagaaagaaaagcttgggaatgtgaaaatataaataatttcctaaaaaaggtgttatatagccaagtgtgtaagtgtaagtgaaactctcactcatattttagaatcaataaatgcataagtgaatacgaaattttacccttaatgaaagactttagcttctgaccatttttttttcttttcaatttatatgtcaaatgatgattttatcattgaagatgtatgaatcgaactccatgcatcattattctgacaattctactaacaattaaaatatgggagagatgactcgcgcggtgttgtagtatatggatcatgttcacagtgattcgtgcatatatatttgaaacatatgaaattacgaggaacaaaacaactctacttcattacaccattctgaaaatatttggcaagtttatctctattaatcctatattaagaatagaactccaaacctagtacactaaattaattaataaacttattttggtataaccacgggatggatgatggaagaaggggactttcaattttgactactttatgattttctgatgtttgatctactacttaactttgttacaaaaagaataccattgcaacaaaaaatttctttaatcacaaaaataaacattgttttttttccttttatcttggtttcccttacaaagcatcatatggatagcacttcaaggccttatagcccatgtgatgtgacgcatatgaagtaagagatgtgaacttgaaactgattataacacaagtagcctgagatagagtgagatttgttttgttttgcggttcttcatgttgattgatatcaaagtcagagtcagattagcctaccaaatcgaagtgtcagtgattccacctcaataatacaatttcgtaatgtgcatcaacaactatctagcctcctccatcaaccaatcacaacttcatgtagtaggctagtagcattgataatgatatccctttttagacttgtttccattcgtcatataccacttgatgacttgtttaaatccctttattctctttagtccgtgtaccaatatttttgcaaagaaagtagaatcatggattactcataactaacagaaacgttgagaaattggaaaatatgttcatagtgctaaggaggaaaactacttcttcttctcttctcaacaattgcaaataacacaagaaactaaaactgtgactcagtcttggcctcccaagtcacaatttcatgtttacaaattttctcctgcaaatatcatttcattttgcaaattaataagtttagtacggtgattatattcccttggatttatcaaataaaacccaacatatgagtccattatgcatcctcacatgaagtattttgcatttccttttatacacaccacaaaatatacagcaaacttcaactaaaacacaatctaataaataaaaaatagaacacttagttcccaccacagattttattacaaaaaaaacaaaattatcattatccgtattttatatcgtgcatcacaatttgtgattattcattgtattaacgagcccacacataaaagatcttaattatccatctacaccttaaaatctacggaccgtcttacattaatacagctagttcaccttgtgaaatctcggtaataccctcagctgcaaaagatagaagtttcatagaacggtacgtgttcattacccaacccagctttaaattttcttcttacgtgtgtatgactagacacgtaggtcccactcagcaccacgacaacccaataataaacatataaaaacaaaaagaaattaattaattttttttctttcttcatatatataattcgtttcttcttcctttttccccgagatttttttcctctgttcggtcggccattgaattgttgttgattcattggctctaaaacgaaa

SEQ ID NO: 11801 - DNA, 3000 bp, Unknown
  misc_feature (1)..( 3000): cDNA_ID_2707490_gDNA_ID_2214517_Annot_ID_184489 3000 nt of promoter + ATG
ttgcacagagaagctctcggattcttcgggtatatgtcggaggagaaaggtattgatccagacaagtacagtttcacttttgctttgaaggcttgtgccggatctatggactttaagaagggtttacggatacatgatttgattgctgagatgggtcttgagtctgatgtttatataggaactgcgttagttgaaatgtattgtaaagctcgtgacttggtttctgcaagacaagtgttcgataaaatgcatgtgaaggatgttgttacttggaacactatggtttccgggttggctcaaaatggatgttctagtgcagctttgctgttgtttcatgatatgcgttcgtgttgtgttgacattgatcatgttagtttatataatctgatccctgcggtttcgaagctagagaagagtgatgtctgtagatgtcttcacggacttgtgattaagaaaggttttatctttgctttctctagtgggctgattgacatgtattgcaactgcgcggatttatatgctgctgaatctgtttttgaagaagtgtggaggaaggatgagtcttcatggggtacaatgatggcagcttatgcacataatgggttctttgaggaggtattggagttgtttgaccttatgagaaactatgatgttagaatgaataaggtagctgcagcaagtgctcttcaagctgctgcatatgtaggggatttagtgaaggggattgcaattcatgattacgcagtgcaacaaggattgatcggtgatgtctcagttgctacttctcttatgagtatgtattccaaatgtggtgagttggagatagccgaacaactgttcattaatattgaagatagagatgttgtttcttggtctgccatgattgcgtcgtatgagcaagcagggcaacacgatgaggctatctctttgtttagagatatgatgagaatacatatcaagcctaatgctgtaactttgactagtgtgctacaagggtgtgcaggagtagccgcctctagattgggtaagagcatacattgttatgctataaaggctgatattgagtctgagttggaaactgccacagctgttatttcaatgtacgctaaatgtggtcgattttctcccgcgctcaaagcctttgaaagactgccaattaaagatgctgtggcattcaacgctctagcgcaagggtatactcagattggtgatgccaataaagcatttgatgtgtacaagaacatgaagttacatggtgtatgcccagactcaagaactatggttggtatgcttcaaacttgtgccttctgtagtgactatgctcgaggttcttgtgtttatggacaaattataaagcatgggttcgattcagaatgtcacgtggcacatgctcttatcaatatgttcaccaaatgtgatgccctcgctgcagcgatagttttgtttgacaagtgtggattcgagaaaagtactgtatcttggaatataatgatgaacgggtacttactccatggccaggctgaagaagctgttgccacttttcgtcagatgaaggttgagaaatttcagccaaatgcagtcacttttgttaacatagtacgcgcagcagcagaattatcagccttgagagtaggaatgtcggttcattccagtctcattcagtgtggattttgttcccaaacaccagtaggaaacagccttgttgacatgtatgcgaaatgtggaatgatagaatcttccgagaaatgctttattgagataagcaacaaatacatagtttcatggaacactatgctatccgcttacgcagcccacggtctagcaagctgtgcggtctcacttttcttgtccatgcaagaaaacgaactcaaaccagactctgtttcctttctcagtgttctttcagcttgtagacacgcagggttagtcgaagaaggaaaacgaattttcgaggaaatgggagagagacacaagatcgaagcagaagttgaacattacgcgtgtatggtagatctattagggaaggctggtttgtttggtgaagctgtggaaatgatgagaagaatgagagtgaaaacaagtgtaggagtatggggagctttattaaattcttcaagaatgcattgtaatttgtggttaagcaatgctgcattgtgtcagcttgttaaacttgagccactaaatccttctcattatagtcaagatcggagattaggagaggtcaataatgtatcaagaattaagaaagttcctgcttgtagttggatagaagtctgagaatactcaattcttttgattcttcttctctatcttttactgtatcaaaaaatctttctaagtataattgaaattgtgagaaatattggaaaatctgttgaaatctctgttaagagacaaaaaataaagagcccaaccggattcgaaccggtgacctattgatctgcagtcaattgctctaccactgagctataggctcttcttgactttagtgtatgctaactaatagaaatactaaacttgcatgatagaacattattttacttaaaacagaattttggagaaacataattgttaagttatatataagtagtatacactaaagtcaataagagcctatagctcagtggtagagcaattgactgcagatcaataggtcaccggttcgaatccggttgggctcttaattttttttttttaagcccagtaaaaactgggtttcgtagtaaatgggaacgtacatagaagagagattagggttgtgctatatattctccgttaaaaaaaccctagttttaaaaccttctgaaccctagccagaatacgtaagtaacttttgtgagtttttgtctgcgtgagaattttaacgtttgttgtaatctagttgaaattgaaatcggcaggtaacaaaaagtctgaatttatgattcttttatgacacaacacacaagtcatgaaacttatgaggcaattcttatatttatgtgtgtagaggcgataatg

SEQ ID NO: 11802 - DNA, 3000 bp, Unknown
  misc_feature (1)..( 3000): cDNA_ID_3023015_gDNA_ID_2214517_Annot_ID_184488 3000 nt of promoter + ATG
attttatatcgtgcatcacaatttgtgattattcattgtattaacgagcccacacataaaagatcttaattatccatctacaccttaaaatctacggaccgtcttacattaatacagctagttcaccttgtgaaatctcggtaataccctcagctgcaaaagatagaagtttcatagaacggtacgtgttcattacccaacccagctttaaattttcttcttacgtgtgtatgactagacacgtaggtcccactcagcaccacgacaacccaataataaacatataaaaacaaaaagaaattaattaattttttttctttcttcatatatataattcgtttcttcttcctttttccccgagatttttttcctctgttcggtcggccattgaattgttgttgattcattggctctaaaacgaaaatgggaattctcaacgacgacgccgttttaatcgaaccgggaaaaatctccggagatcccaccgtcgttaccgtcaattgtcctgatgaatccggtctcggttcaactctgtgtagaatcatcctcgaatttggtctctccattacccgagcaggtcaatattcaattttacttcgtatctgtttaggggaatattctctgtttgtcgtttagcttcacggaatattcttctttatgattcgaaaaattcaattctgtttttcttattttgagggtaattaatatgtttgtaaaaatggtgtttgcagatttttcaacagatggaagatggtgttatatagtgttttgggttactccagatattagctctcctaaaattgattgggacagcttaaagaatcgtcttttatcagcttgtccttcttgcttaggctctttctacttctgccttcaatccaatgtctctaagcctccttccctttatcttctcaagttcttttgccgtgataggaaaggattgcttcatggtatgtgtaaagttattgtcttttgtcttgtgcttggtgttttctttatatggttgattaaaagtttgtgtttttttggtgattcgtagatgttactaaagttttgacagagctagagtttacaatacaaagagtcaaagtcatgacaacaccagatggaagagttttggatatgtttttcatcactgacgcaatgtgagttttcttcttctttctaattctgatgtttcatttgagagaagaaccaacattaacgttgtggtttgtgactttgtgtaacagggatctattgcacacgaaacagagacaaaccaaaacgtgtgaccatctaacggctgtgcttggtgagcatggtgtgagttgtgagcttgaactagctgggcctgagttagagagtgtgcaacgattctcttcacttccacctttggctgctgatgagctgtttggcccagatgggtttgatattagcggctctagctctaacaaagcggttcttaccgttgataatcagttgagccctgcacatacgttgcttcagattcgttgtgttgatcaaaagggacttttctatgatatcctcaggacttccaaagactgcgatgtccacgtacgttaaaactgatctctctaacattaagagaacctaaccttacctctgctaagagaagttgggacttctatggttgaaagatttgtataactcaagtagttcttgtttctttatccagattgcatacggtaggttctcctccaaggttaaaggttataggaatttggagttgtttgttagaggcacagacgggaataaaataatggacccaaaacatcaagccaacttctgtgctcgacttaaggaggaaatggtgtgtcctttgcgagtgattatcgtgaaccgaggaccagatactgagctattagtagccaaccctgtggaactatccggaaaaggaagaccacgagttttctacgatgtcacacttgcgttgaaatcactaggaatctgcatcttctccgtaagtactgtataataatacattgtgttctctaagctttttgaacggttattttcggtttgttttaagattggcattgcgttttcttgtaggctgagattgggagacattcgactttagatcgacaatgggaagtttatagatttcttttggatgagagtcgtgaattcccattggctagcctccgtgcgagaaatcaagtagtagatagagtcacaaagacacttatgggttggtgaagcggatgagagtgagctttcatgaacgttatgctacactcaaggggacaaagaaacaaagtcttcttcgcttgcggcttcgggtcgatgaaaagagtgatgcaagggggttgtgattgctgttgtgtggagctaatagcgttgtaaagctttggaaattgtaaaaggattatataaccgcaattgcaatgaatgcttgtaaactcactttgcaaaggtaacatttccgttgactaggtggtcactacaagagagcgacagagttgacccgagccagaatcgcaaacatgttacatttagccatgtagtggcctttgggggataatatggtaattagacaaattgtatcgaaatatatttagagtgttgccatcaaagatctctgtgtttttgaattctttttaatcatatactgaaatttgttttagttgtcatcaatatattcatctactactgtactaatccctttataattgagtttatataacgaagaaaaaggagatatagatgcattgacaagtccataattatgtttagttgtttaccattggatctgaaatagattcgaaaaattaaacggttaagaaaaaggaaacgcgttaattaaaaataaaaaaacgaagcggtagggttaatttcgtcgtttcgttatccgttgtcgctcgctcgtgcttcatcggcggctagtaatccagtgcagcagaggtcctcctatcttaacgaaagctgtgattctccttcgtctttcaatatcattcttaggtttttgaaattcatgtgtcgtaagaaccgaggaag

SEQ ID NO: 11803 - DNA, 3000 bp, Unknown; identical to SEQ ID NO: 11800
  misc_feature (1)..( 3000): cDNA_ID_2707498_gDNA_ID_2214517_Annot_ID_184487 3000 nt of promoter + ATG

SEQ ID NO: 11804 - DNA, 3000 bp, Unknown; identical to SEQ ID NO: 11799
  misc_feature (1)..( 3000): cDNA_ID_2707505_gDNA_ID_2214517_Annot_ID_184485 3000 nt of promoter + ATG

SEQ ID NO: 11805 - DNA, 3000 bp, Unknown; identical to SEQ ID NO: 11798
  misc_feature (1)..( 3000): cDNA_ID_2707509_gDNA_ID_2214517_Annot_ID_184484 3000 nt of promoter + ATG

SEQ ID NO: 11806 - DNA, 3000 bp, Unknown
  misc_feature (1)..( 3000): cDNA_ID_3023019_gDNA_ID_2214517_Annot_ID_184483 3000 nt of promoter + ATG
gagatcatgtccaatgaccttcagaatagccaaagcacagtaagtgcttgccaagtgactaccgttgtgctttaaatcctacgcaacaaactaaactgtcaagcccacacagatgcaaaacaaagataaatcttgtaacatataaagcataaggaatatagacttataattaccccattctcatcaatgggaaactgagaactccttgaaccaaagaaaccatagaattctcctgcagagaagaacaagaacatctcattcattgatcactaactaattaacaatttgctcataaacatacttctaactaaattcaagaaaaataccatctttcagtgaaactctgttagtaggaaaggcctggaaggacaaaacccactttgcaacaacatctttatcaaccttcagaaattatagatgaaattcactaaatcagattcaggggaaaaacaaagatcgattctttgagagagaggagaaagagactaacacggtctcttgcgccgagaaaatgaagacccgagattatgaaatgagcgagtgtaagacgattgatctcctgagattggtaatggtacggaagcaactcgtacatcatctccaaatacatcaagtgtcgatctttctcgaaattcgctgacggagatgattgcaccggtggagaatactcttcttcgtcttcttcctccgacttagatcggtccgaatcgattgacacggcggtctctgacatagcgtcgttctccggtagtgagtcaacgaatctctcaaaactcgcttggactcactcggctttgctttctcttagaggaaagtaaacagtttttggatctgtggttttcaaaagtcaaaaacagcacgatgttactttgtataatcacaaaacggcgcaatgtttaggtgctctgataattatctacatgattaaagattaaagattcgttgatgtgttaagaaattagattaaagattaaaaatgagattgagaaatttaaacttttttattcgtgatatatattaagatatcacattgaagatttccaacattgggggcattgattttattttatatatttcaaacatagaatgtgattaatatttccacacatatagtacgtagaagttatatgtatgtgatgaggatcttcaaagaacgttcaaggacacttggatccacctttggagtttttcatatcacggtagcaaggacattcatctttgtgtccaaaagttcccgaaggaacacaattacacttctggcaacatatattgcagtacttgaggcattcttcatgttgtcctgcctttgagcatctcacattgcactttccaccgcatgctgctaattcatttatcacatatatatgtaaaatcttagaatttcagaaaacttgtttcaaaatgatacatgcatgacctacaattattaactagattaagtaaacacttacacgaatcagcacttgaaagtacagaaaatgaagatgtgaggagaagagagattatgaagaattgtacaaccacgagcttcatcttgttttctcgaaagagtttgctacgtatacaaaatttaaagatatgcgaaaacaaagtagtgatggtgaaatgtggctacaaagagaggaatccttaatagtgagaatttgaagtgaaattaatgtttgttactttaaataaagatatctttacttgttatgtcggtactattttcagttaaaaatattaacatacagaaaaaaccatattcataaacttttttgactaagtaagtagtataatactagtattgaaagttttttttgtaaccagtattgaagcattttttaaattgtaaatttatttcttatagtgcacattcatttcgaattacatgaacttacaacaattttgagatatttttgaaatcctgatgaatgatgattatgacacacagtttgtaacactaacaaatattcatttttattattatgtataactattgaaattccttaagtcacatctaatatatattatagattaaaagtatagcattagatgttgaaaaaaaaagatttaactgtagtaataagcaagaagacagtgagccgcccttcaagcacggcgatgcatgtggcagattgattcttaggaattgactcaactttttcggtcttcgttgactatatattcaaaaattgtaaaatttaactcaaacaaaaatgtacctcttgttacatgtattttgttcctctaaacagtatgaaaaaaaaactaagttttctttttaatacgaatgattgcacctaaaattgatagacgactaagtctatactgttacattagatggaaacatggtttgaattatcgctgctaggtgtccaactcgaactttgtacagttgtactaggattctaatgatttgctatgcatataaaatacattgtggcgcaaaaattacgctagtcgcatatttcttttttggtttgtttgtttgattgcataattatgatttgatgtcaaaagttgtataatcagaatttgagaacaataatatgacaaagaaaaacattcttttttctcagttagatgtagatacaagctttgtccaaaaaaaaaaaaagatatagataataaaaataatatcaaaggttgccttctggctacgaagactatgaatttagacttacaattccttggctaaaaactgttttaaatctaaattaataccatatgtcaataaaatatatcacgacttcaattactaagttagaacttagaagtggtgatcgagttccagcaagctccagcacgaattgaagaatacaatttgtgcatatatatattttacattatggttaaatattataatgtaacaaaaatcaactcttcgaactcgagtcaacgtaaattttggctataaattagtcaacattccatgtcttgcattcgaacatcttagccttaatcattttcatcttactctttaaagcgtaacgattaattaacgggaagatttatatg

SEQ ID NO: 11807 - DNA, 3000 bp, Unknown
  misc_feature (1)..( 3000): cDNA_ID_3023022_gDNA_ID_2214517_Annot_ID_184482 3000 nt of promoter + ATG
gtttgtttgattgcataattatgatttgatgtcaaaagttgtataatcagaatttgagaacaataatatgacaaagaaaaacattcttttttctcagttagatgtagatacaagctttgtccaaaaaaaaaaaaagatatagataataaaaataatatcaaaggttgccttctggctacgaagactatgaatttagacttacaattccttggctaaaaactgttttaaatctaaattaataccatatgtcaataaaatatatcacgacttcaattactaagttagaacttagaagtggtgatcgagttccagcaagctccagcacgaattgaagaatacaatttgtgcatatatatattttacattatggttaaatattataatgtaacaaaaatcaactcttcgaactcgagtcaacgtaaattttggctataaattagtcaacattccatgtcttgcattcgaacatcttagccttaatcattttcatcttactctttaaagcgtaacgattaattaacgggaagatttatatggctccaccacctccggcaccaccgtccgttacgttgaggacagtgctccttctccttagggttttgaccgcggctttcctcctcataacggtggtcctcatcagcaccaacaccgtcactctcgaaatttcaagcacgtctatcaaattgcctttcaacgatgtctatgcttataggtaaataaattatttaccttctctgtgaaaattttgtatccaatatttgactaactatttttacctattttttgcatatatgtttggattcatcattcatgaagatacatgctgtccgctgccgtcatcggactagtttacgccgttgtacaactgttcttaacaatctcccaatttgccaccggaaaaacacatcctcttacttatcagttcgatttctacggtgataaggtatttatatcatttttgaggaaatactatctttaaatacattaaaattataagtcatactgtatattgatatataacaaaatctggttcaaatttggacaggtaatatcatatttacttgcaacgggttcggcggcaggatttggagtgagcaaagatttgaaagacacatacatagcattaatagaatttgattcgactgatccagtggataagttctttagtaaaggatatgcatcggccagtcttcttctcttcgcattcgtctctcttgccgttttatccgttttctcatcccttgctctttccaaacgaccagttccagtctcataaacacacatatgatcattgtaaccctacattatgcttccttcattttaattcaccaatcgtggaatttaataagattatacgctttttaagattctttgggtcacgttaccaaatacatatattactttgttggctacatatctcgcaaggctatgtttgggagtactatttctgtgaaaacatatgtaaccaacctatctataaggtcaagtcttcttatttctaatcatcatgcaaaattattattgtgtcggatcattaaaaaatgttattaaaaagccctaacttttcataatttgccagtaaaacgaatcatttacgcctaccaaaagtcaacatgtatagtgtcgttttgcaacgtttatgtgttttcttcttcatcaaaattgaaggaagaaaacaattttaatttcagaaagaaaaaaaaagtaaggaagaaaattctcaaattccttcacaaaccttaaactcttttccatgcaatgtttggatgttactattttcccgtgtgtgtttattggcaatttcataagcgttttaattaggcctacgaagtcaacgcgtttgcagttacgtgtcattcttgtacgaacaataatttaagtattatactatttttatatcctgaatattcacattttttccaaaaatgttattagtaatttacataattcgtttatatacggcttttgagtccttcacgattgcaaatttgcaattaaataataataaaaaataaacaatatgcatttctatgattttttttaaaaatggttgacgttgacattaataaaattcaactcctatcgttatagtcaatgtaatcataatcattatttaatatttttgcttagttaattcgcgcattccgtgtcttgtaatcttgtatcataacaactagtataaaagcctaaaagggtgcatttgtttttggatataagtttttaaaaggtgcttaaaatttacattttacatagttaatatggcagttctttttcttccctctaattatacgtttatgtaataaactgtcagtgtcagtgtgtcaccatcgaatctctgagaagctctatgagttcctttggatacgttgaccaaaccttccgtgtgcaatttctcaattcgtcaactaaatgaaagtattgagaaattgtaatcatcgtaaacgagtagcgaatgtgaacgttgatcgctaaattggacgccgttatataaggccttagtcggatagtcaaactctctagattttatttcctaaatagaactgttttcaatattgatattgcagatagaaaaatgataaacggctttgaagtttcgccggtagataactaactatatcttcacaagcttctttataatagcctttaccttaattttaatttgcacttaatttaagcttggtgtgttttttaagtttgagatttaaaatattataggaaaaaaatatgtatcccattgatttggtaagctagacgtggtgatccagtttgagcacgacttcaacaataaactttggtatatttcataagtatctttattttgtttgtttgacatttaccgtcattacttggtcccatgccatagagcaaaagtcaactcttatccctctggcagcaagttttggttataaattaatctcagacttttatcttcctcttcctctccgattaccaatttaagaagatcattaaatttcattcaacgtactgatcaattttatg

SEQ ID NO: 11808 - DNA, 3000 bp, Unknown; identical to SEQ ID NO: 11797
  misc_feature (1)..( 3000): cDNA_ID_1808666_gDNA_ID_2214517_Annot_ID_184481 3000 nt of promoter + ATG

SEQ ID NO: 11809 - DNA, 3000 bp, Unknown
  misc_feature (1)..( 3000): cDNA_ID_3023025_gDNA_ID_2214517_Annot_ID_184479 3000 nt of promoter + ATG
ttagtacaccacaaattgtgctcccatcaaaagcaaatgcaaaaatggacacaaatgatgcaagtgttgtgatctcgaggcctaacaccaatgaatcagtctaaaataaagaaaagactaacggcgattattaaaatataataagagaaaacaatgagtgtccgatttctaaacaccggatcgatcgttgcttattggtagagtgttattgtaatgctaattttggctttgttaaattttgtatccggctacaatatatgaaatgttttgcactactaaaagtacctttacttaaaattatatagtgttttgagttcttaatttataacacctcttcaaccacttgtgggtttcctacgtatatttccaacagctggccaataaatctgcaacaaaaataatcatgtttctttctttgtatacgtaatctacaaaaagttattggaaaataatgcttttagagcacgagtatgatgtaatgcggtagtgggtagtggagcataatggatcaaatcaaaactttttatgaattgggacgtgttttagagattctgcatgttgcggtttctggtcgccacataagaaagcatctcattatataagaaagcatcacgttgtgagatagttttgtacttgatgtgacagcttttgtactttagttacagaaagcttcatactgaaagagcattgagtgtatggtgctgttttgttcgaatattctacgttagtcatttcaaaatcctatcggatcaccaattcaccatcctacttgacgtcggtaaagtagaaagaaaaagctttaggtcgagcgaacaatagaagaatgaatcaaaaatgaacgaatgaaatactgataatttgaatccctacataataataaaagtaaacaaatagatattttgtatgatatatttttttctgaaatgaattatgtgagaaaatacataattacatttactactatgactacttttagctctttaatacttactagttactgctatctataaaatatgagaaaagtaaaataaatgatatggacaatgagatccacatctgtttgcagataatatatgcttaaaaattttaatttcgaataatttctatatagttgacaaagaaaaaacaaagaataatatgcacatctgctgacgttttctttgtccatagagaatgaatttggaggacttgtctcaagtccatatctataaacttttcttaatatactgtaaactttgagaaagttagaagaataatagaataaaatattttcccttttatctgtaatatgtttccattcaaaactatagtgcggcgtttgattgtaagaaaattacgctatgtttcaatttaaattttggtgcttttctgatacagtcgatggttgatttaagaagcaacaagataatgcttcaaagcttcaaaaatttgacaacagtgaaacaaatcccaaagaaaacatccaaaattctcaatccaagatcctcacttcttctaagcaacaacactaggcctatatctagttccactatccataactcttagtataaaacaggctctagttcttgatttctcaaatttgactagtacataatcctacaactacgagtcacaaaactacagagactacattcataactctatcatgcttcattcttcagtacactgcctctcagttatagttgattcaacaatctctacactacaagcttcactgaagtaaatcttctgaaacaacaccaaaacttaacctttgactcaccacaagcccttttctgaaatttgttgttcaacctcacaggaaatgtttcgggagaaagatggttggtttgctgctaactgagaggaagtatcactataaagcatctcgaactagtccactaaacaaagctcaagctgaaatactataaaatctcaaaatacagagacatctctagcaatcaaaaactactagcatttggcaaattaaccattggagatagtaagccagagtctgtatgattaaatttcatacaaatctaactcttcctcaagactcacaaatacaaaaaaagaaagcagtttcagagacgtaataaagtcatgaatcacttgtggtcgtcttcatcgattgttccaaatttctgcttgaaagattcttgcttctgcagccacatcatgtgaccctggaacacgaattaattacagaaattagttcaaaatcaaagatttatgagcttcgaaaatttcaatgtaagaaaaccctagaatcaacaaattcattggaaatgcaaaaattgacctgaagaccagcagcccagacgatgatgaaggaagcaatccagaatctcttgtccttgacgatcgtcttcacatcgaatctcgtcgccattaaaccctttcgttaagcatcgaatttgctcaaaatcggctatttgagaattttgattcggattttgttttttctgtttacatccaaacttggttaacaaagttcgttaccaaactggcccaagcccaatcaaagcccaataatattttgtaaaacgctaacgaaaaattgaaactggaccagtctatgattccaatctatgaatccaaacaaaatggaccgatcacatatcacaaaaagtcataatatctggtctctgcgtttatatatccatgacaatctgacttcaaaaccaactttgaatattccgtatgaacatttggattcctccaaaatccggaaagatgttgaaatacgaatgaagacatcatatattatcatcataggacttttttttccttttcagtgtcatcataggatgtatgtacgtattagcttttatacaatacctaacaaaaagatatacaatattatatatatcaagaagtgtgtttaacaacaaaagtaacatgatcgacgccgagaatccagttttatgaaaatccaaatccgtacgtacctaaacgtacatttctttaaaacctctccatagcaaattcaaagcaatacctcacagtgaaataaccatg

SEQ ID NO: 11810 - DNA, 3000 bp, Unknown
  misc_feature (1)..( 3000): cDNA_ID_2707520_gDNA_ID_2214517_Annot_ID_184478 3000 nt of promoter + ATG
aaggatctctacctttgatcaagattcatgaacatttcaacttgaccaaggcggttttcgatgtaacacaaggcccaagctattacaacaacgcgttagacatcggtcctctctcgctgaccatcaagaattctcaatctcttacactatgcagatggatgttcgaggtaacaaagttagtctctaaattcttttgttctaagataattcgaaagttatatgttactatctttgttaataggaagtaatcaaaccgtccatatcatcatcttggagatcattccaattctacaagttacaagaattgcggtggatcgataactcgatgaaccaagaacaaattaattctttgatctcttttctcaaactttgtccatcaatagagcgcctcttcattactgtaagtgttacacacctaaaaccttgttactttgttagttcttgcgtcgtgctaatacctttatttattttgtaagatcgattcaaatacttatagttcaaacgaagaagttagtgttaatgctgaccatgcaagagtagtactaagggatctagaagtggtcaaattggaaggattcaagagtgaagaagataagaatcaactgatatttgctctacaagagatagtcagtatcgatcagcctctgcttgtactgtcttcaatttcttgacttcggcttggaatggaaacgacaaaagagttatgtctaaagatacacgtatgaacatgctttaattaacctgctgtcattttaacgcgtggatatattccatttcttgctatacaagaaatcctcgtgtaaacggaacttaaatttggctacgtcaagtttacagattaaagatttttcaccagtatgtattattgtaatgtacttactatgataaattacttaaaacaacatcaagttgattttcgcaagtatgtgtatatatataagggatccaaattctcgtacacacttgcaagttgcaacttaaacctataatgcccaaatatttggcttaggtgaagtatcgtttttaaaccatgtacgtgtcttcttctctttttttgacctgttcaacaaaagcatgcatgtgtggaaacttcagctgtcaacgaaagaaaagcgtgcatcaattcatcaaaaggtcattttaaatcgattaattaacgctaaaccaactaaaccattttgattacatcatcaagtttgctcgttggacttggttaaaatacaattgcctcggaaaatattgctaaggaattactttcttaaacttagtacaacttaattagttcgaaatgctctgagttctttttttaaagtaaatcaattacgtttagaaacaaaatgttatatatcatccaacggatgatgtgaagacacataacgtggacaaaacaatcactctaattaacaataattttgtggccaaaaatatactggacatttttacaccaaccccaaatggctcagacaggccttgtggtacaaaactttcaaatggacaccctaacaaagacttattcaagttccacgtgtaataaaacatgctgaaaaatgatatatagcacaagaatactcattactcacactattgcatggtacaacatatagtacaaatttagtttagaaatatcgatctatggacttctatattattatacaaacaattttactagactaaaatgacaagatctcagtcgtttttttaaacagactatctaagaagtgaccacattttatagtgacattcataagtccaccaagaactagtacaacctcactcaaaatcgaatctcttctatagcaatgaagtcaattgggctactgtcccgttgtggcccaatttaaagaaaaatagaagctatctcattgaatctgtcaacagtaaaactgttttgaaaacgtataatcccaactataaaggtcaagttccaaacaaattatatcatatgagcagttttgctaaagagagaaaaaaagtgtaagaatgagcaaaaagggaacagatcaaatgcactggcagaaaaagaagctccatgctgcctcaatcatacctgcccccactaggtatataagctaatctcacatgtggtaacactcttctcttctatcacccgcacctttcttctttctttgacagtgaaaatagaaagaaacaaagacagctgttgttgcattctccacggcacactaaccaacctcgcacatttctcaagtttcttacaatcttataactaatggtgattaatctttaactttgactaattactacataaaagtatttcatcaaacgaaactctcgtgatcatcattgtcatgggttggttagagcacgaatcatacaaggtttcaataatacagcaaaattggttaccaaaagattccgaaacagttcaatatttgtcgacaactaccttctgtatataaagtaatgacgcaaagacgttaataaatgttgcagtgcaataatctggtccggtctagtggtgtctagacccaacttatatcatttagtcaagtctcataatataatcgttgcataaatagacataaacgaagaatatctgaaacaaaaaaacaaaacttaaaactcgtcgccgtagttgaccgttactttttgatttttaattattatgaaatatcacattcaataattaaaactatgtgttaagaaaatttaattttatgtaagatgacacagaaatacacaaagacttgtctgtctttcacttttttagactctttgacccattttcttcataattcacgaaaacccaaaaattaaaaacaaaacaaaacaaaataaaatcaaaactaacaaaaaggaaaaaaaaaaaaaaaaaagtatctcaccggaaacgatttcttcgccgattccaagacttttcttcctaagctttttaacagatccggtgaaaatttcaaaatccgaagaattctctaaagctagggtttcttaattcacgagacggaggtgatataattcccccccgtcgtagctatgatg

SEQ ID NO: 11811 - DNA, 3000 bp, Unknown; identical to SEQ ID NO: 11795
  misc_feature (1)..( 3000): cDNA_ID_4262156_gDNA_ID_2214517_Annot_ID_184476 3000 nt of

SEQ ID NO: 11812 - DNA, 3000 bp, Unknown; identical to SEQ ID NO: 11794
  misc_feature (1)..( 3000): cDNA_ID_3023029_gDNA_ID_2214517_Annot_ID_184475 3000 nt of promoter + ATG

SEQ ID NO: 11813 - DNA, 3000 bp, Unknown
  misc_feature (1)..( 3000): cDNA_ID_3023033_gDNA_ID_2214517_Annot_ID_184474 3000 nt of promoter + ATG
tgtttcttaattcatgcagcttgcattatacacaatacggacatggtcaatgacggtcttggagaacgttaactctcttgttgggaaatcagctagaccagagtatctgcagaaactaacttacctgtgttggaaccaccataaagccattaggcacattgacacagtgagggcatacacatttggctctcattattttgtggaggttgatattgttctcccagctgacatgcctctgcaagtggctcacgacattggagaatcgctgcaagagaagctcgagctactagaggagatcgaacgggcttttgtgcatcttgattatgagtacactcacaaacctgagcacgctagatcccactgttagctgtttatcctttttaaagatctctacgtttctatatctttacaaattaatcttcactgtattgttgtttagtagacaattgtgagataaaggaatacctttgtaactatttacttttgttttgcgtgtttcatttagcaacaagattataacttctcttccagtctcaatgaataaagttgacatatgttagattagtctcaagcagaagacataatagaaaccacacaaattgcaaaaaaaaaccattagtagtttattctctgatccacatattcaaatggatgttgtcttgtgcagacgaggaggagtcctatttaccattattatctttctttctttttttgtgaaaagtgcaaacaaaaaaatgaaattcttgtcacttatggaggattattatattcgatccaaatcttactgggttagatgatgattgtggttaaaggcccattcgaggcccaacaaagtagtttgagtctcagctgcttcacctctccaggttcgtgtctcgattctgcaatctgtctctcgatatctccctacatttcttttgtccgatccttaactgattttcgttttcctgagacagatttctagtgtgaagaatcatttcgagccatgtctccggctaaaggtacgatcttttcattgataaccccttgaatctcactagaacgtgatggatttgaatcttctaccattagtctttagttttgatggagacgctatttaactggtctagattaatgttttcaatcatgtttcgttaggtgattagtttcaatatcgtcctcattagcttccactaagtgaggttaataaagttttcattttaattcgtttatatgtagtccttcaaattggtctatcttgatctgtacagaatctatttacaatcttcataattgatatctagttacagcagacaaggagagaaaaaccaacaactgattatctttctttcatttctcagtctcttcctttgaccaaaacattgaagaagctcattcagtgagtagtccaagacgagttttaagcttctcgaagagaaataagcaaaagcctggtttccaagatacagacagtagaaggtcatcttcatttagagcatcagaagtgcatggacctaaaccctcagaggtgtacggtttcgtaggatcgatatcgactgttgttgccacagtcatcttcttggtatgggcatatgttccagataagttgttggagtctataggaatccattactaccctagtaggtattgggtattggctatgccaacgtatttgatggtgactctgatgttagctttggctttttacattggtctcaacttcatcgccactccacccccaacctctctcaataccttgtttggtgagtgcccgcaccgctctttaatttcctctcatctgatgttattggagatatgagaaattgtttcctaaaaatctgttttctcaagtaagtgctcgctgtgtcattacaatagctagagctagaatgcttcgaaatgttggatctgcagggcgtggttttgggagtttgcttaggatgataattctagttatgtttgtttgtttggtatggcagatgagtacagtagagaacctggtgaatttgctgctgggatggaggaaggtgaagacaggcctatagatccaatctctgacattgatattacaagaataaatgatcttatgttcaattcaagtgattaaaatttcaaattctctagaggtagtaaccatattgactaagccattactctcattagtaaatggattcaggttttagtgactagtagagtgatcacgtgtaaaaggagattgtgattaatgattatctccagtccagtgatggatcctgcactatctttcttcttatatgtcaaccattaccagtagaaatcatcaagagaaactcaagtttggtaattgacccgtaaaacatgattatataaaaacttatgcatgcttttttttacaagcctggatgtccgaaaatgaagtacaataatctatcaagaaaaacactaaccataaaaaaaaaatgtgtttaagagaaataatttaaattgtttcagtataaatataagtaaatataatcaaacattcagtgaaaaaaaaaaaaaaatcaaacattcagaccattttagaacccaccttgggaaaaccacaaattagcagttttctctcagagaccaattctctcaatctccgtcgtgcgcttttgcttgattttgtaatgtaagacttgtgtttggcattttgtgatttccgttttatttgcttcttcttctctactcttctgtattggtagagtttaattctcgtcaccaaattttcgagttttgttcgaactaaaactcaaaatctgggactggagggatatttctctcctgggttcatttgactatgatcttcgaggtagcaaaattgatactttatggattgatataacagagaatcaaattttggtagattaggttattttctactgttataagacgattgctcataccaatttgactagtgttttatgggtttgggatttaaccattgtccaaattgttaactttggctaattatggtatagaaggaatctgaggaattgatacaagtgggctctgatg

SEQ ID NO: 11814 - DNA, 3000 bp, Unknown
  misc_feature (1)..( 3000): cDNA_ID_3023037_gDNA_ID_2214517_Annot_ID_184472 3000 nt of promoter + ATG
gttatttcgatattaacaaagcttatttcgattatacccaaatggaaaatcattcctagtcaagatatcatcgagatttcatataaagagccagaaattagaaaacaggtatgtttctatataacatttagtaatcaaaaatgattagtttatcaaaaatctgtgtaagaaactgatcaatatgcttgatttaatttttgtacattttgctatatacgactaattaaggttagagaaaatcctttatgctcgaaaggacgaccacgcttgaaaactgcgtatgagctcttaaggatcagcaacgacttggagaagagacttcaagaggtaaattataagtgattacatatatatatatatatccaagatttccataaatgcatatgatattcagattggactcaaatagtggtaattaagattctaacgttagattttttttgtctctgtaaaatataaatcatccgatcgagaactaatgcacataatgatgataataggtttcattgccgtttttggtattacacggagatgatgataaagtaacagataaagcagtgagccaagaactgtacaaggttgcgttgagcgctgacaagaccttaaagttgtaccctgggatgtggcacggtttgctcaccggcgagacaccagagaacatcgaaattgtctttgccgacgtcatcagttggttggaaaaaagaagtgattatggaaatgataggtttgagtcagagcttaaacagcgtaatgatcgtttaaatttcaagaaatagtcgtttgacttattttttacacataaaagtgttttaatgaaattctggtgttttgcattttgatgtttaacgttgctattgtgaattgtactatatattttaagaaaacttatactatagtccaataatatttcctaaatagtccaacaaaataaagaaaaagttttcatcatctagtatgattttaaaatgagatttgatataacatagccaataagactccagaggaaactctctgattcggcttggtttggctaatgtttttagacgcaacgatttacttagatctagaaccatcagattaacaacataaaacaactttaagctttcgagaaacggaaaaccacaaagattcttagcaaagaattcatcaatgtaaagaacattgtctaaaatattttggtatagaggtgaaaactcataatcttgggaagcttgtatcgagctagggttttgtttatcgtatcagccttcagtcccctatacaaagttcctggtccatcaaagtatatgtaaggtgtgtcagaccatacatgcctccatcgtgtggacaagactgaagttctgatagctaaattggtcggaagagaggagaggatttgttggaggatcacatcaggaagcgagctgattgagtctatattttcacttgcatctcttgctagtttgacatctctgtagtgatgatgagcgtagcagtcaccggcggtggcaccgtctccgtttccgccgtcgtctgcctctgccattacgttatcaaccaccgattgtaaacctagatatttgtttgcaatgacatagctttttgagtttttgggtttatcacaaagcccagctatatatatccaaaatattttaaaaagcccattactaaacacgcacaacttttttcttgtccggaactcaaaatatgtatgtacttaacaacttaatctgtgaaaaaaaaaaaaaaaaaatgtactaccaacttagtcatgttgatgtgatcatcttcttcttggattgatattactagttgcagaaagtgacaatttgatctattagaaaataattgcttatactacacatttgttttctttcgtaacagattggtgggatctttaagaatgtatcgtcatgattctgattttatagaagaacaactttatttaagatgtgcttacatattctgcgaaaaaaccggcatgttgaatggttttagtctctctgaaccgacaacaagttttgtaatttttaattttatcttacagtcgtcacttgaatcttgatcgccaatttttacatacttgagaagaaaaatatttaaaaagccaaccgatttattcgtcaaagcctcaaaggctacagatttttttagccaacgagcaaatgatatgcacacgcggatatgggggatccaaaaattaaaatatttgttggtgtaactttgaagcattgacttaaaaaatagtggttttatcatatgaaattaaacacttaaaaatttttgtggaagttgatacgggatcacaattttacaaaaacaaatagttagtcaacggagtataacttagttttacgtctaatattgttagagttgacattttataacatgttaagtagtagaaattgtagatttgactttctagattcttcatttgatggttcttatgatcgttcgtttataaatttgtactacagaaacgattaatctaacattattttacgatgaagaactaaaatttgaacatatagtgtcactaggaaaaaagattgattttcaccttaacatctccaaacgtagtaagtagatgtgagtttgatttgctaaatcctaaatgaaaaaaaactaacaaaacacagtcaaacgtgaaagaatttttgagggggtgtttctgataaatttacgacttaaggtactagtttaatgttattttgaaagtttagggggtggttttgaaacgtcgccaaacttgaattgccacttgtcagggaatattttatcattttaaaaagaagtaacaaaaaaaacgtgttgccgtgtagaggggtgcgaggagaatctgttaaatcgtcgctatcaaacaagaaacggtgtcgcattatcgtatagtcctcttcctcaaaatcctacccaatataaacagagccgtacaacaaaaaactcgatatcttatcaaaaactcgctctccatccaacaaaacccgaagaaagagagattcagactcaaatctctcagtagga

SEQ ID NO: 11815 - DNA, 3000 bp, Unknown
  misc_feature (1)..( 3000): cDNA_ID_2707494_gDNA_ID_2214517_Annot_ID_133984 3000 nt of promoter + ATG
gaattctcaacgacgacgccgttttaatcgaaccgggaaaaatctccggagatcccaccgtcgttaccgtcaattgtcctgatgaatccggtctcggttcaactctgtgtagaatcatcctcgaatttggtctctccattacccgagcaggtcaatattcaattttacttcgtatctgtttaggggaatattctctgtttgtcgtttagcttcacggaatattcttctttatgattcgaaaaattcaattctgtttttcttattttgagggtaattaatatgtttgtaaaaatggtgtttgcagatttttcaacagatggaagatggtgttatatagtgttttgggttactccagatattagctctcctaaaattgattgggacagcttaaagaatcgtcttttatcagcttgtccttcttgcttaggctctttctacttctgccttcaatccaatgtctctaagcctccttccctttatcttctcaagttcttttgccgtgataggaaaggattgcttcatggtatgtgtaaagttattgtcttttgtcttgtgcttggtgttttctttatatggttgattaaaagtttgtgtttttttggtgattcgtagatgttactaaagttttgacagagctagagtttacaatacaaagagtcaaagtcatgacaacaccagatggaagagttttggatatgtttttcatcactgacgcaatgtgagttttcttcttctttctaattctgatgtttcatttgagagaagaaccaacattaacgttgtggtttgtgactttgtgtaacagggatctattgcacacgaaacagagacaaaccaaaacgtgtgaccatctaacggctgtgcttggtgagcatggtgtgagttgtgagcttgaactagctgggcctgagttagagagtgtgcaacgattctcttcacttccacctttggctgctgatgagctgtttggcccagatgggtttgatattagcggctctagctctaacaaagcggttcttaccgttgataatcagttgagccctgcacatacgttgcttcagattcgttgtgttgatcaaaagggacttttctatgatatcctcaggacttccaaagactgcgatgtccacgtacgttaaaactgatctctctaacattaagagaacctaaccttacctctgctaagagaagttgggacttctatggttgaaagatttgtataactcaagtagttcttgtttctttatccagattgcatacggtaggttctcctccaaggttaaaggttataggaatttggagttgtttgttagaggcacagacgggaataaaataatggacccaaaacatcaagccaacttctgtgctcgacttaaggaggaaatggtgtgtcctttgcgagtgattatcgtgaaccgaggaccagatactgagctattagtagccaaccctgtggaactatccggaaaaggaagaccacgagttttctacgatgtcacacttgcgttgaaatcactaggaatctgcatcttctccgtaagtactgtataataatacattgtgttctctaagctttttgaacggttattttcggtttgttttaagattggcattgcgttttcttgtaggctgagattgggagacattcgactttagatcgacaatgggaagtttatagatttcttttggatgagagtcgtgaattcccattggctagcctccgtgcgagaaatcaagtagtagatagagtcacaaagacacttatgggttggtgaagcggatgagagtgagctttcatgaacgttatgctacactcaaggggacaaagaaacaaagtcttcttcgcttgcggcttcgggtcgatgaaaagagtgatgcaagggggttgtgattgctgttgtgtggagctaatagcgttgtaaagctttggaaattgtaaaaggattatataaccgcaattgcaatgaatgcttgtaaactcactttgcaaaggtaacatttccgttgactaggtggtcactacaagagagcgacagagttgacccgagccagaatcgcaaacatgttacatttagccatgtagtggcctttgggggataatatggtaattagacaaattgtatcgaaatatatttagagtgttgccatcaaagatctctgtgtttttgaattctttttaatcatatactgaaatttgttttagttgtcatcaatatattcatctactactgtactaatccctttataattgagtttatataacgaagaaaaaggagatatagatgcattgacaagtccataattatgtttagttgtttaccattggatctgaaatagattcgaaaaattaaacggttaagaaaaaggaaacgcgttaattaaaaataaaaaaacgaagcggtagggttaatttcgtcgtttcgttatccgttgtcgctcgctcgtgcttcatcggcggctagtaatccagtgcagcagaggtcctcctatcttaacgaaagctgtgattctccttcgtctttcaatatcattcttaggtttttgaaattcatgtgtcgtaagaaccgaggaagatgacgacaccaatcaccgggaaaaactctcctgttaccggaaaagaagaaggcgaactatctacctccgacgacgaagtatcaattctcgctactataacttatattttctgctattgattttcacagtctgcgaatctggattctgttgcaccctgaacatatcaactgatctctctcgatttgtgtggtttttgagatctgcctgtgttcaatttgtatgggtttatagatttggggtataaattgtgttagttcagagactagagcttatttcttagtgattgttcgttgattatttgatttcaaagctttcgtgttgcattaattgcggcaatccactgtttccagaatgttttattattattgattagcagatttcaaaaccctaaaatttcaacgattttgtttttcttaggtacaacca

SEQ ID NO: 11816 - DNA, 3000 bp, Unknown
  misc_feature (1)..( 3000): cDNA_ID_2707490_gDNA_ID_2214517_Annot_ID_133985 3000 nt of promoter + ATG
ggatacacgagagccggtttgcacagagaagctctcggattcttcgggtatatgtcggaggagaaaggtattgatccagacaagtacagtttcacttttgctttgaaggcttgtgccggatctatggactttaagaagggtttacggatacatgatttgattgctgagatgggtcttgagtctgatgtttatataggaactgcgttagttgaaatgtattgtaaagctcgtgacttggtttctgcaagacaagtgttcgataaaatgcatgtgaaggatgttgttacttggaacactatggtttccgggttggctcaaaatggatgttctagtgcagctttgctgttgtttcatgatatgcgttcgtgttgtgttgacattgatcatgttagtttatataatctgatccctgcggtttcgaagctagagaagagtgatgtctgtagatgtcttcacggacttgtgattaagaaaggttttatctttgctttctctagtgggctgattgacatgtattgcaactgcgcggatttatatgctgctgaatctgtttttgaagaagtgtggaggaaggatgagtcttcatggggtacaatgatggcagcttatgcacataatgggttctttgaggaggtattggagttgtttgaccttatgagaaactatgatgttagaatgaataaggtagctgcagcaagtgctcttcaagctgctgcatatgtaggggatttagtgaaggggattgcaattcatgattacgcagtgcaacaaggattgatcggtgatgtctcagttgctacttctcttatgagtatgtattccaaatgtggtgagttggagatagccgaacaactgttcattaatattgaagatagagatgttgtttcttggtctgccatgattgcgtcgtatgagcaagcagggcaacacgatgaggctatctctttgtttagagatatgatgagaatacatatcaagcctaatgctgtaactttgactagtgtgctacaagggtgtgcaggagtagccgcctctagattgggtaagagcatacattgttatgctataaaggctgatattgagtctgagttggaaactgccacagctgttatttcaatgtacgctaaatgtggtcgattttctcccgcgctcaaagcctttgaaagactgccaattaaagatgctgtggcattcaacgctctagcgcaagggtatactcagattggtgatgccaataaagcatttgatgtgtacaagaacatgaagttacatggtgtatgcccagactcaagaactatggttggtatgcttcaaacttgtgccttctgtagtgactatgctcgaggttcttgtgtttatggacaaattataaagcatgggttcgattcagaatgtcacgtggcacatgctcttatcaatatgttcaccaaatgtgatgccctcgctgcagcgatagttttgtttgacaagtgtggattcgagaaaagtactgtatcttggaatataatgatgaacgggtacttactccatggccaggctgaagaagctgttgccacttttcgtcagatgaaggttgagaaatttcagccaaatgcagtcacttttgttaacatagtacgcgcagcagcagaattatcagccttgagagtaggaatgtcggttcattccagtctcattcagtgtggattttgttcccaaacaccagtaggaaacagccttgttgacatgtatgcgaaatgtggaatgatagaatcttccgagaaatgctttattgagataagcaacaaatacatagtttcatggaacactatgctatccgcttacgcagcccacggtctagcaagctgtgcggtctcacttttcttgtccatgcaagaaaacgaactcaaaccagactctgtttcctttctcagtgttctttcagcttgtagacacgcagggttagtcgaagaaggaaaacgaattttcgaggaaatgggagagagacacaagatcgaagcagaagttgaacattacgcgtgtatggtagatctattagggaaggctggtttgtttggtgaagctgtggaaatgatgagaagaatgagagtgaaaacaagtgtaggagtatggggagctttattaaattcttcaagaatgcattgtaatttgtggttaagcaatgctgcattgtgtcagcttgttaaacttgagccactaaatccttctcattatagtcaagatcggagattaggagaggtcaataatgtatcaagaattaagaaagttcctgcttgtagttggatagaagtctgagaatactcaattcttttgattcttcttctctatcttttactgtatcaaaaaatctttctaagtataattgaaattgtgagaaatattggaaaatctgttgaaatctctgttaagagacaaaaaataaagagcccaaccggattcgaaccggtgacctattgatctgcagtcaattgctctaccactgagctataggctcttcttgactttagtgtatgctaactaatagaaatactaaacttgcatgatagaacattattttacttaaaacagaattttggagaaacataattgttaagttatatataagtagtatacactaaagtcaataagagcctatagctcagtggtagagcaattgactgcagatcaataggtcaccggttcgaatccggttgggctcttaattttttttttttaagcccagtaaaaactgggtttcgtagtaaatgggaacgtacatagaagagagattagggttgtgctatatattctccgttaaaaaaaccctagttttaaaaccttctgaaccctagccagaatacgtaagtaacttttgtgagtttttgtctgcgtgagaattttaacgtttgttgtaatctagttgaaattgaaatcggcaggtaacaaaaagtctgaatttatgattcttttatgacacaacacacaagtcatgaaacttatgaggcaattcttatatttatg

SEQ ID NO: 11817 - DNA, 1771 bp, Unknown
  misc_feature (1)..( 1771): cDNA_ID_3023131_gDNA_ID_2214518_Annot_ID_133987 3000 nt of promoter + ATG
ccagatgaagctggcagaagatgtgtctaagaagtttgaaatcgttagagcaagaaatgaagagctcaagaaagaaatggaatcgcagaccgctagtagccaagtgaagtttgctgaaaactcggaaaagctggaagagaagataaggctccttgagatgaataaaaaaacagccatggactggaaatctcgtactgatgatctgactcaacagttacaagaagcgcaattagtcgctgaaggtttgaagaaacaagtgcatgagctttcactttcccagaaatccatcaagactcactctatttctcctcagaaagtcagagacctggaaaaggctgaaatgaggcttttgaaaaaaaagatgaagtttgagagaaattgtgcaaaacactcccaaacagtggctaaatttgaaaagtttcgaagggaatttcagtgcgaagagctaggtcggttgaaactggagttcggtagtcttacgaatcgcatgaatctactggatgagtatttttcaacagacgttgaaggtacagctggccttggaaaggtttgtttctgccatagtttttgtacactttgtctccttatcgttatttgaaaattggcttgatgaccatagacatgttatgaaatttgatacatagaaggtgaatctgactatagaagatgacaacccaaaaaaatgttttaatatttggaatagtgacctttatcttaacatggtttatttacagcatcataccacttttatacgttgctgtttttgattattttaattcctttttagtctccttatgctcatcttattgctatgcaggctacaggatgcaggaaactgctgacgctaaattcacagaagaaccgtaatggtgaaaagcattctgacgcaagatgcaaattggtagccagctcaggttatcaggagcaggcttgcaagttgtctgcccacttaatttctaaatctggacggggcgtgagtgagtctgtctcaggtactatttctcaattggagtctcctactggaggctctagaaaattaccgagttctggagtaatttccagcgcaacatctttttctgatgggcagttactggcatcacagggaagagagcagttctctgttactacttcagcagaaatagcaaaagataaaccgaatatccaaccaacaaaatcaagtatgctccaaaagatctccgataccagtaaaaatggaaatctctgtttggtggcagaaaactatcttcaaaggtgtcagagagatattcatgagaactctcggaaaagaaaaagaatgttagaggcagttgtgtcccataagcatctggcatctggtgataaaaagaaaaatttgccgattggagagaagatgggcaccttgcagtccatgattgtaggaactgggtctaggccttcagaaaaggaagaaaccttggtcccccctgataggcaaggtggctcctccgcaattgacattacagtttccaagaaaagaagggtttcttgtaagaagaagataattgtacagaattctcttgagttcaaccagtcaggcaagactccaggtaatatagctgggaaaactacgtgtctctctactgctactggacatgacgtgaaaacattattttcggaggactttgctgctacagattatatgaagttgctagagttggataacttggaagaagaaaattattaccagatggctagagaatcgcttctgtcccctgatcttcctcaggtagattttttgggttgtgagatcatg

SEQ ID NO: 11818 - DNA, 3000 bp, Unknown
  misc_feature (1)..( 3000): cDNA_ID_2707619_gDNA_ID_2214518_Annot_ID_133988 3000 nt of promoter + ATG
cccaaaaaaaaaatgtcgttaccattttctttcaaaaacttacttaaattatatacattttcgtatggttgaataaggagcaaatattgaccagtcataccgattataaatcttctcagaagataaagagacatagtggtattaattcttctttgtcatttccagttttttttacaacatagctgaacaaacagtgtgtgtaagcgtttagttattattgcaatagaaaaattgaaagcagagaaggtggtaggtgtgtaattgtaattggtcgctaatattctataaataaaaattaagatcaagcttttagagaatattttatttcaaatatcatagattttacataaagttggtagacttatttttttttctttttgagtttgtttcaaattatacatatgctcattcaattattatggaggctctctgcgcgtacaaaacgaaaaagacccatataaaataatataagtggttttcctggactttctgtaatgatcaagtccaaatgttactatttttgattcattatttcacatgatttttttttttcgcgagcgtagtttattttttctacattttttccttcaattctgtccaaattaattttagggtccttcatgaatcacacattcacaccctatgaatttgacacatttttcttttttttgaaaatcttgtgcttttgcacatctcagacatgatacatgatacatccttaggagttagggctggtccagactatatcatgataataacatagttatgataatgcgaatgtgaatgttcgaccattagcattttttcccactcaagtgtaataatgaacgggcacaatcccaagttgatccctatcatttatgcttataaaatttcatcaaatatcaaggcaaagcatgcaataaataagtgaaacatattacggaaaatttagtaattagtgattttatggttagcattaggattcaaaatatcctaatgcaaaacggacggacgacccgtttggtgaaaagtgcagtaaattagtgattttgactttgaccgggatggaaaattgttggtgtctttagttgatttttcaatttcattttacactagagtcaaaatagcactgaatttttttttaaagcaaaaattaaatatgaacagtgtacactttttagtttttacataagatattatataaagttgaataatattatgcggaatttggaaagaatctgtttagtagacttttagttttggttcaacttttcttttttcgtctatatagtcattagatatatttgattcaattttattatatgtgtgtatagcgtgtgtgcatattgaaactttgaagcaagtttgagtctttagacaatctcactttgttgcttttaagctatacatagctcagagtctcagaataccatcaatcacaccactttctgcaataattcgttaacctaaatcgaaaccaaaagtaaaataaagatggttgttttgattctagcgaggatgaaactgagaccaatcacattttacatgtattaagaaactaaaaatatttataggtcatcaatggttatcgattttaatatagttttaagattataatttttggtttttgaattttagattttgggttttagattttccaaaaataaagatatatataaaaaaaaataggaagaaaaagtcacgttaatattgttaaggaaaagcgaaaaactcaatttgaaaactcaattttgctattttttactattcataatactcatcaattttttaaaaaaatgagtgtgtaaaaaatataagtagaaaagtcaaaacggcattaatctactaaaactcacttttagcatccgtaattattttacgaaaacttaatttagttcagttttttctgctaaagttattcaattaattattttgtgatttttgtgtcataccaatcaagaccaaaaacaatataaaaattagtaaatattcaagtccgtaatttttgaaatagaaatatttatattacacttactcttttggttcgtcaatattgtcgaggtaataaagcgtagggtataatgtatgtgtagattttttgattgcctagtcaaagggtaaccggttaacaaggaagattattagttactacaattctaggacaggagagaatgtatttaggcttcacgccacaactactgaagatagtggtgtcgctatctttagatgtgataaacataaagtcgtgtcggtatccttgaaaagttgaaattagtgcgtattagcattgtttatccctaaaggcacatatatattgttccttactttcaaacgacatatatttcttcagaaccttttgctataatatgtctgaataatcattacaatatagtatatacacacaaaacttattgatactatgcattctctttggctatgttggaaaattcacttgcatgacttgtataaacttctaagttatgcatgcgttttaaataatcaagttactactataaattaagatacaggtatgtatagcaattaattaaaaactaattaatacagtttagtaatgaataatgatataaacattatacagtacagtgtcgctgtttcagtaatgatataatattcacatcagatttacatgtaaagattcagatcatagcaaattagcaatgaagtaaaggacaatgcaagaaattgaccaaattacttgaatattctaataattcatttcttttctttttttggttggcgaaacatatatatttggttacgttatatgcttaagggatatactgcttatttttcaagtaatcaaaatataaagatagaattatagtaaggagataaaagttgagattttagtaatagaataaaaatagtaatgaagtaatatttacaccaactttacgtgtaagccatccccacacacacatcaacctcctatataaacctaaacacatacctcaaacaaccaaaagcaaaaacctcatcgacataaaaagaaaaatg

SEQ ID NO: 11819 - DNA, 3000 bp, Unknown
  misc_feature (1)..( 3000): cDNA_ID_2991587_gDNA_ID_2214518_Annot_ID_133993 3000 nt of promoter + ATG
caaaaacaaaaattgacattttttttcttcaaaggatcagaaacattttttttgttgttgctaaaaatgtaaatatttcatagaaaaaatatatattaggtttatgatcgatcattttcaacctagacaaatgaacaaaaaacactatcgaaatgcctagatttgcaatgtgaaaaaatggtcggcttcatgacaaacacttagatccacgttggtgcattacaacctcatcactactacatatcttttatcccatattatatttctctctcttttgtttttccttttatcaaattatatagggtctcaattaaatatccattcagtttgcgacgttgcgtgtgttaaacagatacaaaatcgacgtattaatatacacccagatttatgcatttcgacatataaaacacaaaaattcactttccttggaaagtttggaggttggatcaagtttataagtgaccgtctccaacaaggcaacaactcaagttcttagtagaaaaaacactgcacatacatctggatcggtaatccatttggatgattttattccaaaaagaaaacccaattacaatattttttttgaagtctagatctagaaatatctttgctattacatattcctctatatatatctatgttttaattcctctacaaacaattttttttttgtcaaagctctacaaaacatttctgtttttactttttaaattggaagtcaaaaatatctttgttcaacgtttcttttatatgtagaatgtagactgtagttctctcacttcccggccatttggcttcttttagtattttatcaaaggagataaagaaaaataaaatcgcgacccatatgatatgaagcaggcctcgtctctaatggccacgcagattcattttaatatgaaacggcatgaacttatatattgtttactacaataattagaccatacggtgcaaaaattaaaacaaaataagtcatgcatccctcgttctacggtgacgcatgttgatgaacggattctataaaaatagtaatatttaatatctgttatccagtcagatatatttaaaacaatataagaatttaaattgacaaagaaagataaatctgattaaccacggaatatgtgtgtttagattggtaacgtatgattagacacatcaatgctatttaaaagatgcatatgatgataacttttagaagtgagaaggcctttggattattagggattacaaatagtaaacttattatagattacttgagaaaagagattcattaaaacaaaatttgcataaagtaagaaccaaactagaggagcttattccaagaagatgcattttacatttaaaaggtgcatgtaattaatgtctgataaccataactcattaattattctaattcagctaaaagcgagcctaaacccattacacagagaattgcacgaatcacaagtacacaaattgatagaacatttagactttagaggttgatattttttgataaactatagtattgatttatgttattaattgggttgtgtagcacgaggacttctttgaacatgtgaaatgaatattgactttacgtaaaatcgaccatgccctttaagtgttcctcaagttcatacaaaaacaacagtcatactcttatatgtatattataacatgatttaaatttgaactatgtttatttaactatatcctatatataattattacgattgagagatgagaaagtttgttacagatgaagaagaagatattttccccttaaatttctgtaaatgtattttgtacaagtatatatacgatgacaatacaaccggttaatataacccgcgtaatacaaaatcaattaaaccgataaattaaatcaacactctctgatatgacccctcaatatgaggattcgaaaatgttgagaatgctcatcttggactttagatgttcaaactgatgtgagaacaaatgtttagcaaaatatcagctatttgatcatccgtgggaacatgaagcagtttaagctcaccatcatccaacttgtcacgcacggtatggcagtcaatctcaatatatttcgtgctctcatggaagatataattgattgcaatatagataacatctgtactgtctgaaaacaagataagaatcgaagtagtatccgtttaagatacgagcaatgtatgcaaccaaaccaactcacaagtagcaagagctaatgctcagtatctagaaataacatgttgcttcttagatcgacatgagatgatttatgaagaaatttgagctttgatggctctaataccatattacgatcgagagataagaaagtttgttacagatgaagaagaagatattttctgattaaatttccgtaaatgtattttgtacaagtatatatacaatgactattcaaccgattaacatcaccgtaatacaaaatcatctagaccgataaaactaacctaacacattctgataataacaaatatgaatttattgattttcttttaattaagaatagctcgttcaaccaaatgttgacatcttttttttttttgaacactaccaaatgtagacatctagtacactaattcaaccatgtctgtcgtctaatactatttcgagtagtgtgtgatatgcttaatatataaaaaaaacttgttcacgtttctgattttaaaacatagactgaccaaaagctcacaacacacaactagatataaagcccaggagtcaaacaaagaacctgattcgttattttgccgcacaaggcccaaatcaaattagtgatgttacttgaacagttcaaaaagaactgggattattatgcattcagtttataacttaaggggttattatgttattaacccgtttactttcgtttggattttggaattagacgcgaagctgtgaaatctagaagaagaagaagaagaagaagaagaagaagaagaagaagaagaagaagaagaagaagaagaagaagaagaagaagaagca

SEQ ID NO: 11820 - DNA, 3000 bp, Unknown
  misc_feature (1)..( 3000): cDNA_ID_2707609_gDNA_ID_2214518_Annot_ID_133995 3000 nt of promoter + ATG
agcaagcaccagagatccgtccatgctcactgagttcaggtcttggagcttcacctagtctaccctcaggatcagacccaatcacattgaaatatctgaagaaaaccaatttgaagacagaatgaactcaacttcagggcaagagaaaacaaacacagaggtcacacacacacacacataacagaattaactaacaaccttaggatcataactgccataatagaattcttggagaaatccaagatgatatcttctgccatctttttagcctttccatatggattgattggaacctgtggagtttcctctgttattggcattttctcaggctctccataagtagcacatgtgcttgaatatatcaaagtcttcacaccatgagcagccattgtctctaaaactaccaatgtgttcgatgtgatattgtgataatacttgcaaatgacagaacacaaaatattatttacatcaatcttacagcaaaggttaaatcattttgagaaggaacaaaaatactcacttgagaggaaactgtgtgctttctccaacataagcaacagcagcaaaatgcatcacagcgtcaaatgcgttttcagaaaatattttgttaacctgaaagaatttcttatcaagaaaacacacacaaaaaagcttgtctgtgtgtttatggtggtcttatatctaaaatcacaatgaaggatcatacagcatttgcatctccaagatcagcataaatgaattgaagctttccaggttccggaaacagttgttgcaagatcttgactgcaccgaggttccctcgagatagattgtcctgccaaaacatgaaaagatttacttctttacttagatacaacacgagaagcatgaatctatgtaaggcaatggagatgtatgtataccacaatggtgacacggtatgaatcttttagaaggcgtaaagctgcatgtgacccgatataccctgcaccaccagtgactagaacatgtgtaactcctggttcacttcgagaaaactgaaagatgaagaaaacattactactacaaaaatgagacactgtatcaatatcaagttaagtacatataagaagtaataccacgcttggggtattgaaggttggggattggttgagcaagagaatgcacattgctgtaagtgtcatgaccaaaacaatcttccccatgtaattgttgttcttctttgggtctgcaaaatccaatcctacactccaaaaatcatcaacatgtgtgaaattttgaatccaaataagaaacacaagaaaagcttatgactttggagctaactaataagcccccagaaaatctaaaatctctatcaacttaccaaccacttctaaacaagtaagcaaaatatttcagacaaataaaaaaaaacagtagaaaaatcaggttttatcataaaagtctaaaagatattcctgtgtgtaccttcaaaagacatagatctgttttgcctcccggttctagctctgcctaaattcagcattttgattctgaaagtacacggcgtagtccagtttcagctgtaagagattaacaactcgaaatatttagaaaactcgcacctgcaaaaacctcagtaactccagtttgggtgggaacatgtaggtctttcaaataaaaatgaaaatgcagaattcacaccgacacagaatttcacaacaacaaaaaggccaaagttcagcctgtacatgaggaaacagaagaaaactgtagaaagcaaaaatgttgtataatctggacttgaccaagaatctctcttctatagtaagaaagattcgatctcaattctaagtggaaaaggttagaacgacttacgtacaaaggaggaaagtaaagagagtggtcttgacggtgaaagcgagcgaagggaacacgagacacgagacaagagaagagctataaagttgaattaaatgattactttattgagatttttagacacaagtaacgaatgaaattgcaacaagtattataagggacgcggtgattggaacgagggagctccggcacctgtgcgtaccgacgaactctctgctgcacatgtcggcaaaagtctctacgtggcttttactttatggccaaaacttgactacctcttgaccaacatattatagtacaacaaaaatttacggaaaatattagtataatgaatgataagcaaaacaaaatctattgtttttggttgtaatatttgtaaatgatttttagatagttcgataatttgctagttataattagaaaaatttcgaatagagttataaagagtagacctttttgtatatagtaataaaaataattggctataaactatgttgacttcataacattactacgtcttcttaaaaacaaaaacatgactacatcttgatcaagaaaattaaagcaaccgacagttccatgcacattgactttactagatctcgagaccatttattcctcagttgtatagatttgtttatcttttttgaatttaatgttagaaaaaaaagaagagaaattgctttcattgagagttgaactcaagacctcctgcatactatatatttgtttatcaaatatacattcattgattaaactaatttcatatatcataaaatttgaatcgtacaaagatcaccacaagtcagaagactaataaaacaccactaacctgaacaagcacatgttctttgtattaaaaatgtgagagaataattcatcatgaaaaagtcataatcaaagtcaaagcctaaccctttttaagtcttttcggggccgtcttggagcaggcctaacaggctagcggccttttaagacttactctactacatttagaggtcaagttataatggatcaaaaattgaaattgaagagaaaatgtaccaatctaataaactaatcaaactatgtgtaccaaaacgtaaatatcagaaacatcctatagatggttcgggtcctctggttcgccagtaaaattatgaccgcagactgaaaaaa

SEQ ID NO: 11821 - DNA, 3000 bp, Unknown
  misc_feature (1)..( 3000): cDNA_ID_2707601_gDNA_ID_2214518_Annot_ID_133998 3000 nt of promoter + ATG
aagatgtttatgtgatggctgaatctcttctggagaaatttgaggagaaatggctcctgataatgcctaaacttgtggaggaggtacaccaaatgttcagtttccaagtattcgtctttgtaatatcagtgatgtgttaactgtgatgttatgaacaggaaaagaaacaagtagacgaagaagcggagaagcatgccaataagcagcttacaatggaggctgcacaagcggaaatggctagggatttaagcaacgaagtaagcaaatgcaaaaccaattatcagctgttgatctatttcatttcaggccatttattatagctgtgggttgatgagtttgctttgtacgtatctttagctatatgagattgatctgcagctggagaaactccgggaatcagtagttcagagatgcaggtataaataacctcttctgttgatcatttttacccttaatgaagggttcgtaaccgagtttttggtgtggttttggaaataaacagaaaactgtccactcaagaaaagaaaggactttctgcagctctaggtcgtctctcacctgaggatctgtctaaggcgttaaaaatggtttcagagagcaacccgagtttcccggctggagcaccagaagtcgagcttgacattgatgttcaggtcaacaccaaaatcttccttatttctttgtggttttgcatcagatattcaggttttaacggtttcctctcttgtttgtgaacagactgacgttacattgtggagactgaaggtgtttgtgcaagaagcattgaaagcagctaacaaaagctctggaggaacaaacgctcaaaacaataacaatactggaactggagagatcaacaagaacaatgcaaaaagacggagagagatctctgatgcaatcaataaagcttcaattaaaagagctaagaaagcttgaatctctctctatctcttgatgtgtttattgatacagaaggaacaagagtttggtgaacaccaatctaaattagaaactttccagttccattgcgcatgttgcttcaaatgttgagcacaatgtaaaaaagaatgaatgggaaaaaaatctgagctatagaggagatataaagaagactgcttgagggagaaattctgacaaatcttctaataaaatcttcagtttgagagatctttggtgtgttgaacgtttcttcgatttcattaccttaaacctcggcacttataatttaaaatcaatttttaaaaatgataatatgatgttttgacccaaaaaaataattaaaaaaaatgataatatgatgtagggatttgaaaactaataacatacgtgaatctacaaacatataattttttagtactaaagagtatgaccacatgcttcattctactgcaatatgaacacaaatatgtccaaacaccaaaccaatgagataatatgggaaatttgctaaacttcaaacatgacatttaacaacctattcacttgtttttgaagatttcgatttttttttacaaatttgatagtatatgaaagatatgtgcaattgtaagacgatacaaaaacaagcaagagaagatcaaggaacgatttattcaagaatgccaataggctatgagtaatcttagctataaagtgaaaacaaggtttacttttgggcctttagctcaatgtctatttcaccatagattaatctttgcccaaacatggaataacaccaacaagtatggggtgcaaatagttgtacatttagatgaaaaaagtatgttaaacaaaattggcatctatttgtcaccatatgttcaacactttcatctttctcaactcagattgtttccaatcattcatctacgcacaatcatttgcacccataatctactttcatggtcgaataactttttttgtagttcccaatagcttacatcaagagtttccaaagggcgattgaaagtgtcgaaacgatgggacattacataatagtttgtgctatcgtagtttctatctttagcacaaactttccgagaactttctatggttctatctttaggttttaaaaatttaagatgacaaaaatgataactagatatttaatataaaaaaggcaaaagtgttaaacacatgtctggttggccattcttctcaaatccaccatcattatatatgttgtagatatttatttcataaaaggtctaatactttagaatagatatacaaacatcattaaaaagatattttaatgcaaataactatatggcttaagaaaatcttaataaacttgaaagttgctggtgacacatcaacaacactattataaacactacaaaatgtgataaaaaacaaaatagactaaacataaactcgaacgacgcgtgggttattttctagtatatatagttaattatcataaaaagataatttaatggtttaatacaaataaccatattgcttaagaaaatcttaatcaccatagaaagtagttatattcttacattaattttaaatatatttagtttttccactctcataatattaaatttaaaggtatatatttaaagttttaattaattaagtcgtgcttgttttcttctatggacattgaaagccaagggccatgcccactgattctcttctcttatatattgatgccattgttcttctctcaaagcccacaaaacagttctgaaatattttggtaagataaacccaaatgttggtttttattcccgctaatattaaactatacgcaaacagagattttacttaataaacagggttcctctgtttcaaagcttctcagttttctcatttctgagttttcttctttctcttaagccctctctctcttacactcagttttttgtttcccatctatgtctcttgtacttacattcttctgccgtctctgtgaaattggtcgtatttattgtataagagctcttatatatacctttttcttataatctggttttggtgacgtttgttcagggtataaactagaagatg

SEQ ID NO: 11822 - DNA, 3000 bp, Unknown
  misc_feature (1)..( 3000): cDNA_ID_2707593_gDNA_ID_2214518_Annot_ID_134001 3000 nt of promoter + ATG
ccaccttgtcttcgtctgcggatctgaagctccttgaagttcttgatttgtctgaaaactctctcaattcgccgatacctaactggctatttggtcttaccaacctcagaaagctattcctcagatgggattttctccagggttcgattcctacggggttcaagaacttgaagcttctagagacacttgatctgtcgaataatctggcactacaaggcgagattccatcggttcttggagaccttcctcaactgaagtttcttgacctttctgcaaacgaactcaacggtcaaatccatgggtttctagacgccttctccagaaacaaaggaaacagcttggtctttctcgatctcagttccaacaagttagctgggacattgcccgagtcacttggatcgttgaggaatctgcagactctggatctttcatcgaattccttcacgggttcggtcccttcctcgataggaaacatggcgtcactgaagaaacttgatctttctaacaatgccatgaacgggacaattgcggaaagcttggggcagcttgcagagcttgtggatctgaacttgatggcgaatacatggggaggcgttctgcaaaagtcacatttcgtgaatctcagaagcttgaaaagcatccgtctaacaactgaaccatacagatctcttgtcttcaagttaccatctacttggattcctcctttcagactggagttgatccaaatcgagaactgtcggatcggtctgtttccaatgtggctccaagtacaaaccaagctcaactttgtcacactcagaaacactggtattgaagatacaataccggatagctggttctctggaatctcttctaaagttacttacctaattctagcaaacaacagaatcaaaggtagattacctcaaaagcttgcgttcccaaagttaaacaccattgatttgagctccaacaactttgaaggcacttttcctctctggtctacaaacgcaacagagctgcgtctttacgagaacaacttctcgggttctcttccacaaaacattgacgtcttgatgccaagaatggagaagatctacctctttagcaacagcttcacaggcaacatcccatcgtctctatgtgaagtctccggactgcaaattctgtcactgaggaagaaccatttctctggtagttttccaaaatgttggcaccgtcagttcatgctttggggaattgacgtgtctgagaataacttatcaggcgaaataccagagtctcttggtatgttaccttctctcagcgtcttgcttctgaaccaaaattcgttggaaggtaaaatcccagagagtcttcggaattgttctggccttacgaacatagatctcggaggaaacaagctgaccgggaagcttccttcatgggtaggaaagctgtcttctctattcatgcttcgtctgcaaagtaactccttcactggtcaaatcccagatgatctctgcaacgttccaaatctacgcattctggacctctccggaaacaaaatctcgggccctattccaaaatgcatcagcaatctcacagccattgctcgaggtacaaacaatgaggtgttccagaatctagtcttcattgtgaccagagctcgtgaatacgaagccatagccaatagcataaatctttcagggaacaacataagcggagagatcccaagagaaatcttaggcctcttgtatctccgaatcctgaatttatcaagaaactccatggcaggaagcattcccgagaaaatatcagaactgagtcgcttggagacgcttgatctatcaaaaaacaagttttctggagccatacctcagagcttcgcagcaatatcttctctgcaaaggctgaatctttcgttcaataaactggaggggagcatacctaagcttctcaagtttcaagatccatccatttacattggaaatgaattactctgtgggaaaccacttcctaaaaaatgtccaaaagacattaaatagcaaaatgttgtagtgaattgagcataaggaaggtgctaagaagtaccttacaagataatgtacctgctcatataccaataataataaaattatcagctcaattcaggaacttagcctctaaagacaaatcaatgtaatgaacaatgaaatcttcaggtgtcatatccgaataaaacttggaagtttacaattataactacctgaccaggtaactttaagtagtttagaacagaaacattactttcagcagcatcactagcaaaaaccaagcaactaatttaaatcttctgaagcaaacctaaatgattcagggtagaacaaggacactgcatacttgtcaacaacacaaatgctaatctagagacagtgaattttatagaaagaaatgcccacttggcaaagagcacaaaacgactaacatacataccctatctaggaatataaagagaaaaaccttcaatttgtttcacacatatttgatcattcacttgaaaatagtactgagaacgagaaacaacgacttatctgcccattttcaaacaagttaagaaagttcagattgatgaaaactacacattgttctggataccaagaaaaacatacatttgagtctgcacatactcatgacctagatcccaaagttgaaacaacaattcacacacaaaaggttatgtctctatttctaggaccttattgaaacagtaataagataacaatttgagtccaaagtttctgttttggctgttcatccacacaaaaatgcaagcatggagtgaagatgggcagattctaggaccgatactcatcaattatcaatcaccataacaaaatttaatcatctctataaaatcccatctaaaaagaagaatccacaactaagcatctatcaatgggagaaaaaataaactagaagagctttcagattcaaacaagcaaaacctgagctttcacagaaggaactaaatcacatgatgaagaaatttcaatcacgatg

SEQ ID NO: 11823 - DNA, 2767 bp, Unknown
  misc_feature (1)..( 2767): cDNA_ID_2707544_gDNA_ID_2214518_Annot_ID_184530 3000 nt of promoter + ATG
aagaatagagatctgaaatttggactcaagtttaatttgtaggaaagctttactaaagatctcaatgaaaatactctgtatcaacaaacaataaaaataataattctaatcatcgttttttttttttttcctaagattccaatcatagtttttaaagctgttatattgctttttatatctacaaagacttttttttaagtacctacaaagactttaacgtaaccatgtgacggagattatttttatttttattttctaatgaacgtgatggagattattacaaaaacaaaatctcatgtgcatgtacaaccaaagtagacttaaaggaaacttggttcagcattacggatgggatggtccaatataatttggatattttattgtttttgtttgataaatggttcaatagtaattgataataacgtgaatatataattgaaagttcgatcttttcgtgaatctttgaacttcttgataaatgatgctatgacaaagaatatacaaatataaatattatataactaatcgataaaatcagtgacaaagaatatatgtattaccctacacagggctacaactttccattgtgattctcttagtttaaataatgtgaggcttttgtcatgtaatacttactgtatttatctggaatgtattttgatgaacttcaggtctattcaatgttaataaaccattttcttggatccaactgatcttgctatgaatcttctgaatatctttttctacagaaaatgtcaatttttgaaattaggggtctaataaattaaaggacttttttttttgggtgcacctattaaaaggactatattaaattattgttgcctaaaagggtaagtacgggatcacctggcgtgacatgtttaattacccaaattagacaaattacttttgttaacccggtcaatgtttctttatatatcaaacgttcttaatctttttataggtaaaaacgttcgtaaggtcaaaacaattgaacgacgattaaaatttgccaaaataaacgtttggcatccatagaacttctttttttttccctccaagactccaaccaatatcattatctactcgaaaacatgtctggtaaatctaatactataatatagatctaataaccagtttagaattcaaagaacgataaaataaaattaaaaatcactttttcacataatcagcttttgatattttccgttggtgaaatttgttgacggttacatttcattacaatacttttttttggataaattcattcatttcattacaatactttatatactatttttttatattttttttcagctacatacatatgaatgtatatttgaatccaatgatatagtgagaacactagcacacaaaccactaatacttgtcaattttcttgaattaaaacctaagtttataatatataaatttttaacaacttaaactataagccttataaaaaatccaaccacccgattgtaaacatatgttttaagactgtgaattgggtcatttcaacttttaaacgcaagtttcaaccatttacatcaacaattgtttcatcggcttctacttggaaatttggtttaggtaactatgcacatcttgaaaacgaagtgttttctttcatcatttattattattcaccaaacccaaatcactacttcttttaggtagctttaatgcaatcttgaaaaaccaaatgtttctaccaaaactacatctgaccccactctggtgatggtgcttattcccaccgtttattgtgaaaaattgatccagtgaaatagctctaaattttatcttcttcatcttttttttacatcatcatactaatcagtttatttgccctttttgaacttgatttttttttccccaataaaaacgcagagtagtttttgagtgggtaaaaagaattgtactttcagtcagaacactagttaaataatttcttcgatagttccaataaaaactctccacgttcatatctgtcagaaatcagaatcatatgcgtactttgtctctctctttctctctatagaattctcaatttgcctgtatcttttttactctctaatcagctgcagagaaagagaagtcaaaacgcagctctctcttgcgttttcttcctttctcctttctcaattccccagagaacaacataactctgtaaaagggaaactctattttgttctggtaacttcaatagtcctcgttttatttcagtgttatattcttttattcgatggtcctgaatcgaacaggacccaccgatggaacagtgagaatctgttttcttatataaagacataatttttccagttcgttgtgtttatcctccatagaaataatgtcggggttggtttttggaattctctaagtgttgtttattgatttttgtttagttttgctgggtttactgttgaagttttgatttttttggcatattcttttatttgatacttgtttgattgttacatgttcctgattatctttggctgcttgttaattaacacgatatattagctagtatttcgatatcttttctcaaatttttttggcagttattgtaattagtatatgtaagctcttacgacattcctctttaggaacttttctttttcttgaacaatctttcttgtttgtgaaagttttaccttttttaaagattcgaaaccaattcaggttttgcttgtgtaaaaagatctggtcttgagaggaaggttggtttttattgtgttagaatcaaaagtagttttaaatg

SEQ ID NO: 11824 - DNA, 3000 bp, Unknown
  misc_feature (1)..( 3000): cDNA_ID_2707548_gDNA_ID_2214518_Annot_ID_184529 3000 nt of promoter + ATG
aactgtaaagctgggagggaacttctcttctgagaaagacatgaatatcaatcaatgtaagttgccaattgccataactagtgtaaggaggatcacataaaaacaatcacatacttccttcagtctgcttccatagccattctgaaaccgcagaatcatatgcagcaacatgctgaaaggccttccacgcaagttttctgcggaattgttggtcgctctgtcctcctttgagatactccaaaacagcttgataatctcctgaatcgacaacaatgagaacgtctttgtggttctgttgaaaaaacaatagaaaatatacatttataatcttgaaaataatcttgcaagtgtaaagaaaaagtctcatatgcacagatatatgtattaccttagcagctgctctaatcatagcagggccaccaatgtcaatgttctcaatcccatcctcaaaactgatcccacctggagcagtaactttttcatagaacgggtacaaattgacaaccacaacatcaaatgtacctgtcatagaattaaaaaaaaaaaaggtacagttaaacataaggagacactataaatgacttagtctcaagcttaatgtagaggatcaatcaaaggtcaaaactcaccaatcccatgctcattaagagcttccatatgatgctccacatcccttctagcgaggataccaccatgtatgtttggatgcaaagttttcacacggccatcaagctttaagagaagaaaaaaaaaaaggagagctaagtttaatatactaaactcaacaaaacaatggtataaaccaaaacttaaatataaatatcagcgagatcacaagaccaaaacttttagcaagagcagcgagcataagagaaaagaaaaacatgccatttctggaaaatgagtaagcttctccactttggtcacagagactccagcattctccaaagtagaggcagttcctccagtagaaacaatagtgtatctacacaaatatcaatgaaaaaaggaatcatttacatataagatagaaacaaaaccaaaatttgtatagttctaagtaagagagagttgtgaagaacacataccccaattcttgcagaccgttgccaagagaagccaagtccctcttgtcagatagagatatcaaagcttgcttctcccctgattcaattaaagcccgattatttgaaaatcactaaaacgtaactgaaaatcgatcactgaatttgaaattgcagcaaaaagaaaaattgtaaaccagaggagcctgaggattgcggctgattcctctgagcagtctgagactctgccatggctcgaacagcaacgaaacttggacacagcgacgtacgatagacctgctcattgaaaattccactaatattaaaaagtttagcagaacatgaaacaaagacacaaaggaacacgtccacacacagaggagaactcacaggctgagtaaaacgaaaaggcgcgacggattttttgcgaaacaagccgcagagaatatcgccggagcgagcactcacggaggtggcggtggcggctgagctgagcatagtagtctgattttgaaacagtgtgtagtgttgagctctgttaggttttgtgattttgcggctaattttggaaataaattagaaaaaaaaataaaaaaaaaaggaaaatatgtaatttattattggcgtcaggtggaattatgtatttattattatggccttgacagttagattacacctggaatatttggaaaattggaataaagcttctctttttatttcccccaaaaataaaactaaactattttaactccaaattttaaaaaatttagtagaaaccaaaattctcaagtgtaaactaattagtaagaaataaaactttattggatcagagtggtaatattacaaaagactaactatggagatgacgaaagcttcttatgttttatatgatattttatttgcttttcagaattttaaataatgtaagtagataacaattattttattggtaggcataatagtttttttctcgagaatatagttttgtttttcgaattgtcaaaattagaagagagattttaaggaaggacttggcttcttctcctactcatcgatcgtcaaaccgaggacgcttcacagtctctggtgccgcctttcctggtataaacctttttctctacttctctccttctttgcttactcgtcttccttttaggtgtatgctgtttttgaattttgatcattattatcgaaaatctctggatccgatgtgtttccacctgaatttcgggtaatgatactcagatcttgcattttctagagtttcagtggttttgatggcttgatcggcttttgttttttggttgggtagaggtttttagctcagtttttggttcgaaatgacgcttatttgtttcctttttgaggtttggaattgtttcacggacttgattgaattttggatttagttctatgttttgatctgttgatttacactctctcaaagttacgatgggtttgctaatagtttggtgaagttgatcgattttagtttcagcgattcctgttagtttaaacttgaagagactagaaagtagtcattttagctagtttcatgttggaaagtatgcacagtcagatatttgtactggatgatctgtccctgctagagtaaagagttttattggtttgtataccgaaaatgttccttaaatagtatggttttctgagttttagccgtatgctattttggtttttttgttcttgaatatgtttgactacttgagtaaagttactcttctcctatttcaggcacctcaatgagagtttgagttgttcatgatagaagtcgtcctgttctgcagccaaaacgttagaaatttgcgaaggatgcttatgcaaagattttacttgggtcatgatcatgatatgtcgcctacaagcgtttgtgagggagcttatgaactagatagatagacaccttgagaaagaaaac

SEQ ID NO: 11825 - DNA, 3000 bp, Unknown
  misc_feature (1)..( 3000): cDNA_ID_2707552_gDNA_ID_2214518_Annot_ID_184526 3000 nt of promoter + ATG
aataattttatggtggtaggaatctaataatattcagttatctagacaaagcaagaaaaacgatatcaattgacatcgtgacaactataactatctattatacacatcgtttaaaaaaaataaaacaataccattaaaatccaatcgacgtatgtaaatcatcatcgttgacttgccaaaataaataataggaaaccttataaaatttgatgctaactaactcgggcgggtttcatccaaattaaatagaaacattgacggaacatggagtgtccaatacacacaagatccaatcattacttcgaggagtcacttcaaaactccaaataacaatgacccaaacaaatttcattggacaatgaataattaacacattattatccacaatcaggatcgtataaactaaaaacctttaattcggggctagtttagaagtcatcactttcccgtgggtcattttgtaatttacatttcccaaattatctcttttagtttctccgacgatgcctgaaaaataccaaacattagttacagtcggaatttcgaaaaaccctaattcagctaaagtttgatcgttgatctaaaagctcgagtgatgaagggaaattggtcgatcgtacgaaaggttcttcatcgccagttctccactctccgttcctcgacaccatcgtcgcgattatctacttccatccgaccgcttgttctggccccaaactcgatatcgtcgctaatcgctagaaattcgttgttcactgcctccaacattggtccatccatcgattttaacttctccaacacttcgcttcctcatcggagaagcctctgttcggaagctggaggtaattaatcaattggttctgctgcttcctgcgtatttgcgtaaatgtctgtgattagcatgatcttggctggaaaacgagattgatcagaggaataagcttgagtttatagtgctaggctgctagctttttctatgggaatcaaaattactaagctctaactctaccaaaagccatttcagcgaatttttttttagaaattgggaatttatctgtgcaagtcagttggagaaaactaaagtttgcatatttaaatgagtatctatctataacgtctctgtgttagaaatgaatctaatcctgcaattatgatgttaggtgaaaatggtgttgttctagtgaaatcagaggaagagttcatcaatgcaatgagcaaagctcaaggtaaaccattacacttactttcttacctcacgctaagtggatgtgtttagtatgatttgctgcttatgtcctcttcttgttatctgtactcagatggatctttaccatcggtcttctatttcactgccgcctggtgtggaccatgtatgttaattcttctgaaagtgagttttgttctgtatggtaatttttttttgtgagtggccttattagtttgtgtttcattttactttaggcaggtttatctctcctgtaatcgtggagcttagtaaacaatatcccgatgtaactacgtataaagtcgacattgatgaggtattttcgtcttgcttttgaactctatgcatatatgtctattttcgttgggtttctgtgattagaaccttctacagtgttttgagattgaaacaaaggagacgattatttggtgtgctgtatagaaccttactcgccacactctgtttcaatgttatgtatgcgatagagttagcgagtaaaatagctgaaccagacaatattagtcaagcttctttacggctctttgcgcaatcttctgtgctcatgaatttttgcttaaaacttaatcctttcttgcatatctgtagggcgggatttcgaacactatcagcaagttgaatatcacggctgtggtgagctttcattaccctgtctttccaactataatctacattttacaattagcaggaataactcatgttgaaacggggatttttatatttgtctcatgaacatatatgatgcagccaacactgcatttcttcaaaggaggctcgaagaaaggggaggttgtgggtgcagatgtcacgaagctgaagaatctcatggaacagctctacaagtgaagacctaatccgttctagtaaagaacgtgttgaatagctgctagttaagactgtccaatcaaatcaaggttaaaaaattcttgcttcctttttcaacaataaggctttatgtagttttctccaaataatgatgagatgtttcatatgatttaaccgatgaattgaagttgggtatgcaaaagacattcctctgaattacaatatacgctaatgatatcattatcattagactcacaatttgagatcaatctagaaataatgaatgcgctgaatcagtttcgtctttgttcccccttgttgttcaggattgtaattgcccttttgttttgtttgttttctccatttcctttgggcttagtttccggaaatttgtttgtgtccgtcggtgacaacttcaaaaaatatcgacaagtcataactttttatcaaaattttgactaagttgtcaagcccttagtcgacactcgacgcccctgacattaaaagtattgactccagtgccctgtgccggcctaaaagagggcctattttgggactcttttgctggcaaattgcgccatatgtagtggagtaaatgtgtaaaaaaacagttgaatcaacataaccattatttgatcagaaaagaaaacaaaaatgtggtgtaatgagaggaggatacggtatgtggaaacttgatttacttaatttcaaaggagacctacggagtcaaagagagagttagaccaactaattgtccagagggattgagattggaggaagggtattatggtactttacgaatactattacgttgattaatttggatactttgtcttcttcttcgtctctctcccctcgcgcatcttcggtgctataaaacaaactcacgactagatcatttttggagtgagatttacgtttgatagactactaca

SEQ ID NO: 11826 - DNA, 3000 bp, Unknown; identical to SEQ ID NO: 11820
  misc_feature (1)..( 3000): cDNA_ID_2707609_gDNA_ID_2214518_Annot_ID_184507 3000 nt of promoter + ATG

SEQ ID NO: 11827 - DNA, 3000 bp, Unknown; identical to SEQ ID NO: 11819
  misc_feature (1)..( 3000): cDNA_ID_2991587_gDNA_ID_2214518_Annot_ID_184505 3000 nt of promoter + ATG

SEQ ID NO: 11828 - DNA, 3000 bp, Unknown
  misc_feature (1)..( 3000): cDNA_ID_3023118_gDNA_ID_2214518_Annot_ID_184502 3000 nt of promoter + ATG
acacttttcaagttttcatcattttgtactgattttcttctaccttcgaaagaaagtaaaatgggcttcaaagtgattaattaattggctcttttcatttagcatattccagctcgttttagtgttttacttaggtgggttagtaaacttggcggcaaagtcaaagaatgaagcacgtggaaccactaaaccagctttacccgccaaagtcgccgtcttttaccaagtccaccagagaatagaagaaataaatttttcataattatctttgttaagtaaattatgaaaaatgaaggattaggaaatcgagagaggctattggttaaaaaatgtaaggcctaggcccaaaccaaaagaatcgagagtatgcagttattgagtgagatgagtaacggcaagctgagtaaatatgtgctaattattcaattattatgtctaattaattattcgcattaattctaaaaatagctgccaaataactttaaagtgacggttactcttaaatttgtagctcaattctcagtttctcatatatcgataataacttacaattaaaaaaaaaaaacttacaatctaaatatgttatgaatatatatattataaataacatatatgttaacataagaatatttcttaattgatttttcttatctctaatttttactcagctaattatgcacgttcttatacaatacacacttcttcctactaaaaaaaaatatatttgattatgtttatgttggcgaggaaactgattaataagaaatatttatttaagctagatattttattaaaataaataaattatgtcctaataattcggaggtggttaccaaaaaaagatgtaaaacccgaagtaactcctcctttatcttcgctaaaaccctaacctctctcagtccgactctttctctctcatatataacgcgtaagagacagttaactagtaaatcaacttacaacgttgaagtctacttgaaacaaaaaagacacaacattatcgtctaaaatcaatctacaggtctttcattgattctctcatatatcctctcctgtctttacttttttttttcttaacttgttttatacgtctatctatatatgtaagctcgttactagtaattaaagcttagttaagcttaataataatgtattaaaatagtctgtaactcctctcctgattgcttcaccttcttctttactacaggtttcagctcctcaatgtccatggattgcttaagctacttctttaactacgatcctcctgtccagctccaggattgctttattcccgagatggatatgattatccctgaaaccgatagtttcttcttccaatctcaaccgcaactggagtttcatcagccattgtttcaagaagaagctccttcacagacccactttgaccctttctgcgaccagtttctttctccgcaagaaatctttctccctaaccctaaaaacgaaatcttcaacgaaacacacgacctcgatttctttctccccacgccaaaacgccagagacttgttaactccagctacaattgtaacactcaaaaccatttccagagccgtaacccgaatttcttcgaccctttcggcgacactgatttcgttccagaatcttgtaccttccaggagtttcgagttccggatttctctttagctttcaaggtaggccggggagatcaagatgactcaaagaaaccgacgctttcatctcagagcatcgcggctagagggaggagaagaagaattgcagagaagactcacgagctcggaaaactcatccccggtggcaataaacttaacaccgccgagatgttccaagccgccgctaagtatgtcaagtttttgcagagtcaagttgggattctccaactgatgcagaccacaaagaaggtaataaccaaccccaaataagaactttatcatccaattgaaactctaatcgtgttttctcacaagcttcttaatttgtttacgcagggtagctctaatgtgcaaatggaaactcagtatttgcttgaatcgcaagcaatccaggagaagttatcaacagaggaagtgtgtttggtaccgtgtgaaatggttcaagatctaacaactgaagaaaccatttgcagaaccccgaatatttctcgagaaatcaacaagttactgtctaaacatctggctaactagttttagtttcaagcctgaagttctctatgcctaaatttgtgtctgttatcgttgttttgtcttcttagttagtgttttgtcttgttgatttaggggctaattatcctggttaatctcctcttaactgggaactaatacttcatctgtattagtctatgtattagcttttgtctgacattgttcttgttagttaatgtatgtccgcatgttgaagctttcttacatttaaaagagatctttgtgtaaaatcaagcttttatccataagaattttggggctttattattttctgggttttacaaattcaaagcccgaacattttctccgatttacccgatcgataaggggacttgattttccggacttctgatttactatatacattttttttttttacaacttcatataaaaaaatatgttttctgtaaatttgaattatttatggattgaacatcaaaactttagattaaacaacaataacaactttagattaaattttggtttaaattctttaaatctagttaatcacaacttgttgtcaaaacattttcttatgatttgtttcgatcatttgtttgatgatttgttttgatcatttctttcactggcagttaaaatttccatcattttcactattttacacaaaattaataagtatggttcaccaaacagtgcgcatgacctcataaaatattcaatggttacaaataactaaacccatcccaaacattctttatttagcaacaaacccacactatataatagttgtaaattcaatggtaaaaaagtaaaaaaaagctatccaataaaataaaa

SEQ ID NO: 11829 - DNA, 7 bp, Unknown
  misc_feature (1)..( 7): cDNA_ID_3023131_gDNA_ID_2214518_Annot_ID_184497 3000 nt of promoter + ATG
ccagatg

SEQ ID NO: 11830 - DNA, 3000 bp, Unknown; identical to SEQ ID NO: 11825
  misc_feature (1)..( 3000): cDNA_ID_2707552_gDNA_ID_2214518_Annot_ID_134010 3000 nt of promoter + ATG

SEQ ID NO: 11831 - DNA, 3000 bp, Unknown
  misc_feature (1)..( 3000): cDNA_ID_2686605_gDNA_ID_2214518_Annot_ID_134012 3000 nt of promoter + ATG
ggcaccaggctttcaagaggtgtttcaggattcacagaatacgggatataatgaggttgtggttgaacatgtaaaggagcagacctcttctcatctatatagcctatgcttgccatgtgacctgacgtgtaaatttggtggttaccaagtccggggaactgcaattgttgtcctagataaggctgtgaaaatggctcatttccagtagaaaatcctgttacaggttgagaagtttggctcgctggtaaagattcattacctgctaagggagtaagcgaagccactgctggttctgtagcagcccgatcgatcttcctatcaaaattcccatgaagtagttcatccaaattgttcccgggaggacttaatccaagggaacttctccgtgaacttagatccatcccattgacagcaacaacatactgaacctcagaatcaccctctgcatgttccataacaaactgagcctcctctatatcactgcttgaaaacaagaacatcctgggcttctcagatcctccattaccaaacacgatacattcttccatcatgttttgtaaatcctcgtcagaagatacagagactagggcatcaagatcctctcctggcagctgatattttatggtgcgtgcttcaggaaatatttctttcattttatgcatgagttcttggaaagaaatagtcttgctaatccgtatgatacgcgtttcaccacctacatacctaagtttctgatctctggggcggggtataactttaccaccaaaactacacaagaacttcgcacggttcaaagagctatcagaagctctagaagaaaccaaactatgacgcctttgaccagtatcatttttcgaagagataactggggctgactggaccagttcatgataggtcttatcttcaattctagaagggggtttcctctcgtgctcaaagctctgacgtttttcttctatgttaagcactgtagcgttagggccactctctgacattggatgaaccattcccagagcacttaagttaacagaaacaggcataccactgtgctcaccatacacatttgggatgaactgcggtttcataataaccctatctctcataaactcaaaagcaaattcttcaccggtctgtattgagtagtttagcactggccgagcaggggttgaaacaccataatctggaggtcgtacataagtgttaacattagttgaagagtcgtgggaaaacctttgattaatggagccaagtccctcatctctagggtcaggggcagtataccgaacatgttcataaccttttgcttgatccatgttttctttctcaaggtgtctatctatctagttcataagctccctcacaaacgcttgtaggcgacatatcatgatcatgacccaagtaaaatctttgcataagcatccttcgcaaatttctaacgttttggctgcagaacaggacgacttctatcatgaacaactcaaactctcattgaggtgcctgaaataggagaagagtaactttactcaagtagtcaaacatattcaagaacaaaaaaaccaaaatagcatacggctaaaactcagaaaaccatactatttaaggaacattttcggtatacaaaccaataaaactctttactctagcagggacagatcatccagtacaaatatctgactgtgcatactttccaacatgaaactagctaaaatgactactttctagtctcttcaagtttaaactaacaggaatcgctgaaactaaaatcgatcaacttcaccaaactattagcaaacccatcgtaactttgagagagtgtaaatcaacagatcaaaacatagaactaaatccaaaattcaatcaagtccgtgaaacaattccaaacctcaaaaaggaaacaaataagcgtcatttcgaaccaaaaactgagctaaaaacctctacccaaccaaaaaacaaaagccgatcaagccatcaaaaccactgaaactctagaaaatgcaagatctgagtatcattacccgaaattcaggtggaaacacatcggatccagagattttcgataataatgatcaaaattcaaaaacagcatacacctaaaaggaagacgagtaagcaaagaaggagagaagtagagaaaaaggtttataccaggaaaggcggcaccagagactgtgaagcgtcctcggtttgacgatcgatgagtaggagaagaagccaagtccttccttaaaatctctcttctaattttgacaattcgaaaaacaaaactatattctcgagaaaaaaactattatgcctaccaataaaataattgttatctacttacattatttaaaattctgaaaagcaaataaaatatcatataaaacataagaagctttcgtcatctccatagttagtcttttgtaatattaccactctgatccaataaagttttatttcttactaattagtttacacttgagaattttggtttctactaaattttttaaaatttggagttaaaatagtttagttttatttttgggggaaataaaaagagaagctttattccaattttccaaatattccaggtgtaatctaactgtcaaggccataataataaatacataattccacctgacgccaataataaattacatattttccttttttttttatttttttttctaatttatttccaaaattagccgcaaaatcacaaaacctaacagagctcaacactacacactgtttcaaaatcagactactatgctcagctcagccgccaccgccacctccgtgagtgctcgctccggcgatattctctgcggcttgtttcgcaaaaaatccgtcgcgccttttcgttttactcagcctgtgagttctcctctgtgtgtggacgtgttcctttgtgtctttgtttcatgttctgctaaactttttaatattagtggaattttcaatgagcaggtctatcgtacgtcgctgtgtccaagtttcgttgctgttcgagccatg

SEQ ID NO: 11832 - DNA, 3000 bp, Unknown; identical to SEQ ID NO: 11824
  misc_feature (1)..( 3000): cDNA_ID_2707548_gDNA_ID_2214518_Annot_ID_134013 3000 nt of promoter + ATG

SEQ ID NO: 11833 - DNA, 2767 bp, Unknown; identical to SEQ ID NO: 11823
  misc_feature (1)..( 2767): cDNA_ID_2707544_gDNA_ID_2214518_Annot_ID_134014 3000 nt of promoter + ATG

SEQ ID NO: 11834 - DNA, 1801 bp, Unknown
  misc_feature (1)..( 1801): cDNA_ID_2706352_gDNA_ID_2214519_Annot_ID_134015 3000 nt of promoter + ATG
agtaaatctagaacccaaaatcctaaatggtcgaatggtcggctgatcatcggagagtcacttttcaataagcgaactagcaacttgtcgacttggtaaattgacctaatttttcttttaaaacaacttggttttctaacctaaatatttttccattcataacattaaaattttagaaagaaggccaaatttaaatagactaaaattgtctagtggccaacccctcagcaccatctcgtatactttagaaaataagaaaattgagataaggaatcttcttccgaagtcacgaagacaataagtgaaagcagacaagaactgtccccctgatttcttttgcaccaaattattatggatttgtataagggaacctcacttaaggccagttaagcacaaaagaaggtttttatgcactatcctttttgaactaataatgttagctttttaaaacaacaacttgaaaacttttttaattcttgaaaatacattgcgaaaagcagaatgatttttaaagcggggaatcttttttttctttttaattgtgggaaagattaagataattcatgaaccatgtgatggccatgttttattacaactgcatgggctcggggctttcttttttctttatttgttaagggtccaatttcgagagtagtgtaaatccatgtttatgtcctcgatcagtgacaataaaatgtgtgtagtttcacagacatataaatagtcagagaattcattgtttctgttttgttttgtagtatatattgtatggaaaaagggtgaattgtgtagtctagtctcattaatatagtaagtatagactgtatagttgtttttaattcattgttgttgtttctaagaaagtagaaacatattattgcattaatcaataacaataattatatcaacaaaacaaaaatagtcaattgtatcattgtatgatacatatatgtatatagagtattacgaatatggaatttcttgtaaagccagatgaaagaacatccatgaagaattctcttccatatgtttacaaacaaacctttaaatgccatcacatcatctctttgacccaataaatatgaccttaaagatcttcggttaggaaaaaaaaatatcagttcgagttggagatcttgatcagctgaatcctgatgtgggacaagacaagtaaaggagaagctgcacaattaattccataaatttggagcataagtgggccgtcattgggtaagatctgggcccataatctctgaaaattgtctaaagtatttaactaggatctcaaatgatttgatgattctcaatcattttataatgttgtttatattttggtgttaatgttttcctttacaaatgaaatgaaatgttaaaacaatgagaaaacatgattgggatttattcataaaatgtttcagattctgcaaacgacgattcaatgcctaatttcatattacaataaagttggagaatgaatgaatgaatatacagtaagaacgaactaagaagaccgcagtctttcatcggcccctactaattttattattggttttttaataattgttattgttagtgtttcgtacttttgacctgtcttgtaattaaaatatatttatttattccccaaacaaactacccaaataatttatttatataaaaaaaggtaagaacacaggtcagcgagttggactcatcaagcttagggagagaagaatcgtagaagaaaactcgaagacgaagcaattggtaaagactatcagcagaagaagcttgcggattggggttttcattttctgtaatg

SEQ ID NO: 11835 - DNA, 3000 bp, Unknown
  misc_feature (1)..( 3000): cDNA_ID_2707666_gDNA_ID_2214519_Annot_ID_134017 3000 nt of promoter + ATG
atattcgaaataaaaatctaactacatatgggatatcacatatttgactatactttttttttttttttccgacaaacgttattcattacttaaacagagtcattacaaagttgttactcaagtcaaaaaggtaaagtaccagtatcagaataaaagcatgtagaaatacaaccaaacttggccaagtcatgtgctaacttatttccccgtctacgaacaaagctaaaatgaatatttgaaaattttgaagcccaaaaatgtatatcctcttaaaggttggcaatagaactgtgagatgttgatccgttggctagatttatcagtgtttgactatatataatggaataattaggtgaaaatttcgaaatgcatcttagcagagatggtgatgacttaataaattatatcttattaattttgggtaaaaaagaagaaaatatatatttgtggtcaacatctgtttgtataggagaattatgttctttattctaactttgaccagaaaatttaccttttacaagaaagaacttacccctttatattacaagatcatgcctacttgatatgatcctattacaacataatgaagaatcatagggatttgtcgtgatacacatatcccagtagccttcacactatataatcagtctaaacaaagaagaagaagaagaagaagaagaagaagaagaagaagaagaagaagaagaagaaatgaacaaaatctcaaatcattaattaatgaacaaaatctcaaatcaaaccgaaattactttgattaatgattttagaaatgttattatgaattgttcagatttagagtttgtatgttttaactaatgtaatcctctaaaatctcattaaatacaaaaaaaattattcgtaattactaattccttatccacaacaaattccttgacaaattagaagagagtctaaattgtaaaaaaacaatacacccagttatcaaaaccaacgataatttgatctctcaataccatacaaattgtattataagagaaaacaaatttagcattggttgattttacaatataatctaaacggaaagagttttttatacatataattgtaagaaagattttaaccgtataataaaatagtaaaaagaataattgaaaattaactacagcttaacagagatataaaaaacagtacacattgattcaaggggcaatatacaactcattaaatcgtgaaaacttgtttaatgacattgtttattagctatttattttaatataaaaaattggtcaacgtgttgatatagaaaaatgtatggttttttctaactttgaccagaaaatttcacttttttacgggaaataacttatacccctttccttttatatgacaagatcatgtctactttgcaaaactaattgatcctatagtaactacaacatcatgatgacgatttcctaatcaccccaattaatcatagggatttgtcgtgatacacatactccaatacacactatatatatatatataatcaatctacacaaagaagaaacaaaaaaaagaaagaagtaagagattattatgaaaatggcaatcaccatgaaaactttaattgcatatgttttcactgtcctcctcatcatctcttctgttcattgtcgtatgacaacaacaactagtccaggtattggtttatccttgtacccacattttataattatcgttttgttttaataatcatttttatcaataaataggttttggaataaagcagcaggatagacaatgcttcgagcatgcaccatatttatgtcgtggcggagaaggcgactgccgtatgtattgtagagatcttgatttttcttttggcacatgtttttctggtgtatgctgttgtcaaatttaaatacaagtataagcaaaaaaataaaccaatttactatttggtatctgcttggaaattaacgtatcaatatttatcaaatgttttgattgtcctatacatctgttattattatttttacgtcgaaattgagatatattgattaaaaatgattaaagtcatagtacaattgttcaattatcccagaggatagacacaatcagaattgatggaaagaaaaagacacatacagagttgaaattacattatagacacccaaatttacgttttgcccacccagatatgaatgtcttggcataagcttgctatagacgtatcataattaccttcattgtctgatacataatactttgaacgagataaataaatataatatcgaaattactttgattaatataaacaatagcttttgcaattcgaaagaaatctcaaatcaagtcgacaaacaatttaatgattttaaaatagttgattgtagaaaaattgttatgatttgttgtaaagtctccctaaaccagtaaatcctacttaataaaaccaaaagatttgtttttttcatctaaaatcttttaaaatcattaaagatttaatgcttaaaatttgaaatatttctatccaacaacagtgtattttaaatcagttttccaaacaactagtttcataacatcggatttagaagatattctaaaatccctagttgaatgacatatgattatgttctttttcaagaatttgaatacaccttctaagtactgtatacggggaaaacaaatcacatatttaactactatatcgccaatgtttataatcaggtacaaaattcttgaatacacccttctaaatatatcaggaaaacaaatcatattctactatacataaaagaatatataccatattatttgccagaaaaaaaaaccatatcaccaatgtatacacgtaactataggttaaaaaaaattaagcaaatagatactccctcgatcttcgttggtgtatacagtatacataccccaatataaatagtttgtgtcacactataagtatgatcagtctaaacaaagaagaaacatttaaaataaaaacaggttaagagattatcataaaaaagggcaatcaac

SEQ ID NO: 11836 - DNA, 3000 bp, Unknown
  misc_feature (1)..( 3000): cDNA_ID_1379513_gDNA_ID_2214519_Annot_ID_134024 3000 nt of promoter + ATG
ggtacggtgctcaagccgggtaccagggcggttatcagactcagcaacctggtcagggcggtgcgggaagagggcagcatggtgctgggtatggtggtccttacatgggtcgttagattagccactcaggtaattattttcagcttcttttcatctatttcattgatgttctgtatcagaagactttttttgtagttcgcttggttcccttgtgtatttcaagacatggacttgctgtattttgaccttttcatggttactccattatgttaaactttttgcgttgcaagatcattttgttttcaaagttcctgtgactttgttgtgtttctgaagggtgttaggttttgcatcagtttataaaagtcttctcttaatttcttaattcattgtgcagatattccaatacagtactttttaaaattggcctggtgaatcttctgaagttattaaggagctgatgcaaatggagttgtttagtttttggatgaaatgttactctttcgtgtcttcaaaatacatgactcttcaaacctttcaagaagttttagttttcccctacttgttttctcaactctttttatgatatcccaaatacactgttctgatttaacaactatcgtttctgttttaaacttttgggaacgttttcatttgtaaaacttaaacagtgttcctcatggacacacaaacgctttcactatgtttgaatccgtattttccattttctcttaatcagactcgtttttattggttctcgctatgtttcgcggttttgtggaatttttccatgcacgtaattcctcttaagattttgaccttgtgagagtatgatcacacatcactatgcatatgtacataacggcttatcttgattaccacatattatatctgcttaatccttattcctcttgcaggtaatttaagagcaagctgaacggtcaacacttacgcccaacaaaaatctatggggtaccaaatatttgaatgccacctatctgctttttcttttatatatactgaaaagtgaaaagggatgaatctatgaattggtagctttataactaaagaacgaattaagcaaaagttgttttcttgtttaacttagctaggcatctacctgaatccaaaagagcaacttgttttgttttgtactaataagtatcaacaagtcttgacctgcacatgtcaagtttttgacttgatttagagcagcttgtttcttgtgtgtccttggagttctctactgtttctatagctttgaatgagctttccatttgaccacatctcaaaaaatttggtaatgtgccttagaataacaccgagtttggtaacacagctggaattggtgttttgctgtggcatcatgggagctctgaaatgtcttcccagttaaaggtgagtataactgtttgcattgtgaagatttgtattaactatagaacattgaattgatggtgttaagttcttacacaagcgtgcttctcggtttgaactgtttcttttgtatgttgaatcagagcttagtttataggaaccagagtatctacttagtcattctctaatgctaagtgctaaggttctacctagttgccctctaggcccttatgttattgataacttatgaagctatttgaacacttgattcttaggagacctaagttggtacagccagatagagtgtatgttcttgttctctatgtgacaggatcaagctgccacacatagttcaagggtatgctctgtgtgggtttgctcagattgaggacaaatctatacaaggaagtagagtctttgacattttgatgttgtatgataagaagaagaaaggagagtaataaagaaagagaaaagggaaacagaaacacgtgggagaacatcccaaagaggaagcacacgcggatcttcatgcaaagctccccgattctcccatgtggtccctttctccctttgtccccctcctctttcttcttttctcattttactcctttttttaccattatacaacgaatcttttttatcataattttttggttttggtttattttccaataacaccttcttggttacttcccattctcactttttcatataagaaactcactttgggaaacttatgtttgagaatgacaagtctttttagagaaagtgatgtaacaaatctaaagtgattatataataaccttgcacaatgtttttgattttttgtaagattcgaatattaggtttattattcgtagggaataaacttactttcaaaagcgttcataagttaatactttcatatatgatcataagtacggacactattgttttttgtttgtttgtgtttattctaaaagaaagtagcttttaattgaaatgtcctcagaggcacagtttaaagttcgagtgtaacagtttctaaggcaaaataagctctctttctactatttctctttctctttctactatttctctcctgtggagaaactcaggagatagagagagagagagagaagagaagagagcatgtatgtttggttttataatctctctactcataccaaagatttgtctcagacccaccacttggacagagagaacccaagctcctttctctctttttctcgatctactccttcttaatctccttttttgaaacttgaagccactttcaacatcatccttaaacttttgttcccttattcacaatctcctgccacctctcatttctctagttgagttgttatctgcgtttttaagcactcgaatactgcatgcaaattccctgattgtttgttagtaccttagagattctcgattttttagttgtttagattgaaccaggattactaaattgttattgttttctgtgtaaaggctacatatatgggttctattagaggaaacattgaagagcctatatctcagtcattaacgaggcagaactctctctatagcttaaagctccatgaggttcaaacccacttaggaagttctggaaaaccactaggaagc

SEQ ID NO: 11837 - DNA, 3000 bp, Unknown
  misc_feature (1)..( 3000): cDNA_ID_1009222_gDNA_ID_2214519_Annot_ID_184564 3000 nt of promoter + ATG
caatattcttgacgaaagaattcaatcatatgaagaaaacaaaaatgcagttgattgtacctgagaggtaggaaatgatgcgtagatctttcaaccaaacagttggaagaacaatgagagcagttaagattccaaataaatgcttagagtcaagtcggaacccgagcaaatccaaggatgtaccagggaaaagcccggtaaggttatctccttccaaaatgatgaattcaacacaatatgactacagaaagtggacagcgaatctagtaagtttaaattatagagacagaaacaagctctagatccatgagtaaaattcggctacaaaaaatcttcacttacatatagttctgtgtacaatagcatctgcacaaaagacacataacattgcagaaaccataagcaactgaaaacagaacaactgatcaaaataatcaaaaggaagataaaatctatggaaccacttacacagataagaatacgaccatatttgccaaaagctgcttctccaatatcaggataagtgataatgccggtcttgttctcgaaacagtctttcattaaagtagcagtgtaacaacaaataacagcaaataagagaagaattaccatacttgcccaaccagcttctttcactgtataaggtgttgagagaagtccaactccagccattacattaatagctgcaaccaatatagagttacacatgttttcttaattaggccaagaatcataatcagtttttagttaccattgaaaatggtttgaatgacgctgcatccatagccaccaatgggcaattcctcagcaaatgagcctttatgagaccaagcagattgtgtagctgaggctttgtctgaatcatcatgcctctcaggaagcaaaggtgcttttgactcaacatctaaattacttctgctggctctatagaaactcggaggattactcctgagcgacccgaagattggtgatgccgcaatcgtataagaatcagtcgtttccctaaaagaaccacaaaacttgtcaatgtttcatcacaaaatctcaaataacaaaactttatgagatgggttacaaggaaagtttcgagctttacaattaattacctgaagctttgaggccattgaacctgggaaatgaaaggttcatcgatgtcgtcgtcacgatcaacagcatcaccaggaagatctccgagatcgctttgatcagtttcactgtcgttctcgtacttactgctgttgtcttctagatcttcgttatcttcgtcatcttcgaacgtaacgtcggtttttttctccttatcattgttcttgtcctccatatttcgaacaaacccaagtaagaatagatctagagagtatcaagaaccttagaggattaaatctcaccgaaaaaggaaaaaaaaagatcaaatctttatgattgattttggttacagagtgggttcgagaactttgcagagaggtggcaaaagactaataaggaaagctgagtgtctgagcacaaaatgtccgtttttttttaatcaagaattttactttttcgaggatttgtgtgatttgattgctcttgttctccgtctctctctgttcgcgagagttgattgcccctagttataaggcgggaaaatagtgacgtggcggtgatgatagagactagaggaaagagatcaaagttgagaagcaatgtttttagacttttgatcgacgacaagtgttgcgttgagatggttcgatatattgatccctcgtagggatgtgttgccgtagccgggatcactaggacttggaaagttatatgttctagtattctccaaaaatttaaaataaatattcaaaacatagaataatttataaatgcctagaatattaagaaatatataaagtttcaatattatggaaaaatcatgtttcttgtaaaatatataaaacggtttttagcctattgacaaaaagaattcataacgcttagttccaatgatatctattgacaaaaggaattcataacctttctctctttatttctttcacgtttaagatataaatggcgaatgataccatgaatgttgctggattcttaagcttattctaccttttttttttttcataggcttagtacttacttaaactcatttgttgttctaaatctaagtgtctcgcaagagtccaaagaaggagatgggagtgactcaaggtcgacgagggaatggggtgtaaatgtaatcgtgttagtgaacatagaaatacattatctctatgtggtgacatgtgaattttctccaagtgtcaaacttccatatgctcattaacaatccaataatttaagctttttgacaaaattgtattttttttggtcaattatctccaatgtggttttaaacaaagatatatattaaataaagatttacatgccttttccaccttgatattttgcaaatcatgagaatctcttccttttaatgttgccagttatataggttaaaaacatatttgcatttcaaaaggaatattaaaaaaacttaattgttctgctacattttggctttcaaaagtcatattgtgagtctaaaactattaaactgtaaacaaaggaaaataaaatagtatttatatgctatatgtaaaatatgaaatgaatagactcacactttttctctagatccttaagttaaactgtcacgcttccggtacgtggcttatcgatcaggaaatgccaagatactgatcccacctcacaagtcacaagtcacggtctccaaaatttatttctcaatattatccttcaaatttgttacgatatgcaaaaaaacaagaagaaggaagttatcacaatatgggtcaagctctcaataccggttcgtcctttctctttctcccccaaaatcacgtctttcattgatgttcacttcattaataaaattatcatttttttgtttggtatacttaattatggaacgaagcaaaaggtaaaggagaggtagacgcgaaagacttggaagct

SEQ ID NO: 11838 - DNA, 3000 bp, Unknown
  misc_feature (1)..( 3000): cDNA_ID_3023149_gDNA_ID_2214519_Annot_ID_184562 3000 nt of promoter + ATG
gttaaaatcactgaaaaaaacagagttaaactcgttgaggcattctgtcgaacaacataagttcatttttttttccttttcatcaatctagtaaatgaactcaaagagtgaaactttaagcttctccgtgtatcaaacacatataatcaaatcaccaatacaaatttagcaaacaaagcaaagctcgaaaggatcaaacaattagtagagacttcatatcttattgagcttggcgaggaggaagacggtggcggaagtgatggcggggataaacaagtcgttgggaacggacgtcggagctatacggttcttaatgaagacggcgatcgcaggaactccgaagatgaaaagtagaaattcctttactcctccgacgccggtgaacccaactccgattaaaacctcttgaagaagcttctgaaactcgtccttcgatagcttcttcccctgcccgagattgtgtatctgctcgtttcaaaagtataagagacgaagaagatgataaatctttgatcccagtaattaaaccaattggttaaaacattgtgattcaattgtaaaatcttattttggtttatagtaaaccaagtctaagcctctctatgtaacagagacttagatttgggcaaaagcgttgaagttattttttaatgtttatcgttgcataacaatacttatcatattcgctaatcgctaggtataaattatgttttgctcaagtatatatttcatttttaatattcttttcgtgttattaaatttagaaaaggttaagagaccaaatgtttacaaattccttacctaattttatcaaatcaaaagaagtgtcattaaacttatataatgaagaatagaaattgaaagaatttaatacctcataagcttgttgtagtttctcaacacttggcaccttaagttgagtgccaccgagtcttctgttaatttccctgtcgcaccaaatacataaaatacgaatatcacatcacatgtaaatatcattaccataatcataatatcatggtgccgactatatggctcgagtctttatcgtttatttttatttcttaaatcattgacttataaaccgcccatgagcattaaataatttgtctcaaaaactcgaaagaaaatcgttattgaaaatggtttaataaccaaatctaatcctttccgactcatattggtttcattataacacttaacaagtaaaagaattttactcgactgcttcagccacaatgcggtagaagtcgccaaaggaccattcttgatcgtcatttttttcttctaagcgtttgcggtagcaattttcagccatagcttccaagtctttcgcgtctacctctcctttaccttttgcttcgttccataattaagtataccaaacaaaaaaatgataattttattaatgaagtgaacatcaatgaaagacgtgattttgggggagaaagagaaaggacgaaccggtattgagagcttgacccatattgtgataacttccttcttcttgtttttttgcatatcgtaacaaatttgaaggataatattgagaaataaattttggagaccgtgacttgtgacttgtgaggtgggatcagtatcttggcatttcctgatcgataagccacgtaccggaagcgtgacagtttaacttaaggatctagagaaaaagtgtgagtctattcatttcatattttacatatagcatataaatactattttattttcctttgtttacagtttaatagttttagactcacaatatgacttttgaaagccaaaatgtagcagaacaattaagtttttttaatattccttttgaaatgcaaatatgtttttaacctatataactggcaacattaaaaggaagagattctcatgatttgcaaaatatcaaggtggaaaaggcatgtaaatctttatttaatatatatctttgtttaaaaccacattggagataattgaccaaaaaaaatacaattttgtcaaaaagcttaaattattggattgttaatgagcatatggaagtttgacacttggagaaaattcacatgtcaccacatagagataatgtatttctatgttcactaacacgattacatttacaccccattccctcgtcgaccttgagtcactcccatctccttctttggactcttgcgagacacttagatttagaacaacaaatgagtttaagtaagtactaagcctatgaaaaaaaaaaaaggtagaataagcttaagaatccagcaacattcatggtatcattcgccatttatatcttaaacgtgaaagaaataaagagagaaaggttatgaattccttttgtcaatagatatcattggaactaagcgttatgaattctttttgtcaataggctaaaaaccgttttatatattttacaagaaacatgatttttccataatattgaaactttatatatttcttaatattctaggcatttataaattattctatgttttgaatatttattttaaatttttggagaatactagaacatataactttccaagtcctagtgatcccggctacggcaacacatccctacgagggatcaatatatcgaaccatctcaacgcaacacttgtcgtcgatcaaaagtctaaaaacattgcttctcaactttgatctctttcctctagtctctatcatcaccgccacgtcactattttcccgccttataactaggggcaatcaactctcgcgaacagagagagacggagaacaagagcaatcaaatcacacaaatcctcgaaaaagtaaaattcttgattaaaaaaaaacggacattttgtgctcagacactcagctttccttattagtcttttgccacctctctgcaaagttctcgaacccactctgtaaccaaaatcaatcataaagatttgatctttttttttcctttttcggtgagatttaatcctctaaggttcttgatactctctagatctattcttacttgggtttgttcgaaatatg

SEQ ID NO: 11839 - DNA, 3000 bp, Unknown
  misc_feature (1)..( 3000): cDNA_ID_3023156_gDNA_ID_2214519_Annot_ID_184559 3000 nt of promoter + ATG
tgtaataactgagtagaaaactcaaaaaaaaaaactattatactaaaaggttttttttttaaagacaaaatactaaaagcttataattggaaaataattgacagaaatgaaggcaaaaggggtccatatggacaagtgggaagaggagggtagcacagcggtatgtgctgtatggtctgtcctaattaaagggtctcttaaaatcgatctaatttagcgagggccctctaaatgcccctttcaaaactcctaattttaatgtcactttatacatttttccattctattcataaagttgatgaggttaatcatcatatatataatatattacagtgggttctaaaagaataatatttgggaattttggtgttagttcactatcaaaagaaagttatcaaaagcttcgacaaaaattttttaagtacttttttaaaattgaacttaatcacatagatcttcaaagaagtcaagtcacgtgtacgtacacagatattcaaattctcatgacaaataagataattccaagtttacgacttagcttgactcgatatatgtcaacaaaagttgtaagaatctcgtatagtacgagagtcatcaattttcgggttttcccataaagaataaaaatacctccctttgtcttttattcattttataacaaagtttagtttctctaaggcacccatatgacatggtatgtaggagaaaatgattatacacactatttcatatcgcagacttgaaagaagaaaacttacatacgaatatacgatagatggattttttttttccattatgttatgaataacataacagatgtactcaatagtggcgaaagtcatatttttatatctagctacctagttcaattcttggtttgaaggaatttatttagatgtagagacataaacaatgtaagaaaatctaaacacaatttcacaaagcgaagtattcccttggttcaaaaataactatcacatcttaatatttatgagtctcaccaaatacaaaacgaatcatattttcaccataaccattatagaactcgaacctaaattttttgaaaattgtcggcgacactattaccaatctctagctgatgagttggggctgatgaacgactatgctgatggcgatgaattattaattttggcctaattataaaaattgcaataataccataaccgaagaaattggtgatccttttgaacactaacgacaaaagacaccaaaaaacaaacaaaatttattcgttgttgcattatccggggagcacgtaagtgggttgactttggaagtaaacggacccaaacgacttctcacttcttccaagacaatctatcaagtagatacgtatttatggagttattgtccatgaagatatccattacacatagaaagagaagttctctggaccaatttgttttttgttaaagtccattggaccaaatttcaaattccaaaagcaacacttacaagttacaactttcctcatcaacgattctcaaaatccgtattttaaaaggataaataagataagcccactggaccaaattccaaaagcaagccctcgtccaatgctttacgttgcccaaagattacgaaatccatgagaaaaaggcttttgtgaggaaaagcaaagaaagtttggttacatgataggtactagaatgagctcttaagtatgtaaatttacaaataatttgtaatctttatctatttctcttcgatcaatttgttcattgttggcattacacgctgattgatgatcgtgagtgataagcttagttcaacaaaacaaagctgatggtaaaaatctcaccctacaaaaatctcacttcctgaatgtgacttggggagatttttttttgttctcttccggaaaagcagaatcttcattaaaaacgggctcaacccaatgggctttagacccgacatagagagggtttcatcaacaatgccacatctgttaattagtaactgagtcaaatactaacaaacaagttctaaaaatattaaggcactgggggttttggaatttggtttgggaccgtgtgtgcctgggacaattcaccctaaggtggggctattatatctttggaaataaaaagacttcaattttgtttttagttcacatcttatcaactgcatgtcgtatagcccacttcactttagttgaactaccaaaaggagttgaccaagtcggtgttggtttcgtgagattttggctttaagactttcaagattattatgtggatacatcaataaaccaacttttgttctataatctttaaagtatttttgtacaaagtagttggaaagtttggttgaattaggctacggacaaaaagagagagtagttggggaggtaattacgatttcaatacattctttgcctcaagtgagatttgattttgttgatttgagtagttttaagattgaaatggatcaacctaaaaatcggtgcaacgagcgccagctgttacgcacgacataacctctataaggtcactttctctgtaactagaagcctctcatgggattgtcacttgaagtcttcttatgacccaaccaatgtcattagtggttttgcatctgtttccacctactcctaactgtatttattgctcacccaacttaatgttgcaccttctattaaatagcctcacaacgaatcttttaaaaccctaaacctcattattgttcacagttcgatgtctcttttagtgttttcttattaaaatgtttgtgtttataatgtcttcaacttcaagcttacttgcttaatacttgtaaatatatatatatatatacacagacacatacacaaagcgtgactacatgagacagctcctcttgaattgcgtgtgtaaatgactaaaaaggcaaaaacaaattttcttttcttgagccgtaaatcaatcaatctctctctctctctctctctctttagccactaatctcactctgttttctctccctcgtttcttgctttcaatg

SEQ ID NO: 11840 - DNA, 3000 bp, Unknown
  misc_feature (1)..( 3000): cDNA_ID_2707641_gDNA_ID_2214519_Annot_ID_184557 3000 nt of promoter + ATG
atgttgagagatttagggaagattgttaaatgtcaaatatttaattattcaaagatttttttttctaattatcaaaaacaaacattaaaatctagtggcagttattgtaaataattcccaactataggatttatttcacaaaatggctgctatatagattttttagataaaaccgatcaaactctttttcttttcaattattaaactctttgatgggttaagaaacataaaaacaaaaaggaaaacagaggagaagaatcgaggatccaaaagcccatctaaggtgagagaagaggggtccaaactgagattggaacaaaatcggttttagggtttcagaaaggcccaaattagattcgagtagagcagtcccacagtgactccgacatgacaacacttgagttacacaagaccaccacgtctctatactctaagtctatgccgtacgtcaaaggcaccaactctttcatcacatatattattaatcaatttatacaaaactccaaataattcacgggaccaatactgaatcgaaactaaacgaatttgttaaaatcggactttgtagatgcaaccgaaacagagtaagtacatgaaaatacgtacaactgcatgtgatttattgtgaaattctatgggaaaaaattgaattgacatattatgcaaaatgcccgtatgttacataaacttttatttttgtgtgtgtgacttaacatgagtgtataaatggaactttttttgttttattttgtttcatataagaatttacgatgtaggaaaaaaattagaaatgaaaagaggtggcaaaagaaaaagaagtgggagaaaatagatgtcaaggaatattgatattcttcttttctccgatacattacttttccttccattatcttctagtaataatttaggcttttgctgccaaataactcacaaccaaaaaagcccaccgaggaagatggttgttagggtttttctctgttttatactttccttgggctatcttacgtacgtaaaatatttctttatatatttgtctagtttcatcttcaatctgaaaatattattcaagtttcaggtacgattcatcaatctttgtattgtaaattgactcttctacaaaaaaaaaaatgaaaatagaaataagaaccaataactaaacttaaagaattaaatatgctaatttcaattccaatgtgccaacaatgaacgcaattatttgatcttagactaaaataatcactcgaggaactcgtttcaaaagaaagaaaccaatcaaatcattgccttccaactacggatactgagtttttttaactcattataacacgtgagatcgtcactatctcacgcatttttctttttgggtgggtaattcactatctcacggattacataaatgtttatggattatgacgattggctgcattggaagatgtatagcccaagaaaacatatttaatccagtatgatagccttgtgatgctctataatttaaagcatggttttatatataactgtgacgtaaatatcaaggtctaaaagcattgtcattttatttttatttcgtataaatgaaaactttagtctaaaacacccggtcatgtaaaagttaaaggaaaaagaaaagaatgatagctgattaattatggcaatgtcgtactatactacgtcgagaactattcatgattagatattcatcggtatgataaatcatatatatgtgatgtgcctagtgcagaaacccaaactattatttatttatctactcctttgggctttgacgtgcaagtaaattcttagatgttgttttcgaagtttatgggtaggcaaaccaaaatctggaatgagatatagaagaaacaaaaagaatttcgagaatgaaaattatgtctcattttaaattcaaatgaactataattcataataagaacatatgttaaatgatgtttttacaacttgatatggatttaaattacataaaagagaaaacacaacttttacctactccttctcacaactcattcatttttggtgtaaagttgatatatgtggtggacaagtgaaatttggcaaaacttggtttaacaattggctaaccctatgaaacaaattaggcctttgggtagagctttcttttatcaagtaccaacttcgaggttatatatatgctctgcttttatatattttggcatgattctaggactcttttggatccttcgattgatatttgtagacatagcaaaattggcagtgcaaagataaggttgctgtgtaagtcttgatagaatttagcaaatatagagactactcatctcgtctattctctctctataagttaaaattgatgggtttgatatcaacaagacattacaatatttctaaaacataagaatatctatacattagccatcaattagcaacaaattttttaataatcaatttaccatcataattttgtagcaagttggtgaaggaagactcttttcttggcagccaaacatcacattaatcccattttaacaataaagtgattaaaaactaaaagaactgaataaaataaaaacaaaagaaatgaatgaagcctttggctttgctttttctctttttgattctctccactttatttttcttgttgctactgctaaaaaaagcatcttcttcttccttttttcattcttaagagtcttttgcttttccttgttcgactctctcttttcacttatttagcttttgcttctgattggaactaaactcaattctctccttcttcctcctctttgcgtgtggtttatcttcctctaattaatctattgatctcaattctcaacctttttgttaatttcaatttccttacccctctctgcgttctgggtttccgagtctcgatttctgggatttcttgcttctcacatgaatctgtttcgcaacctaacttattcatcggagtgatatcgatattcttctcaaattttgaagcttttcgtttcgaattgacaattc

SEQ ID NO: 11841 - DNA, 3000 bp, Unknown
  misc_feature (1)..( 3000): cDNA_ID_1807670_gDNA_ID_2214519_Annot_ID_184555 3000 nt of
gaaaagaaaagaaaaaacaatggcggatcagctcacagacgatcagatctcagaattcaaggaagccttcagcttattcgacaaggatggtgatggtatgcttcatcctccctttccctctatcatcgtaggtcttggccgtataattctgatttagtttctgcttgatttggttcccttttgatatgtatcgattaccgtggtgacggatccattgttcgtatcctcgcattgactcttttcgttttcgatgttccaaatcattattgaattcaaggatttgtttgtgcctttgttcaaattaaagatctatgtagttcggatgaaatatttgtgaatcagccctgtggtgttagtgatgattcatgttttcaattcgtattttgaccagtttttattgatttgttctgattctggatttgcatcgtagtaacaccaatctttgattactttgtgtaggttgcattaccacaaaggagcttggtaccgtgatgcgttccctcggtcaaaacccaaccgaagctgagcttcaggacatgatcaacgaagttgatgcggatggtaacggaaccattgatttcccggagttcttgaacctaatggctaggaaaatgaaggacactgactctgaggaagaactcaaggaagctttcagagttttcgacaaagaccagaacggtttcatctcagctgctgaattgagacatgtgatgactaacctcggcgagaagcttactgatgaagaagttgatgagatgattaaggaagctgatgttgatggtgatggtcagatcaactacgaagagtttgtgaaggttatgatggctaagtgaggattgaaacaacttcttcggctttctccttttttttttttgactaccttcttatgtaatttcataaagaatgttccttcgctttgttctaaaatttcattcatggctggtttttgctggttaaaaagacaggaatgttatgtgtttttaccttttgtctaaatgactcattgttcatgttattgacaggttcagaacctgattcttgaaatataacagtaatgagatcttcttctattatcttcgtattgatcattctctttagaatctgtcgtcgtatgtagaagcaagaagatgcttatcggttgcggtaagggtagggagcttaacccgagttggctcagacgatgaatgtaaaggagagaagagtatagaagttgtctcagacattccattgttgaagtcaagcacagtctctaagctgtaaatactctctccagctgcataaccacctaagagttgatacgatctgtctgattgatccatcgtcaaacacatatcttctgaacctatcatcaatcaattcagatttcttgagtgtcacaattaggttcaatttgctaaatggtttcctcaatcaaaaattcaaaattcaaaacttacaggcagcaagttcaagctgagtttgataaacgaattcaagaactgcggagacatctcgctcgaattcatgaaacggtccgtcttcgaaattcatcttccttagcttacatactccttctcctaactccatcatcgctcctttatggttcttcaaatcccaaaacactcactaaaattacctcaaacgtgaacgaaaacgagcaatagatggagttaaaaggagagtagatttacgttgttgaatagatggtgaaatccaacagcacattgaagaattccatggattaaggtacgagttggttcctctgcttgaatccaaagagcttcaagcgcgtcatgacttttgtaataatccctcttgttgaagagagtcactgcttcctcaaagctccaatattcttccttatcctcgtcactatcctcttcgtcttctccggcgtggtcgttgtatctgacgattgatcttcgactgaaacggacgcgtatggagctaaattttgtggaggctcgaatcgttgaagcagtaacagagattggagaagaagggattaaggagctgaagaaagaagatggaggaagcgtgaaagatgaaggaacctggaaatgtttcgaagaaactgccattatcaaagtcaaaggtcgagctctgtctctactgcatggttctggcttgcgccagttttgtggtcaccgttttaccaaaactttgtaattgggccactatttgggtccttattttttatataatttaggcccatattttatggcgaagccttcctcatatcatatggttgtctcattcgtaaattatttttctgcagtagctttctcttatgattatcaaatttgttgattatttagggcttttatgttgtcaaaaaaaaaaaattagggcttttgaatactcaagtttttccagacattaagttaaaacaaatactgtatattatttaatttttgttaaataacaaatttatgttatcgcattgcactgtgtgagatttatccggacaaaacacaatgatagaagcagcataaatcatatcaggatatgccttttattgtttatctttaataccttagaaatggtatcttatcataataacttaaaggatcattattatggtagtggtaaaacatcattattattcataagtaaagatttaaagaatgttcaattttttgagatttgtttttgaatttttgaattttggaaatgcagtaatatactatatagtcccaaaagtccgtatgtatcttcagttcaattgatggatcatatagaactatttagaatgatgatggtggcaagacaatgacctaattaaggacccttcctaaaaatttcaaactctatagcaactttttccccaccaatatatatataaatacaaaaatcaagtatttaacatctaaaataaaaaaaataaaaaaaataatctacactctctaccctctcatttcacgtatatataatccatcttttaggacagaacccaccgaaagctccacaaaccccattaattaacaaaaaaccaaaagaaggcggcgcaaacaaaagata

SEQ ID NO: 11842 - DNA, 3000 bp, Unknown
  misc_feature (1)..( 3000): cDNA_ID_2707639_gDNA_ID_2214519_Annot_ID_184554 3000 nt of promoter + ATG
atgatcaacaaaaacagtagactagacatttcgctaacacttaattaatctcaactaaaagtaaaacagttcgtcataatcacatggatatatacgaatatataagaaagaaagaaaaccaggcactgcttatattctttggtctgaaaaatgtggtcaaatgtacacatttagaaagacatgaacaaagaaagagataggagagtttggattcatttggggacaaaggtgacataagggtcgctttgaaactcacagcatacaaacatagaccttctcttcactatatatacatatatattcacatgtatagtgtgtatatgtaaatcgaagtaccctagtttcttttggacttcaccaatcacatctgttacttagattcttctacgtcgacaaatattcccacaatctcaaaaccctagtcatcacaccaacaaccaaaaagatatatataaatagaggaaaataacatgacaaatattctttatatataatatagatctttttctttttcttgaaaaagaaaaaaaaaagaaaagaaaaagaacacaccaaacctacttacaacatttgcttacactcccaagacttagtaactaaaaccatataacatatatattattaaagaggaataaaaaaggttttggtaattataaccaagttaattatgatcataccctatatatattaatcaattatagactttttagtgtgctcaattctcatcatttcacaccattatgatgtgatccagcgcacgacgccgctttgaccgttctcctcctccaccaccagaactacgttccatcaacgacttgcttgaccgctcaagcagcgacttgagagcattttgcaaaaaatgcacagactcgacgccgtgcatctctttgtcagcagctacgacaagaacacttcttgtccgaccaccaatggttaccatctcagctcggagagtcttcatgttaagagacttgagaatctccataaggtccggcaagagatctgatctatcttcacaacatagagaggctttgaagattatatgaccgtcgtttgaatagtctccaaagtgtagaacactaatttcgtcggtctctgatggtaataatgtttggtcggagtcggaggtctctagggtttgctgtttaagttctctgactcgttgaactactttggcgagcagtgtggctttatcggtctgaaaatagaaacatgaaattacaatgaaaagtttggatcaagaagttgaaatttgatgtttgtatcaaatcaaatcaactgaaaaagcttgagaactttcccaaaaagtgatatactatcccaacgagcttcacaaaaaggccatgaagcttttcgtttttctcatctgatcactactcgccagttttgaatattcaaatcaaaatatatatcaatctttagaattataaatgtagaaaattagggatcatctttgataaatatgtgcttgttaataagtaagaatagtaagacaaaaaagactcaattgaaaccaaatgattataaaatgttatcatgaaaaagtacagtattcatgagctaacaccaaatcgaatgaaacatgagaaaattttaaagatgtaaactctgggttagagaagatgcaaaaccctaattatatacccatttcaaaaatcttttcttaaaatttcaaagaaatatatacgtacagatgtataaacatcatatgtacgaggagagatacatacgccaaatgaaaaagtatcaaaagtttatattaccttagaattacaagagagtacgttacgaagcttgttgagatgagaattgatcctctctctccttcttctctcagcttctttgtggttcctcaaagcagctaaagctctgtcttgagccatcgtttctccgatgccggagatcgccagtgggtaatacgatgacgtcgacgacgaagacccacataagctctgcatagtcgtcatgtagtcgccggagacgcagtaccctccaccgccgacttcgtttccggcaagaaacgagtacaacatctgatctgaggtctctggttgcattatcttttgtttgcgccgccttcttttggttttttgttaattaatggggtttgtggagctttcggtgggttctgtcctaaaagatggattatatatacgtgaaatgagagggtagagagtgtagattattttttttattttttttattttagatgttaaatacttgatttttgtatttatatatatattggtggggaaaaagttgctatagagtttgaaatttttaggaagggtccttaattaggtcattgtcttgccaccatcatcattctaaatagttctatatgatccatcaattgaactgaagatacatacggacttttgggactatatagtatattactgcatttccaaaattcaaaaattcaaaaacaaatctcaaaaaattgaacattctttaaatctttacttatgaataataatgatgttttaccactaccataataatgatcctttaagttattatgataagataccatttctaaggtattaaagataaacaataaaaggcatatcctgatatgatttatgctgcttctatcattgtgttttgtccggataaatctcacacagtgcaatgcgataacataaatttgttatttaacaaaaattaaataatatacagtatttgttttaacttaatgtctggaaaaacttgagtattcaaaagccctaattttttttttttgacaacataaaagccctaaataatcaacaaatttgataatcataagagaaagctactgcagaaaaataatttacgaatgagacaaccatatgatatgaggaaggcttcgccataaaatatgggcctaaattatataaaaaataaggacccaaatagtggcccaattacaaagttttggtaaaacggtgaccacaaaactggcgcaagccagaaccatgcagtagagacagagctcgacctttgactttgataatg

SEQ ID NO: 11843 - DNA, 3000 bp, Unknown
  misc_feature (1)..( 3000): cDNA_ID_2707635_gDNA_ID_2214519_Annot_ID_184552 3000 nt of promoter + ATG
tgtttttataaactatttattaaaagttagtataagaaaactataacataaaagtaaaatataatttagacaaatgtagcgattggtccagttactcatccaaaattccaaatgaatcttccaccgttgataattctattccattgttttcttctgtagaagaccatatattattaagtctctagtccattgtcaataaatggaaatacaaaaaaaaaaaaaaaaaaaaaaagaagaagaagaaaaagacagcatttaatgaacgaaaataatattaatgaatttggaagaaggaacgaaccaacgagaaaaatcaacgaaataatttagacaaatgtagcgattggtccactacccatccaaaagtccaaatgaatacttcaccgttgataattctattcaattgttttcttctgtagaagaccatatattattaagtctctagtccattgtaaataaatgtttctttcaaataaatggaaatacaaaaaagaaaagaaaaaaaagacagcatttaatgatgataacgatttggaagaaggaaccaaccaattagagtaacaaaccaaggaggcgactcacatgaaagcaaaagctgacatggcagtgaattcagttttataaaaaaggcttcaaggccgagagttcgtagtacaaactcttctctcagtcatcacagaaaataaaaaacaatggcgaataagttcactagacaacagatttcagagtttagggaacagttcagcgtatacgacaagaatggtgatggtatggttcatcgtctctattcctctaatcgtacatattggatcctgaatcatcttcaaagcactgaaaatgactaacacaagtccttgattacttcttgtaggtcacattaccacagaggagttcggtgccgtgatgcgttccctcggtttaaacctgacccaagctgagcttcaggaggagatcaacgattcggatttagatggtgacggaaccatcaatttcactgagttcttgtgcgcaatggctaaggacacttactctgagaaagacctcaagaaagatttcagactctttgacatagacaagaatggtttcatctcagctgctgaaatgagatatgtgaggactatcctccggtggaagcaaactgatgaagaaatcgatgagattatcaaggcagctgatgttgatggtgatggtcagatcaactacagagagtttgccaggcttatgatggccaagtgagatttaaacaacttttccgcttcccctttttttactacctcttatctaatttcataaagaatgttcctctcttgttcttaaatttcattctgagttcttgtgtgtatggctaggaatcaaggtcatgatactaaatatgacacaactggtggcactttggagagggacttggcggccggggttgccaaaaatatcatcgcagcgccaatgaccgacttcatcaaaaatttgttcgaagcgttgttttcttgaaatggtacatcagtaactttatgccattagggtctggctggtatgttagatctctctaaaaaggcgtttgatctttgaaaataatttctatgtaataaatttattgtgttaccatcttttcttgcatgcaatttattaaaatgagtttgtaatatggtttcagtatcgaatataattggggtatcaatgtatcttttgagaaaaacatttaaaacgtagcagaactaattattgaaaactggtagcattactaaaaattgatctaaatcggttaatgatttggcacatacagtgatcaaatcagctaagcctcatatctcaccgtcccagagttcttcaagactcttataaggactcatctaatgaataatgacatgcctcgcaccaacctgccctgcaacattgaaaacacacgtctacaatttcgataacccaagtgttttgagcaaaacaaaggacgccctttgacccatttggactacaatgtgtggaaaattactgcatgttcaatatcagaaaacttggataacatgtcttcgatatgggcttttcttattttgtacccgtgtaatttcgctggcccaaaatccaaagcaacaagggtaaatttgtatgcagtacatgtggcatgttgggtcatatggaaacaggtcacaagactcagattctttacattgcggcgggtagtagtagctttctagtctaccttgagattgcccctgcccgtgattcttgagtcgggcacaggaagtggttttctgtcaactttacttgctcaagccatccccgcaaggtagaaacttctgtggtctttctcgttatttcttatgtaccatgtttttggtcgtttgtgtagtttcttctaaccttccacacacttgtcttgcgaattccttccacagcagagatgttaaatcaggaatattcaggatgtagaaacttctctgctctttctcaagtagaatgcacttgtggaatccctcagatcagatttcattggtaacgttcgttaacttcaacaacaacactttactaaacatgtgctaatcaattgtcatacgcttgtatttcttcgattcatttttatcttatgcaagtgttttctctattatgatttatttagttttgcataaataaggacactccttcggagtcagtataagaaaactataacctaaaatataaattaggcaaatgtccactcacccatccaaaattccattgtaaataaatgtttctttcaaataaatgaaaaaaaaaaaaaaaaacaagttggaagaaggaaccaaccaagtaattgccagtcaaaggaggcgactcacacttgaaaggataagctgacatggcagacaacgatcctgcgtagaaattgcgtgaacgtggaaaagtttgaggatatagccgtcatttcaaataattcgggtactattatataaggcttcaagtcctggttcgtagtacaaattgtctcacaaactcttctttcagtcatcacagaaaacaaaaaaaaca

SEQ ID NO: 11844 - DNA, 3000 bp, Unknown
  misc_feature (1)..( 3000): cDNA_ID_1808111_gDNA_ID_2214519_Annot_ID_184551 3000 nt of promoter + ATG
attctcctccgacaagttcatatgcaatcatctgatgagcatgtactccaagcttggagattttccttccgctgttgcagtatatggacgtatgcgtaagaagaattatatgtcatctaacatactcatcaatgggtatgttcgtgcaggcgatttggtaaatgcccggaaggtgtttgatgaaatgcctgatagaaagctcacaacttggaatgctatgattgctggtttgatccagtttgagtttaacgaagagggtttgagtttgtttagggaaatgcacggattggggttttcgcctgatgaatatactcttggtagtgtttttagcggatctgctgggttgaggtcagtgtctatagggcagcagattcatggctacacgatcaaatatgggcttgagttggatttagttgttaatagttcgttggctcatatgtatatgagaaatgggaaattgcaagatggcgagattgttataagatcaatgccggttcgtaatttggttgcatggaatacactcatcatggggaacgcgcaaaacggatgtcctgaaaccgtgctttatctgtataagatgatgaaaatctcaggttgtaggccgaacaagatcacatttgtaactgtgctcagttcttgttctgacttagcgataagaggtcaaggtcagcagattcatgcggaagctattaaaattggggctagctctgtcgtagctgtagttagttcattgatcagtatgtattcaaaatgtgggtgtcttggagatgcagctaaagctttctcggaacgtgaagatgaagatgaagtgatgtggagctcaatgatttctgcttatgggtttcatggacaaggcgatgaggcaatcgagctgtttaatactatggcagagcagacgaacatggagataaacgaggtcgcgtttctgaatttactttatgcgtgtagtcattctggcttaaaagacaaagggcttgagttgtttgacatgatggtggaaaaatacgggttcaagccaggtttaaagcactacacttgtgtggtggatttgctcggtcgagcaggctgtttggatcaagccgaggcaataataaggtctatgccaataaaaacagacattgttatatggaaaacattgttatctgcgtgtaacatacacaaaaacgcagaaatggcacagagagtctttaaagagattcttcagattgaccctaatgactctgcttgttacgtcctgcttgcaaatgttcacgcctcagctaagagatggcgcgatgtatcagaggtgagaaaatcgatgagagataagaatgtgaagaaagaagcgggaatcagctggtttgaacacaaaggtgaagttcatcagtttaagatgggagatcgctctcagtctaaatctaaagagatctattcatacctgaaagaactgactctggagatgaagctgaagggatacaagcctgatacagcgtcagtattgcatgatatggatgaggaggagaaagaatcagacttggtgcagcacagcgagaaactagcggttgcatttgcgctcatgatattacctgaaggtgcaccgattagaataatcaagaacttgcgggtttgcagtgattgccatgttgctttcaaatatatatcggtgatcaagaaccgagagatcacgttaagagatggtagtagattccatcatttcattaacggaaagtgttcttgcggcgattattggtagctgggcagttaaagtatgctatgactctctgcttcagagtctttctggagtcttaagcactcagattggatcgggaagccatctgggacgaaagcattcagcagcaagggtaaaattacactgcgggtagtagctttgtagtctaccttgagattgctcctgcctgtgttattcttgagtcaggaacatgaagtggtttgctgtcaactttacttactcaagccatctccgcaaggtagaaactatggttcgcgttatttcgtatgtaccatgtttttggtcgtttgtgtagtttctaaccttccacacccttggcttgcgattctttccaaagcagagatgttagatcagaggatggagtgggttctcaagtagaatgcacttgcgaatccctcagatcagatttttcataggtaaagttcgttaacttcaacaacaccactttagtaaacatgtgataatcaatcgtcataagcatcttcgattcatttttatcttatgcaagtgtttgctttattatgatttgttaagttttgcataaatacggacgttgaagcacttcccagaactcatgagtgtttttataaactatttattaaaagttagtataagaaaactataacataaaagtaaaatataatttagacaaatgtagcgattggtccagttactcatccaaaattccaaatgaatcttccaccgttgataattctattccattgttttcttctgtagaagaccatatattattaagtctctagtccattgtcaataaatggaaatacaaaaaaaaaaaaaaaaaaaaaaagaagaagaagaaaaagacagcatttaatgaacgaaaataatattaatgaatttggaagaaggaacgaaccaacgagaaaaatcaacgaaataatttagacaaatgtagcgattggtccactacccatccaaaagtccaaatgaatacttcaccgttgataattctattcaattgttttcttctgtagaagaccatatattattaagtctctagtccattgtaaataaatgtttctttcaaataaatggaaatacaaaaaagaaaagaaaaaaaagacagcatttaatgatgataacgatttggaagaaggaaccaaccaattagagtaacaaaccaaggaggcgactcacatgaaagcaaaagctgacatggcagtgaattcagttttataaaaaaggcttcaaggccgagagttcgtagtacaaactcttctctcagtcatcacagaaaataaaaaaca

SEQ ID NO: 11845 - DNA, 3000 bp, Unknown
  misc_feature (1)..( 3000): cDNA_ID_1379513_gDNA_ID_2214519_Annot_ID_184549 3000 nt of promoter + ATG
ggttgggtttaaaccaagcatttgggcaggctttgttggggacattagggacagctagcccaggagctgtaggtggaatgccaagtggctatggtactcaagcaaatatctcacctggggtctatcctgggtacggtgctcaagccgggtaccagggcggttatcagactcagcaacctggtcagggcggtgcgggaagagggcagcatggtgctgggtatggtggtccttacatgggtcgttagattagccactcaggtaattattttcagcttcttttcatctatttcattgatgttctgtatcagaagactttttttgtagttcgcttggttcccttgtgtatttcaagacatggacttgctgtattttgaccttttcatggttactccattatgttaaactttttgcgttgcaagatcattttgttttcaaagttcctgtgactttgttgtgtttctgaagggtgttaggttttgcatcagtttataaaagtcttctcttaatttcttaattcattgtgcagatattccaatacagtactttttaaaattggcctggtgaatcttctgaagttattaaggagctgatgcaaatggagttgtttagtttttggatgaaatgttactctttcgtgtcttcaaaatacatgactcttcaaacctttcaagaagttttagttttcccctacttgttttctcaactctttttatgatatcccaaatacactgttctgatttaacaactatcgtttctgttttaaacttttgggaacgttttcatttgtaaaacttaaacagtgttcctcatggacacacaaacgctttcactatgtttgaatccgtattttccattttctcttaatcagactcgtttttattggttctcgctatgtttcgcggttttgtggaatttttccatgcacgtaattcctcttaagattttgaccttgtgagagtatgatcacacatcactatgcatatgtacataacggcttatcttgattaccacatattatatctgcttaatccttattcctcttgcaggtaatttaagagcaagctgaacggtcaacacttacgcccaacaaaaatctatggggtaccaaatatttgaatgccacctatctgctttttcttttatatatactgaaaagtgaaaagggatgaatctatgaattggtagctttataactaaagaacgaattaagcaaaagttgttttcttgtttaacttagctaggcatctacctgaatccaaaagagcaacttgttttgttttgtactaataagtatcaacaagtcttgacctgcacatgtcaagtttttgacttgatttagagcagcttgtttcttgtgtgtccttggagttctctactgtttctatagctttgaatgagctttccatttgaccacatctcaaaaaatttggtaatgtgccttagaataacaccgagtttggtaacacagctggaattggtgttttgctgtggcatcatgggagctctgaaatgtcttcccagttaaaggtgagtataactgtttgcattgtgaagatttgtattaactatagaacattgaattgatggtgttaagttcttacacaagcgtgcttctcggtttgaactgtttcttttgtatgttgaatcagagcttagtttataggaaccagagtatctacttagtcattctctaatgctaagtgctaaggttctacctagttgccctctaggcccttatgttattgataacttatgaagctatttgaacacttgattcttaggagacctaagttggtacagccagatagagtgtatgttcttgttctctatgtgacaggatcaagctgccacacatagttcaagggtatgctctgtgtgggtttgctcagattgaggacaaatctatacaaggaagtagagtctttgacattttgatgttgtatgataagaagaagaaaggagagtaataaagaaagagaaaagggaaacagaaacacgtgggagaacatcccaaagaggaagcacacgcggatcttcatgcaaagctccccgattctcccatgtggtccctttctccctttgtccccctcctctttcttcttttctcattttactcctttttttaccattatacaacgaatcttttttatcataattttttggttttggtttattttccaataacaccttcttggttacttcccattctcactttttcatataagaaactcactttgggaaacttatgtttgagaatgacaagtctttttagagaaagtgatgtaacaaatctaaagtgattatataataaccttgcacaatgtttttgattttttgtaagattcgaatattaggtttattattcgtagggaataaacttactttcaaaagcgttcataagttaatactttcatatatgatcataagtacggacactattgttttttgtttgtttgtgtttattctaaaagaaagtagcttttaattgaaatgtcctcagaggcacagtttaaagttcgagtgtaacagtttctaaggcaaaataagctctctttctactatttctctttctctttctactatttctctcctgtggagaaactcaggagatagagagagagagagagaagagaagagagcatgtatgtttggttttataatctctctactcataccaaagatttgtctcagacccaccacttggacagagagaacccaagctcctttctctctttttctcgatctactccttcttaatctccttttttgaaacttgaagccactttcaacatcatccttaaacttttgttcccttattcacaatctcctgccacctctcatttctctagttgagttgttatctgcgtttttaagcactcgaatactgcatgcaaattccctgattgtttgttagtaccttagagattctcgattttttagttgtttagattgaaccaggattactaaattgttattgttttctgtgtaaaggctacatat

SEQ ID NO: 11846 - DNA, 3000 bp, Unknown
  misc_feature (1)..( 3000): cDNA_ID_3023170_gDNA_ID_2214519_Annot_ID_184548 3000 nt of promoter + ATG
aacaaaaagaccccacaaagtgaatattcccccaaaacccaaatcacaccctcaggattcagattcttccattaaaagcaacaaaatcgaaaacgttacacaaaatctggtttcgacattcacatatcaacaccattgttaaaataatctattcgcagcctgaaatatccggtttcataaaaagcaagagaaatcgattccctaatacattaagagaaacgaattcgtattcgactattcgtttacacatcaatggaagagaaagttgtcaccttttattataaaaaaaaaacagaaaaaagttgtcaccttttccagaagaaagaaacgaaacccgtgaatgaatgagtcgacgggtttatacttggaagaattatccgggagattttaaaggagaggcctttaagcgttaaagaggtagctctggtgactgctattcgtttgtctctttgctgttttatggcgatttatatatcatcatcatgtgttccttctggaaaacacaaatcaccatctgaacgaaataaagagttaaaagagttttctactccaatattccttcaaactacaaataaatattttatatctttttttccgtggtcttatttttattagagttttatttctttagcattattgtcgctaaagagtagtggatttggtatcatcgattttagtcctattctgtttgttttgaaattgtttttctttatgtcacgtcgccggaaatttgttggccataatttagtaggatatattgggtgcatgtctaccaaaataatgagataaataataattgatggaataattagaaattaattatattttatatcttttattggaaacttttctcattattctttttttatttattttatatttcattgtaaatggtaaaatttgtgaggaatctattattttaccatataataatgagataaatggataataattgatggaataattagaaataattaatattagtatatctttttgggctaagctaatgcaagactggtcaattggagatgaacccaaaagtcatggtacattctatatgggcctcaaaagtccatgtgacataataattcaaggcccaataggcgtcttcttgttatatatttttttttgtttctcaataagacaagaattgtcttcacgcttccgcgaatcgttaagcttcacaatttcaagcgaagaggatcaaaaaatcaatttttttggagaagaaccagaaatcacaaaaccctagagggctctcttcaaatcaaccattaaaaccgccaattccgttatgacaaagaagagaaagctcgaatctgaatccaacgaaacgtcagagccgacggagaagcagcagcagcaatgtgaaaaagaggatccggaaatcagaaatgttgataatcaaagagacgacgacgaacaagtagtagagcaagacacactaaaggagatgcacgaagaggaagctaaaggtgaagataacatagaagcggagacgtcgtccggatctgggaatcaaggaaatgaggatgatgacgaagaagaacctattgaggatctattggaaccgttttcaaaggatcaacttttgattcttctcaaggaagctgcagagagacatcgcgatgtagctaatcgaatccggattgtggcggatgaagatcttgttcatcgtaagatcttcgttcacgggcttggatgggatactaaagctgattcacttatcgacgcttttaaacagtacggagagattgaagattgcaaatgtgtggttgataaggtatctgggcaatctaaaggttatggctttatcctctttaagtcaaggtctggtgctcgtaacgctcttaagcagcctcagaagaagattggaactcgtatgactgcgtgccagctggcgtctataggacctgttcaggggaaccctgttgtggctcctgctcagcatttcaatcctgagaatgttcagaggaagatttatgtcagtaacgttagtgcagacattgatccgcagaagttgctggagtttttctcaaggtttggggagatagaagaaggtcctttggggcttgataaagctactgggagacctaaaggtttcgctttgtttgtctatagatccctagaaagtgccaagaaggcattggaggagccacacaagacttttgaaggccatgtcttgcattgccacaaagcaaatgatgggccaaaacaggttaagcaacatcaacataaccataactctcacaatcaaaattcccgttaccaaaggaacgacaacaatggttatggtgcccctggaggccatggacatttcatagctggtaataaccaagctgtgcaggcgtttaatccggccattggccaggccctcacagctttgctggcatctcagggtgctgggttgggtttaaaccaagcatttgggcaggctttgttggggacattagggacagctagcccaggagctgtaggtggaatgccaagtggctatggtactcaagcaaatatctcacctggggtctatcctgggtacggtgctcaagccgggtaccagggcggttatcagactcagcaacctggtcagggcggtgcgggaagagggcagcatggtgctgggtatggtggtccttacatgggtcgttagattagccactcaggtaattattttcagcttcttttcatctatttcattgatgttctgtatcagaagactttttttgtagttcgcttggttcccttgtgtatttcaagacatggacttgctgtattttgaccttttcatggttactccattatgttaaactttttgcgttgcaagatcattttgttttcaaagttcctgtgactttgttgtgtttctgaagggtgttaggttttgcatcagtttataaaagtcttctcttaatttcttaattcattgtgcagatattccaatacagtactttttaaaattggcctggtgaatcttctgaagttattaaggagctgatgcaa

SEQ ID NO: 11847 - DNA, 1801 bp, Unknown; identical to SEQ ID NO: 11834
  misc_feature (1)..( 1801): cDNA_ID_2706352_gDNA_ID_2214519_Annot_ID_184539 3000 nt of promoter + ATG

SEQ ID NO: 11848 - DNA, 3000 bp, Unknown; identical to SEQ ID NO: 11844
  misc_feature (1)..( 3000): cDNA_ID_1808111_gDNA_ID_2214519_Annot_ID_134026 3000 nt of promoter + ATG

SEQ ID NO: 11849 - DNA, 3000 bp, Unknown; identical to SEQ ID NO: 11843
  misc_feature (1)..( 3000): cDNA_ID_2707635_gDNA_ID_2214519_Annot_ID_134027 3000 nt of promoter + ATG

SEQ ID NO: 11850 - DNA, 3000 bp, Unknown; identical to SEQ ID NO: 11842
  misc_feature (1)..( 3000): cDNA_ID_2707639_gDNA_ID_2214519_Annot_ID_134029 3000 nt of promoter + ATG

SEQ ID NO: 11851 - DNA, 3000 bp, Unknown; identical to SEQ ID NO: 11841
  misc_feature (1)..( 3000): cDNA_ID_1807670_gDNA_ID_2214519_Annot_ID_134030 3000 nt of promoter + ATG

SEQ ID NO: 11852 - DNA, 3000 bp, Unknown; identical to SEQ ID NO: 11840
  misc_feature (1)..( 3000): cDNA_ID_2707641_gDNA_ID_2214519_Annot_ID_134031 3000 nt of promoter + ATG

SEQ ID NO: 11853 - DNA, 3000 bp, Unknown
  misc_feature (1)..( 3000): cDNA_ID_2707645_gDNA_ID_2214519_Annot_ID_134032 3000 nt of promoter + ATG
tgagattgatggtgaggtgggtcgtggacattttggatatacttgctctgctaagggtaaaaaaggtagcttgaaaggtcaagaagttgctgttaaagttattcctaaatcaaaggttcgatctttgaaactgaaaatcaatttctcttaattctgtattcgttatgttgttttgaaatatatgacaatgatttcgaattctagttttatcgccatgtgtttatagaagtatacagcttgtttctcgaccccgagtcattgcttagtgttgaatggttttgactgcagatgacaactgcaattgcgattgaggatgttagtagagaagtgaagatgttgcgggctttgactggtcataagaacctagtccagttctatgacgcgtttgaagatgatgaaaatgtttatattgtcatggagtaagtatacatttctcagtgagatgtcttaagatcatttgattttcaattccaggattgcaataaatatattgtaatctccttttaccagattatgcaaaggtggtgaactcttggacaaaatacttcaaaggtaattgctaatcacacatggctctgtatctgattgattttctcttctgaatcgtgctttgactggttgagcttgatctaattaggggtggaaaatactccgaagatgatgctaaaaaagttatggttcagattctcagtgttgtggcttactgtcatctacaaggtgtggttcaccgtgaccttaaacccgaggtactttataatccatggtgatgtttaatttctagattgttctctcattgtttttttttgtaaatcattttggcttttgttgacacttcactttctaggtcccatcacattaagcagtctttgtacacatagaaatgagttccactaacttatgcagagtgataatgacggttatgtttctttctatttgtttgtttacctttcacagaactttcttttctctaccaaggatgagacttctcctctgaaagcaattgattttggtctttctgactatgtcaagccaggttagagatgttgaaattgactcaagatttctcatatcaaactcatcttcatgttaaatagaaaatttgacggtgttttgcaattctgcagacgagaggttgaatgatattgtagggagtgcttactatgtggccccggaagttttacaccgtacatatggaacagaagctgacatgtggagtataggagtgattgcttatattcttctctgtggcagtcgacccttttgggcccgtactgaatccggaatctttcgagctgtactaaaggcagaaccgaattttgaagaagctccttggccttctctatcacccgaagctgtagattttgtgaagagattgctaaacaaagattaccgtaaaagactaactgcggcccaggctttgtgtaagtataatatctttgatctctataacaggtttaacacatcattattttgttttcatggttctgcacttcttatattctgaacatctgagtaatcaattgtctttttcctcaggtcatccctggctggttggctcgcatgaactaaagattccatctgatatgatcatatacaagcttgtaaaagtgtacataatgtcaacttcattgagaaaatcggctttagcggtgagtttgattccacagaagctgtgacatatatactacttacttaacaatttcaattgttgagttctttgaatgaaaactttatgattaatgggttttgtttttcatggttttaggctcttgccaaaacattaactgtaccgcagttagcgtatcttcgggagcaattcacattgttggggccaagcaaaaatggatatatctcgatgcagaattacaaaacagtgagttgtttttccatgattccatcaacctcttcagttttcttttgcgatcttctgtgattattgaactttcctctacaaatctcaggcaatcctaaagagttcaacagatgctatgaaggattctcgagtgtttgattttgttcacatggtaagaaagctataaatataaggactataagcttaatcattaggtttggtggtttaacgttgtaatctctgttgggatgcagataagttgtcttcaatacaagaaactagactttgaagagttttgtgcttcagcattaagcgtttatcagctcgaagcaatggagacatgggagcaacatgcacggcgtgcttacgagttgtttgagaaagacgggaataggcccatcatgattgaagaacttgcatcggtataagttttaccctttttaattcacctaggggctagagaagactcgtgaagagcaaaaaacctggtcatgcttgatcttaagcatctgtatgttttaaattgcaggaactcggactagggccatcagtgccggtgcacgttgttcttcaggattggataagacattctgatggcaaacttagtttcttagggtttgtcagattgctacatggcgtgtcttctcggaccttacaaaaagcttagagtaacgccattgttagatgagaaaagatgcaactaggtggagtagatctggtttcttctttcctctccacttcttgatagtttttttagttttctttttctattcatggttaagcttctgagtcaaagattcgataattatgtctgtgagtgtatttgtgtgtggtgggaaggaaaggtttatgaagaagaggaatgtacagaatgagacatatccgattggtgtttttaatccagtgatgtttacgtgtgaagcactcttttaatggcagccggaaaaaacaatttgtctttgtgccatcgttggatcagagcaatgatacgacacgtgattgtgtctcacattgtcagagacaaccacgtgactttgaccttaagatctctgatctcatcttaatctctacctaaccgtcgcaaagattctttctttctctcttcttactctgatctagacactacaacagtttcattaatggcgaca

SEQ ID NO: 11854 - DNA, 3000 bp, Unknown
  misc_feature (1)..( 3000): cDNA_ID_2994434_gDNA_ID_2214519_Annot_ID_134033 3000 nt of promoter + ATG
accgtctcaagacgacacaaagtcacgtgatctgcacgtgtcagattgtttgcacggacttcgacctggtgaccatttcgagatccaatggcgacgaaccaaagagttcccttatggtgcctcttctttctctctctcttttccaaatatattgttctaaattcgaattaaaattcgattacttgtgcgtttgattcgtctgattttggtgaatttctttaattttccggcgtaggttggtggttcggaatcgttggtcatctacaaaactgcgacggcgtacaaaattgtcgttgcgactctgacggtaacaatttaattagtgtttttattttttggtcagaaacagtcgattcgttaattaaggaaaataaaatgtttaatgggatattattggcaatggcagagaatgtggtgatggagttcagacaattcagaccggaatcaccgtggagaagaacggtgataaagaggaaagaccaccgtgagacgggaaatgaagaaaacggtttctacggcggagtaaagaaattgggtacggaggaagagatttctacgtggaagcaattgtggccatcacaagccttggagtagtgttgtaatgtttttggttttcatttaatactttgcttaattgtaaattggttagggaagagactactatttcgatattgtcgcagtagtagtcttaattccttccgtcgttgactgtaaacagaattttttaatcgaaacaaaaaacgacggaattatttgtataaaatagcttaaagattttaaggaaaagtgtttatggccctaatgcaattgctttaagactttaagaatttaggacttttgatgtgaaatcgttaatgatgatggatgcaacaacaaattgggtttattatttatattaaaactatacggtaaatattgtaacaaaatgaaaggatttgggctttatttgcaataatgttattatatgaattagtttaatgcataatgctgataaattattaaaatcagcaaacaataatgaaagattctggattgttctgtttcagctgattatttacattagatatctgagttgttgtttgaattcgagaagttcccggaaacatccctccgtagaaaattcatcggaggcgacttgaggagaaacacggaagctccgatctcacaatttcgcgacgaactcgcttcagcgattgtttctgttcatccgattaagatgaacggaggtccttccggtttcagttacgtatcgaaattgaataacccatttctcattttaacagcttctgggtttttggattaatgtcgaaatctttgaaatttgcagataatgctccggtcacgaaagccttcgtcatcgcgactgctcttttcactgtgttcttcgggatccggggaggttcttccaagctcggcttatcttaccaggtcatttctcatttgattttgctgtattttttattatcgtttttgatttttaagctcttctgggtatatagaagaatgaggatttgaatttggctcagatttgttctctattcgatattcttggtaccaattgtttagctgcgttcttattaccaacattggcactataaaagattacgggttatgcttaggtttccactgcagtgtgcaaggttttgactttattaacaggaagcagctaaaccgataaagctttagtcttggcatcatactgtatagtgctatactttgatggagtttttactaggattagtcatcagacagtggtgtgagctgaataatagatgggtttcttaagcaaatttaggctccaaatatttaatagttcgataatttgcgtctactcgtctgattgtgtatgtcagtagccttgcatttggaaagatgttttgattgtttcagagatctttgtttgtgtggtacaagttcagatttgtttcttttgagaaacggctggtagctgctatgaaaaggtatctctttttaaacttctgccaatctcattgcaggatatttttgagaagtttcggatttggaagttaattatatcggcttttgccttctcgtccacaactcaattgctttctggcttatatttgctatacttcttccgagtctttgagagacagattggttcaaataagtattcggtaagggatagtctagctcagttttttcttcatgacctttttttgtctattattttggtaaatagcaagatacctgctgatatttcctttgagattgaaattctatgagttaatatgtgctcattctgcaggttttcatcttcttctctggatttgtatcactaatactagagaccattttgttatcattgactaaaggtaaaccttcctattttcagatagtctcttcaaaaactagaccggtttgatatgatttacctttatgatatgatttgggggcgctaatgcagacaactatatgggattgtagttattagttagccttgttactagtctttccccactcatcgaaggaaaactgtgaagggaggattgggatattgtgacgatctttgttggtttcaaattctgacctgcaatttccttcactcatactattgaaaatatcttataaagaattcccttggtccatcatttaaattatcaagaaatgctttttgtgcattcttaataagcatttttgatatgaccttttatacactccgtatcacaaacactttacagttattgatagtgggtatataacaaactgctgtcttttttgtagatcctactgcaaacctactgacatctggaccatacgccctcgtattcgcttcttttgtacccttcttcttggatattccagttacaaagaggtttggtgtattgggcgtccacttctctgataaatcattcatataccttgcaggtgtccaggtaaacaataccatatgtttatttgtaggacttcttattcttcttcttattttcattgataattgtctcggtttcaatatttgtagcttttactatcatcatg

SEQ ID NO: 11855 - DNA, 3000 bp, Unknown
  misc_feature (1)..( 3000): cDNA_ID_2707681_gDNA_ID_2214519_Annot_ID_134034 3000 nt of promoter + ATG
tgtatggtctgtcctaattaaagggtctcttaaaatcgatctaatttagcgagggccctctaaatgcccctttcaaaactcctaattttaatgtcactttatacatttttccattctattcataaagttgatgaggttaatcatcatatatataatatattacagtgggttctaaaagaataatatttgggaattttggtgttagttcactatcaaaagaaagttatcaaaagcttcgacaaaaattttttaagtacttttttaaaattgaacttaatcacatagatcttcaaagaagtcaagtcacgtgtacgtacacagatattcaaattctcatgacaaataagataattccaagtttacgacttagcttgactcgatatatgtcaacaaaagttgtaagaatctcgtatagtacgagagtcatcaattttcgggttttcccataaagaataaaaatacctccctttgtcttttattcattttataacaaagtttagtttctctaaggcacccatatgacatggtatgtaggagaaaatgattatacacactatttcatatcgcagacttgaaagaagaaaacttacatacgaatatacgatagatggattttttttttccattatgttatgaataacataacagatgtactcaatagtggcgaaagtcatatttttatatctagctacctagttcaattcttggtttgaaggaatttatttagatgtagagacataaacaatgtaagaaaatctaaacacaatttcacaaagcgaagtattcccttggttcaaaaataactatcacatcttaatatttatgagtctcaccaaatacaaaacgaatcatattttcaccataaccattatagaactcgaacctaaattttttgaaaattgtcggcgacactattaccaatctctagctgatgagttggggctgatgaacgactatgctgatggcgatgaattattaattttggcctaattataaaaattgcaataataccataaccgaagaaattggtgatccttttgaacactaacgacaaaagacaccaaaaaacaaacaaaatttattcgttgttgcattatccggggagcacgtaagtgggttgactttggaagtaaacggacccaaacgacttctcacttcttccaagacaatctatcaagtagatacgtatttatggagttattgtccatgaagatatccattacacatagaaagagaagttctctggaccaatttgttttttgttaaagtccattggaccaaatttcaaattccaaaagcaacacttacaagttacaactttcctcatcaacgattctcaaaatccgtattttaaaaggataaataagataagcccactggaccaaattccaaaagcaagccctcgtccaatgctttacgttgcccaaagattacgaaatccatgagaaaaaggcttttgtgaggaaaagcaaagaaagtttggttacatgataggtactagaatgagctcttaagtatgtaaatttacaaataatttgtaatctttatctatttctcttcgatcaatttgttcattgttggcattacacgctgattgatgatcgtgagtgataagcttagttcaacaaaacaaagctgatggtaaaaatctcaccctacaaaaatctcacttcctgaatgtgacttggggagatttttttttgttctcttccggaaaagcagaatcttcattaaaaacgggctcaacccaatgggctttagacccgacatagagagggtttcatcaacaatgccacatctgttaattagtaactgagtcaaatactaacaaacaagttctaaaaatattaaggcactgggggttttggaatttggtttgggaccgtgtgtgcctgggacaattcaccctaaggtggggctattatatctttggaaataaaaagacttcaattttgtttttagttcacatcttatcaactgcatgtcgtatagcccacttcactttagttgaactaccaaaaggagttgaccaagtcggtgttggtttcgtgagattttggctttaagactttcaagattattatgtggatacatcaataaaccaacttttgttctataatctttaaagtatttttgtacaaagtagttggaaagtttggttgaattaggctacggacaaaaagagagagtagttggggaggtaattacgatttcaatacattctttgcctcaagtgagatttgattttgttgatttgagtagttttaagattgaaatggatcaacctaaaaatcggtgcaacgagcgccagctgttacgcacgacataacctctataaggtcactttctctgtaactagaagcctctcatgggattgtcacttgaagtcttcttatgacccaaccaatgtcattagtggttttgcatctgtttccacctactcctaactgtatttattgctcacccaacttaatgttgcaccttctattaaatagcctcacaacgaatcttttaaaaccctaaacctcattattgttcacagttcgatgtctcttttagtgttttcttattaaaatgtttgtgtttataatgtcttcaacttcaagcttacttgcttaatacttgtaaatatatatatatatatacacagacacatacacaaagcgtgactacatgagacagctcctcttgaattgcgtgtgtaaatgactaaaaaggcaaaaacaaattttcttttcttgagccgtaaatcaatcaatctctctctctctctctctctctttagccactaatctcactctgttttctctccctcgtttcttgctttcaatggagaaacagtacctcactttcatttctttttgtttctccatcaccatttgtgggttcctcatagtttcttggctggcaagaagcataatccgtaatgggattagaacattaacatggagaaaggaaacgaagaggaagaaaaagaatcaagaagatgaaaacaaaatg

SEQ ID NO: 11856 - DNA, 3000 bp, Unknown; identical to SEQ ID NO: 11838
  misc_feature (1)..( 3000): cDNA_ID_2707685_gDNA_ID_2214519_Annot_ID_134036 3000 nt of promoter + ATG

SEQ ID NO: 11857 - DNA, 3000 bp, Unknown
  misc_feature (1)..( 3000): cDNA_ID_3245305_gDNA_ID_2214520_Annot_ID_134039 3000 nt of promoter + ATG
tatcattcttgccatctcttttatacttcaatttatattaattagttagttacaatgtatatttattgtataggttcgaggaatttgaagtattttctattgtatatggtataagataccaaaggacacaagtctaatcgcatgtgctcttctcgtttggttaaaaatcgctgtgattgtttttttactaaaaatcaagctagatgtcatattaggaactatatgttaataacttcatattgcggccattgttacgtaggtgttggaaatagacatttttgttatacaatcactagacatttttcttcttcatcttttttttttttgacttacatgaatataacttataagttcttacttcataaattagggtcataagagtgagcagatgttgtttgatataactggatatcttctatatatgattacagggaagtataggaaaatggatacgatgtaattcgaatatacattacgatgacgacattattagcagcataccatatcatatgaataacagcatcaacggataccgatctcttatttacaggtttgattaaaattacattttaaagaatcgatctagttctctatacaaactatgcggtttttggtaaacagtggtgatcacgatatggaggtacctttccttgcaactgaagcttggataagatctcttaattatcctattattgatgattggaggccttggataataaacaatcagattgctgggtgaataatttttacaatttttttttttgcttctttattcattaactcagtcgaatcatgagctcattagtcattttgaaatccctcttacgattttcttggacagatacacgatgacctatgccaataagatgacatatgctactatcaaggcaagtttttttttttgttcttactcttaatgttttttattacacaaatcattttgtttctcagtaactgttttgaggggtttactatagggaggtggacacactgcagagtataaaccagcggagagctttatcatgttccaacgatggatcagtggccagcctctgtaataataagagatgatgatgccctatgccaatgaaaaagaaatatttgtagcatcaacttttatatatatatatatatatatatatatatatgtttacaatttaatctactacaatattgtaaaagaagatcatctttaagaaataaaaatatttttaaaatgggctctcaacaaaacaaaactgtgtaagtccaaacgtctcataaataattaatcataatattcatgtctccaatcaaataaacctgagggagatggaagagatcgatgtttccaaaggcatactcgacaactatgctttcgattttatcaaaaaaaaactatatttttgtggatgttataagttttctttcagatcataatcattgagttcttgggcacatttgcaagcaccacacctcttacaatagtccaatgtttcttgagcatatttggcttcttgggcatgccgatcgctgcgggctagaagaaaatacccgtgtgatcgaagacacaatgccgataacaaccttgctcttgtaggacataaattccttgacacatgcaaaagttttacaaagcttttgcctttttgtatatcccctttttattttacattgttgaccaaatttgagtcaaataggctaatgacaattaatctactcatcaattcttttttctttgttcttgaaatgaatccattttatcaagaatgaaaacaaaaatttgaactaaaccgagacttgccgaaaaacggttaagtcatcattaataaacaacgcaggaagtggatcatatttttttttttttaaatgtaaaatttattcatcaaaaaagatcatagttacaattagtctgttcatttcgtcgccgcgggtacctgcggccactaaacaaacagactatatatgcatctatgatcatcttaatgtctttgatgagtttggcttggtatttcggtaattcaccgtgtctccactggttttgttctcgtcagattgtgtagatagtggcttgaaaggcgtatcgcaaaatgaaacaatgggtgcgactaatactagaatctgagattgctttaaggatatcaccaaactggtacgtgtcagttgctgagatatcccatgagtgagcttgtaccaaatctgagacgtgacattacatgagaagaagaggtgatcacgataagaaagtggatcgtattgtatttttttattccatcctctaaaaaagggtcaaatgatcattaaagaacaccgaaaaaaatggatcatattgtattttatataccaacctcttgatattttaatcgtttgactctttttttttttttttttggcaaattgccatcatcgcctaagataaccagttttccaatttttaaaacaattattatactatctttccgtcgataagttgtagtttgtcagatattttgaattgcaaatcttgtttagttaacaaagtcataaactacttttctcaaaatcatctcttcattccttagatccattataaaagtagagcgtgtaacatgaagtagttgtgtgcgtgtaacacgaaacagctacgtaacacaagaagatgttgattataaactaatagtcttgggattataatcttttattaatttatcgatatactaattgttctaaaaaaataatttaggatcgaagaaatatataaatttattaaggtattaattcatccaatatgatttcaaagatcctcaatataacctactcctacatgtgactattcaacaaaacgtctggaaacctctattattgataatatatggtcctacatatgactattcaataaaacgccagcaagcctcaattattggtaattaattaactaattgaactctacatgtgataattatcttttttttttttttttggattaaagatataaagatccttgtatcctaagatgactcaatctttagaaactaagagaga

SEQ ID NO: 11858 - DNA, 3000 bp, Unknown
  misc_feature (1)..( 3000): cDNA_ID_2707736_gDNA_ID_2214520_Annot_ID_134040 3000 nt of promoter + ATG
cttccaaccatttttatgctggcggagattcttattccggtatgattgttccggccctcgttcaagaaatctcgaaaggtatcatcacatacttttatttgaatatcgtttaaccgtgctctttaaaataacacactatgatgcaggaaattatatatgttgcaaccctcctataaatctaaaggtaattgcaatttaaatgctctttgtaatttcgtaagtatattgatttttaaaaagtttcgatcaactaaaaatcactaggatatttttttgtacactagaaactgatagttatgtgtcgacaaaataaaagagattgataattgtgtatatatataatatgtttttgttaagttgataattaatattattcttaccaaaaacagggttatgtactcgggaacccgataacgcacgaagacgacccaaactatcgcattccattttctcatggaatggcactaatttcagatgaactatacgaggtatgaaatatgtggcatgcttaaattcgactagtcttgttatccttggcatttttcacaactctttttaatgttaaaaacattttcttattaaaaaaaagtcaattagggaagcctgcaaaggaaattatttcaatgtggatccacgaaacacaaaatgtttgaaacttgtcgaggaatttcataaggtacacattgcacactttgaaatttggtcgatgttcagtaatttatcagatagtgaacatctaactcagatttgtttttaataaacttacagtgtaccgacaaactaaatgaattccatatactatcaccagattgcgacacggcatctcctgattgctatgtaagtaatatgtcttttctccacctagtgactcttgtaaaagggttggaaaatgaattgatgaagaaacattttttctttttcaactacacattaagtaaaataccgctccatgattaagtcaacaaaaaaaattgcattttatataacttccaagaaacatacttttaaggttgcttttgcagttatatccattttatctcattagcttttgggccaatgacgagagcgtccgcgatgctcttcatgttaataaggtatatgccattaataatgtgtgatgataaaaaagaaaagaagccttaaaatctaaactatggccgattgatgattacagaggagtattggaaaatgggagcgatgtaactatctgagtaaaccatacaacaaagacatcaagagcagcgtaccataccatatgaataacagtgttagtggctaccgatctctcatctacaggtaagagttagatacctatatctaaattattaagaacctgatcaaaaatttcctaattagagactcaagcaaaaccaaattaaatcaaaccaaaatttgttattattttacttttaaacccgaaaaaaggaaacaaaaatgaatagacaagaatttattaaaaatatataggcatatccatattacgtagaaatttaatttacgtaaattattatgtatttatgttttgcaattattattattttatttttttgtgtaaacgcaattatttaacttaaaacaacctaaacaaaccgaattacatcatggtgaaacgaaacaaaccaaattacagatggattttattttgttttactttctcttaattcaatataaaaaatcgatacattaatccacagtgtccattcatacatacaaaatttaagagattccaatattttgcgcggttgatggtgaacagtggtgatcatgatttggtggttcctttccttgcaacacaagcctggataaaatctctaaattactctatcattgatgaatggagaccttggatgattagagatcaaatcactgggtatatatatttttttgtgtttttgggttttcttgttctttcattttctcatcgtatcacaagcttataaagctccggtaaaaatcattcatcctttttttttaattgacagatacacgagaacttattccaataagatgacatttgctactgtcaaagcaagtcttcttgtctcaatttaacatttctatttgtcgtttaattaaaaagtattttctaatttgttttaagcgttttgattgtagggaagtgggcacacagcggagaataaaccacaagagagttttatcatgtttcgaaggtggattaatggccaacctttgtaaaaattacaattatgaattatctactatgtgagctatttgttcctgaggaggtttagaactctaccactagttcgacatgctatagttaccaataaatgaggtcttatttgggtctagggagactacaggccaaagacttggaacttcttggtttattgttatatgttgttaggtaacatttttgtgttattcatagattttaccttttggtacttttatcttctcacagattatattgttctgtgttgtgctgttattttttacaattaaacttagatttttaataaattcttttttgtctcaaatttaataagttatatacctatctccattttactcaacaatattttttagatgaataaaatatttctgattgtgtttttttatctttgcgcgcatttagtactttttctgtattgaaatgtaaaattatattaacaaaaaaaactgactttgcatttagtatcacttttagaggattgaatttgatatccaaatcatatcaatatttaggtaaagatgtggcgaggataagaacaaaataataagagccataaaaccaacgcccctaccttatccattattcatgctgttggggattttgatcttatgtcaaaagtgtataatggtatacagtgagggagagcgacgcatgcaacattataaaatatctattttcataaccaacccgatatggctgctccacaaaagaaaccaggcctacgtaacgtggagctactttgtaattataaagatttattgtttcccataaactggttaaatgattttagaaactaaagtaaa

SEQ ID NO: 11859 - DNA, 3000 bp, Unknown
  misc_feature (1)..( 3000): cDNA_ID_2685968_gDNA_ID_2214520_Annot_ID_134041 3000 nt of promoter + ATG
gtgagatccaaccctatccgaccgtatatacgccatgttcagaaggttgtaaagacttgtttaccaattctataaattatcgtatgatatttttatatgttttcacacggttttgacaattattttttggaagatcacctattctgaaattgctgcagtccaaacacgtttaaatgtataatttgtttcaaaatagttgaccaaaaaataaatgtgatttggcgatataagtgacaaaatcaattcttttaaaacgggtaaatgtaattttggttttcttatcgttttattcaaacaaaattcattgtataactcgtgaaaaaggtatatgtaagtttatgttgtatgacgagaaaaatcacacgacgtcaatatgtgaatgcaagatctgcactttaaattttgttataagatctagggatatggtctagattctcatcgtatgagcctaatgattttaggattgaagtaatcgacgatttggatttgtattaacgaactgaaaaatgagagtacaaaagagatctctttagacatgacaaattttttttgttgagtatttttctgactaaacattacacccaaaaaacataagtattctttctggctgtaaccatacgtttttcttcatgtctccccttctccttttaaacgtactagttcgcagttcaaacaccacctcgatcttcgattacattttaattgagaaggacaaatattttattttattttttgggttttaaattttaaagataggactggctagatggttaaggttgtgacaaaattttcttaatgttgaggagaacattttcgttacaaattaagataatcagataaatatgtggtgatttgcaacttccgtaccttatcattattcatggtgttggtggactattcccgaagttttagcgacaaacgcaactcccgtaccttatcatcactaatataatatgattttgaatttatggataagtctagtgacatatatagtgcaaatggttgtctcaaataaagaagctgaaagaattgaaacaatattcaactagtcttttatcatttgagatgaaaaagttgaaaaacattattcaacttaaaaattgaaaaaatagcaagttataaagaaaagttgttcaacttgttcactacaatttgaatgatattgaatgatattcaatcctaaatgatttttattccattcaattttaggcaaccattcgtacccatacagaaagcaacatatatgatactgattgacaaaaccacttcgaaatggttgctccacacaaacaagaatatgagaagggcctacacaacgatattaattactgttaatttttgtttttgtctgcctgcatttagaatatggacaatatctcttcccggaatttgccatacaatcacaacaattaaagcagcgtaccataccatctaaataacagcattaatggctaccaatctcttattttttaggttagagtttagatctactttttaaaacctgattagcttgttccctctacaactataattaggggtggacgaaattttcgtcagggaaataaaaccaaattgaatcaaacagaaataaaacctatatacgttttaaaaattggtttaattatttgatcgcttgtctgtttgttctctgaagtttagtttatacaaccaacattgatatgtgtattttaagggatgatcattttcagttctgtttggttaatccggttttagtaaagctgttattaccaaactcttacaaaagtaattccgtttttttttttgttttttttttattctcggtttaaaattcgtgagcaagttatacataggttgatgacacaaaacatgatatggtgctgatggaactaaagtttccatgctagttagatcagcaaaacgcatcaaccataaactataaatggccaagattatgtcacaaacatccaggtacataattcagaataaactttttattacaaattttacgtcctaacaagtaacaagtaacagagagctcaaaaaaaaaatatgcatacagttatcgacatggctattttgtatcacttttaaggatttcacgtaaacaacgtccaggtacatgattcagaattctacactaccctttgtttgaggaagcgacacatgcttaatgcttttggccttttgccaagtgtatcaagaatggtataaactacaagttgacaatatattttaggcgaatgatttcaatggtggtagtactgggacgatacacttgtaacatttcaaacaatgcagtgacaacacaacagaacacaacacaacacaacatattttcctttgatcttgagaccatgcatcaattgcagctatcatcttttccacatactcagatctagacaaccaagataagtaatctctatttaaataaacaagcataatgtagaaaaagttatccagaaacaacaactctagtcacatataaaatttggcatggcctctgtagaagatagcaagaatgcttcatttcactattgcatcaaggacacaaaagttagtttaaaaaaaaaaaaggagaagataatgtcaaacatatacgtgtgcagatagacaccatgcttcatgtcattattgcatttttcttccctcacagcccatcaccaaagaccaagaacacacacaaaaaacttgttttaatgcgattttaatgtatttctctttacacaatcttactattttttttttatataaaacagaacaaattagtaagtttattatttgtgagggtgtttgattttaattacataccatattaataatttttgcttgggcctggaccacccaagtgtaaaggattatgaacaaaatcaagagcattaaaagcaacgtccctaccttatccgtgtttggtgatattatcaaatttttgcaaaagcaacgtacccatcttatcattattttataaagatcctatgtctatccgtaaatggactaatctttagacacacagagaatata

SEQ ID NO: 11860 - DNA, 3000 bp, Unknown
  misc_feature (1)..( 3000): cDNA_ID_2707728_gDNA_ID_2214520_Annot_ID_134044 3000 nt of promoter + ATG
tatgtttttgctgttaactgttcgaatttgtgatcataccctttagattattagaatcatatcttctctagtgatatgtgtgtgaatgaatcaatgataaaagactctcctttttcttaatcaaactgtgctttgtacgtaatttttatctattatattctcatgacattttgatccacttgtgatcagcacaagatcagtataaagttgaagttgatcaatttgtggagcatggatcctgaatataccgacgatttattaaagtgcgtctttgttttcagttttacgcttatttttcgtgtgtgcattgcgtataatgatttaccgttgttagcacatcaacagccatttggagaagcaaactgaattgcttttagaaactcgtaaaacgatgactcaagaactccaaacacttgaggtttgtttgatgaaactttgtgtacttttgatatgaataatatgagcaagaaatcaatcttacatacatttgtgtttataggtggaagaagagatgatgatgcggaaattctatgagttaatgtctagacagcgcttaaataagaaggtttgtataaagatagttttttttttttgaagatgataatgttggtattgattgagattgatgttggttcttttgaagaaaatggagaagactcaaaatgtgtcacatggtaaagaaatagttgaagtggaagatacttctagtacatccagagagttaatcgtatatgtaaggaaaaggaaaaagaatcaaaagccaacataatgaagatatccatttcttgtttaagtgatggatatagttttcacattgtttatggtgtgcaataataagttgtattttttgagtgatgaaaatttatacgggtatgtagtcatgaaccttgtaagatgttcttggggtcataagagttttatctgatcctgcgagacgataatttaataacattacaagcaaaatatatccattgaagtaatcgtactttaaagatgctatggagagattatggaagcccaaaactctcttacactaatggttgatagtcgttttgtatattttacgctatttacttagtaagttattgagttttcgatctcttctcgagtttcatcgcagtgtaaagggacctagagtaatactcaattggttgtagtcagaagcctgtgaaatttagcatgttataagaaccaagtttaattcagatagtgacaaaagtactgtggagattttgggtgttaaagtagcgacctttatcaccataaacccctctctttctctccattacactcgtgtgaaagaaacttagaaagaaagacttgaagcagagtagaaacagagaaattgcagagaaagtaaagtgcaagagagagtttttacgtgttcaggtctcagtgtgaaaccctactcacgccgggaaacttgttgtcccggaatccactagaatcagtccttatatacagttggctcttactggagcttgtacatacacaactcattaactacattcaaccaaacacgccattccatctcatctactctctgcatctttgattctttgtcccctgtttttcctgttttgttcgaacacttctacaaaggacagaacgacacaaacctttaaaaggaaacaatgctgcaggcgtgcttcctcttcaacgacttgtacgagatgggcttcttgcgtatgggcctgaagttttctaactttgaatcaaaccttctgattccttgagagtcttctcttgccttctcttcttattcatgaaactcgaagacaaactctcacaagtacattattgttggggtcactagccatctaggatccatcggatccgccgctaatctctttgcaagtatatagtgaccccaagtcaacttccgccgcagatagaagccttttacaccaaccgtcgagccgcaagatgacaattcctcacttcataactatcatttataagttttgactttgaaagaaactgactttaaaatgaaaatttcattagtttaagtgaaacagcatttgaagggcaaaaaatagtcccctaaatgtttgatgtaatttaattgcttgtccatatgaaaactgtgaaatagaaaaaaaatcaagttaaatttcaaaaaaattataaattcttactgagacttaaaatcatcagtgttgaatgattaattataaattttgtaagtatagactcatattatctgcataagaaataaagttatcacaaaaagaggtttataaatcaatcgtaaagttttattgcatcatctggttcgggtttctttgtattagatcatgtttaaattttctcttgtacagactaaattccagccaagacatctcctaaaatctcactcacaagatcttgatcgttcacatttacaggctcatacttctcatttcttagacaatggatttggtagagggacatgaatggcttgctcttcttgtctcttcggttcctcctttgtaaggggttctccaagcagatattggtccaacgttcacctaaacggtgacgcgtatgcaggatattcaaaactcaaacccacaatccaatgacctaatcttgcttgagaggtaaatttcaacagtttgagtatctttaaacccatacaagaaatagtaaaagtgatacttgtagaggtaaaaatggttaagaaagaattgttagatacgagaaatgtccattcgtatcctgaaaagctctttcaacatttttattcaagtattcgtcatgtttgctacgtgtaaactaaatcactttttttttttttttgtgtgtgtgtgagagagatttaataacttttattaagagacaaactaaacaacatccttcttagtcactactctctctctctctctatatatatatatatatatatatatctagtctctacagatattttggacgagaagattcatcaaaaagaaaaaaaaaataataaaggaccattttagggaagtgagaacaaaaacaaaagtggtagctatg

SEQ ID NO: 11861 - DNA, 3000 bp, Unknown
  misc_feature (1)..( 3000): cDNA_ID_1807848_gDNA_ID_2214520_Annot_ID_134046 3000 nt of promoter + ATG
ctagtgaccccaacaataatgtacttgtgagagtttgtcttcgagtttcatgaataagaagagaaggcaagagaagactctcaaggaatcagaaggtttgattcaaagttagaaaacttcaggcccatacgcaagaagcccatctcgtacaagtcgttgaagaggaagcacgcctgcagcattgtttccttttaaaggtttgtgtcgttctgtcctttgtagaagtgttcgaacaaaacaggaaaaacaggggacaaagaatcaaagatgcagagagtagatgagatggaatggcgtgtttggttgaatgtagttaatgagttgtgtatgtacaagctccagtaagagccaactgtatataaggactgattctagtggattccgggacaacaagtttcccggcgtgagtagggtttcacactgagacctgaacacgtaaaaactctctcttgcactttactttctctgcaatttctctgtttctactctgcttcaagtctttctttctaagtttctttcacacgagtgtaatggagagaaagagaggggtttatggtgataaaggtcgctactttaacacccaaaatctccacagtacttttgtcactatctgaattaaacttggttcttataacatgctaaatttcacaggcttctgactacaaccaattgagtattactctaggtccctttacactgcgatgaaactcgagaagagatcgaaaactcaataacttactaagtaaatagcgtaaaatatacaaaacgactatcaaccattagtgtaagagagttttgggcttccataatctctccatagcatctttaaagtacgattacttcaatggatatattttgcttgtaatgttattaaattatcgtctcgcaggatcagataaaactcttatgaccccaagaacatcttacaaggttcatgactacatacccgtataaattttcatcactcaaaaaatacaacttattattgcacaccataaacaatgtgaaaactatatccatcacttaaacaagaaatggatatcttcattatgttggcttttgattctttttccttttccttacatatacgattaactctctggatgtactagaagtatcttccacttcaactatttctttaccatgtgacacattttgagtcttctccattttcttcaaaagaaccaacatcaatctcaatcaataccaacattatcatcttcaaaaaaaaaaaactatctttatacaaaccttcttatttaagcgctgtctagacattaactcatagaatttccgcatcatcatctcttcttccacctataaacacaaatgtatgtaagattgatttcttgctcatattattcatatcaaaagtacacaaagtttcatcaaacaaacctcaagtgtttggagttcttgagtcatcgttttacgagtttctaaaagcaattcagtttgcttctccaaatggctgttgatgtgctaacaacggtaaatcattatacgcaatgcacacacgaaaaataagcgtaaaactgaaaacaaagacgcactttaataaatcgtcggtatattcaggatccatgctccacaaattgatcaacttcaactttatactgatcttgtgctgatcacaagtggatcaaaatgtcatgagaatataatagataaaaattacgtacaaagcacagtttgattaagaaaaaggagagtcttttatcattgattcattcacacacatatcactagagaagatatgattctaataatctaaagggtatgatcacaaattcgaacagttaacagcaaaaacataattaaagaaccaaacaaaaaaaaaaaagcagatttagagaaagaatatcttagttagacaattcgtcgagcaactggtgtgcatagtctcgtgcctatcaaatttttcacaatgccacgatacttaaatcagaaacaatcaattacgtctaatatatagataaatcatcaaaaaggaagttcttttacgtaccctttcgtcaaatttaacgattcttataactttcaccaccataaacacttgacgattctcttcttctctctctcaatctcacccaaaatcaagtcctctcttctacaatggagttgactgggctaatgggccggtgtgactaggctaatgggccggtctattgtgacccaaagagaacaacaaagataaataaagtttcgatttttatgtttatcagctctatgtgcttctcattagatgagagactttcgctaatattttatgtgtttgttttgttttttgaatgcagaagtccataaactttatatactagcgtaagaatatcctaacttaacattctaataaacataacacttatataggttgaactacacttggtatttgatatttgtagttgtaattttcttttagggttctttgaaccactccacgattttgatccttgattaaattttaaagtatgttgaaaagtagaaaatatgtgtatcgagaaacgatctctgacttctctgatgttatgctttcactaaccatctttatagaaaacatacaaaaagatttgattcgttttgtcctttgaataaatgttaccaagaaattctgattaccgcaggaaagatgcaacttttggattcgggtttatattttaacataacaaatttacaacacaatgggcaaccaaaaagaggagttcatgtgccaagcacttagaaaaaaagaaaaaaaaaaaaaaaacaagcgtggtgtttgggttttcgagccttgagaggttggtgggtgtgttgttgtgaatctctaagttttctctgtaaattatatatttgtttacatgtatataaaacaatgtttctttttaaagtgacccttttaagctttcttgaaaacaagattgtgcatagatctcttctaagatccttagctttgttttctcttttgtgtctaaagatcttgaaagtcttgtgtgcaataacttattaaagagatagaaaaaa

SEQ ID NO: 11862 - DNA, 3000 bp, Unknown
  misc_feature (1)..( 3000): cDNA_ID_2707720_gDNA_ID_2214520_Annot_ID_134047 3000 nt of promoter + ATG
gaaagttaactcgaatcactaaaacggatttgtatttattttttttaagacatcttgattgataacacaatttgctggaatagaactttgatgtaaaaacccgaaaatatgaaccgtttaatacttgactaaagtcactttcctcaaactttttaatttctgtttctgttttttctttttactttgaaatcgtgaaaggatcaagaatacgtataagtctacaaatatagttcttttgcgaaacctaattcgaagactcaatctcaacactagcaactctaaagaagttataagtttcttgaacaaaaactaagaaaggaacactaaatttctagcatacacgaatgtgacggtggagaacattataaggtaagatgggaagatatatctgaaactacgcaccgttatatttgccttagattagtgcctttcttcgtctctctttttagtttattctgaatcctatgacgtaagcgcttttgtcatgtacatcattgactatagatgacacatcatattcaaattgagatggttgtattttacaaaggaaaaatctacattttgatctgaattattagtttagtgtcaatttttataaataacttaatactactcacctcatcaaagaataattccaaatggaaataactaagaaaatatttggtacaactatataataacaaaagttcacgacaatcctgtgtttatgaaaaccccatttttccatttgaatgcctctcaagtcttgcttggttcgacattttgcgtttttgagtaatataaatatatctttatgttagatagagatggtcgatattcagatattgttttaaatttctatacgaaatgggaataacgatcatatattcacagtaactaatatgtgatggatattaggatatacgtaaattggtagtatcttattattttgaaagggtgggaatctacgattagacaatcctgtgggagaaaaaaaatgcttgatcccatgaatagacagattaaatataatcgaatccaaattatttatgtctataagcatctagatgatatacacatcaattgactaattaaggcgacatacttattttgaaatttgacggaataattaggttctttagtaacacacttgctaattttattgaacttttagaagagtttgattaaaaagtcttaagattgttatggaaacaaatgggggccatgccaattgccaaacgcactttcatacgatatattcatttattcgattttgttttgctaataattctcgattacaattccatcattctgatccgatttcattaggtgaatattaccaagcgatttttaaaaaatgattaattgtgtgattggagtagcctaactttataaaaggggaatttttcaactagttaatgagtcgaacatatcaattgttttatattgccaactataatgttgtcgtgatacatatcctttattcaagtcatgaagtttttcttgtccctttcttttttatgtaacctttcctgtccgtttcaaaacatgaaaattcaaggagacgcaaattcgagtatattatatatacatggtcatgtttttcttactaacgtaagaaaaagtaaaagatattaatacacaaataaatcaatgatactattttgtttctactacttttaaccacttttaagattgatgataagagtaagactagtgtctagtgatatacgattacattttactgcaacgatttacatatatgtagtgtttaataagcagccaatgactcgttttacaaattattgttgttagttaaatgtttaattattttttgtcaacacaaaaatgttaactttcgtataatgataagtagtataaatacaaaacgattctgtttcatatttcttcttttgggggttgagtttttgcatctcctttcgtattcatatatgtattttattaacataacggctcatttatgatgccgtgtcaataactaggcctatcaataacaatgacttagagcaaatgattagaggtaaggtaagagtaacaattatacatacgttcatgcaaaaacggataattatgaacaaataaaattaacaaagagaaaatgaaaagagagtgagagaaaccataagccgccatttccacttctcactcacactttccacgtctcttttctgagcaagttccatatcaatgctcgtcttaatcacccattaatattctcacttcatagcatcgacaaataattatttttctatttcatttaaaattattctaattccatattgagttgttctctgatatctttgtataaaattcctaactaaacaattgtttaaagaacaaaaataatcattttattaaacggggaaaataagtaagaataattaactcagccctccactattagattattgtattgatactactaatctgatcattccaaattcttttttcctctgtgcatgatctcatgaaatcaattccctctagattcgttcatttgtttactgaaaaattcactatataaaataaaacagtatattccaaaaaatgaacattgcgaaaaatgagcataattaatagggaattaatattgggtcctattaactctctccaatgatagaactatttaatttgttattcataactaaaatggcagccgaaaataataccaagagtcattttcaaaaccttttaaaaatcttattatttgtatttttaaaaaatcttagctcgtatagcttaaacattagattcacatcatagcttctgtgttctttgcttatacctcacgttatatttatattaaaaaaaaaatcctatgtcctcggaaaatctgctgacttcttattgcaacagtctcacttcttttcctctatataaaaccctaagctactacttcacactttattctcatttctccatatctctctctctctctctttcgctctctcaatctcctctgtttttagttattagaggaattagaaaacagagaatatg

SEQ ID NO: 11863 - DNA, 3000 bp, Unknown; identical to SEQ ID NO: 11857
  misc_feature (1)..( 3000): cDNA_ID_3245305_gDNA_ID_2214520_Annot_ID_184578 3000 nt of promoter + ATG

SEQ ID NO: 11864 - DNA, 3000 bp, Unknown
  misc_feature (1)..( 3000): cDNA_ID_2707718_gDNA_ID_2214520_Annot_ID_134048 3000 nt of promoter + ATG
aagctttgtgttaatgaacttgttatttcttgttgatcctgaagctttgtgttatattaacttgttatttgttgatgtgtgtgtttatatagtgcaaggtttgtatgcaaacattcatctgcacgacatcggaagtgaaatgcagggagcacgcggaggcgaagcatccgaaagccgatgttgtcgcttgtttccctcacctcaagaagtgatgaaagctattatctcaactataaaggattccaatgtataacgtatggatcctcatctttcctatgtttgtatcaaagtctcgacaaattttatggtttctatttctctctacttgtttcaacaataagtctcttgctatgattatataatgaagctttgtgtggaacctttttttttaatataagttggcttcttttcgctgttgattatgtttctatgaaagtaaagattaccacaattttgatacaacaaaatcattacaaagtttttggttgaaaaatagtagtaagcatcatcaatcaagcttcggttttactgagttcgtagtctgctgctctctgcggctttaacttgagcgaagtatggatgatcctatagatcaatagagaaaccagagattataagtttgacttgatcatcgggtaaaacaaaatcaaaagatgtgtgcacatgaagatcatcgggtaaaacaaaatcaaaagatgtgtgcacatgaagaggatttttaccatggcttctcttgcggttaatctgtcttgatgatcatactgaagaagcttatcgagaaaatcaattgcctaaagatgtatacaatgagtcaatacacccagaacgaagcaaaactatgtttttcgaaaaagagtagtacctcaggtgagaccaaatgttggttgtccgcgttgataaacttggaccatggtttggggacatgtctacaaataagagtgacttcaggttttaactcattggtataaaattaactgagccagagttgagaacagcaacaattttgacttttaaagacagagagattcagggatggaataaaaccttccaacaagtgcttccagttgagggtcaagatctagctgatatttgtttaggtaatgatctaactcattggttcccaacacctatgcacacgtttcaatcagaaatcatatacatggatttaagtttacaatgtaattttatgccaataagtcatagactagcaatataccttggcaattttgacaagttgatcatgattatcatggccataaaagaacggttccttacggaatatctgcagcatcaatatttgacaagtgaataagcaacagcaaagtattaacgactaccattcggaaattcaaatgcttgcaatagcttcagcattgaagctagagagaagagtgaggggattattagttctcaccatgccagcaaacatgcaaccaagactccacatgtctaaagaatagtcataatcctgtagatcaactaaaagctcgggacccttgaagtatctggcaattaattcacaggtttttagtctaatgcatttaacaactacaagaagctttgattgcacagctaaaagtttcaatcattggcatctacgaatgaccctcttaggcttgccaagacaggtggaattaagctgtggtatcggatattacctcgaggccacgcgaacattatactcttttccgggatggtaaaactcagcaaggccccaatctatcagacgaagtttacgcagctgatgatctatcatgacattatgaggcttaacatccctatgcattattccttgagagtgacagaaatccaatgcctgaaatgcaataacatcagctctggattccacgataaacatttgtatgtacggtaaaagtcatttatggtaaataccgatacattaccttcagaagctcataaatatagtaccggatatcgtaatcagtcaatgttggatacaatactttaaagtccacactgttgacaaactcaaataccaagctaggtgttttggagtgctcatctctaacaatatcatacagcttaacaatatttggtccaccacataggttctgaagtattttgatctctctctttatctgcataacatcaagtttcagcaaaattagccatctttatgtatgcaaattcatcagaaatgagttctactaactgatcaccttcttcttttttacgggtttgaggatcttgataacgcaacgctcattcgtattgacgtttttgccttcgaaaacttcactgtattttcctctaccaacttttctcacaacctcataatcatcttgatgactgaagaatcacacaaaagtatttaagaatctcacactgttgaatttcaaaatccaatatttgctaatagatacttaaaacaaagtgtcttcaagagacctaagtccaaaccctaaaaaattccaatttctctgatttcgaattcgatttggcaacaaatcaatcaaattccaccgaaaatttatcaaaaagaagtcaaaaatcgtaaattcatcaaagaaaaattctaaagctagaagttttacccccattgaacaacgagagactcgtagtcccaatactctttaggacgaacaacgttaacatctgtataaaccctagctttcgacatcaatttcgatctgaaaaaatggagaaatttgcgatcgcaatcttctctttgatcgtcaggtttgtttcaagtggacgatgatgatgacaacagaagaagtgcgttgtgcaggattagaaaaaggttgaagaagaatctctgatacccaaaaaccacctaaaccaaatcgaaccgattcaaccacactcgaaccgaaacaaacccaatcggatcgatttcaatcacactataaccggaccgaattgtttaaacgacatcgtttcgaagagaagccaaagaaaaagaaaggagagaaataaagcaaattcgttaccttcacttttcattttctgaataagagttaaaaaaagacattaatg

SEQ ID NO: 11865 - DNA, 3000 bp, Unknown; identical to SEQ ID NO: 11864
  misc_feature (1)..( 3000): cDNA_ID_3023222_gDNA_ID_2214520_Annot_ID_184587 3000 nt of promoter + ATG

SEQ ID NO: 11866 - DNA, 3000 bp, Unknown; identical to SEQ ID NO: 11862
  misc_feature (1)..( 3000): cDNA_ID_2707720_gDNA_ID_2214520_Annot_ID_184585 3000 nt of promoter + ATG

SEQ ID NO: 11867 - DNA, 3000 bp, Unknown; identical to SEQ ID NO: 11861
  misc_feature (1)..( 3000): cDNA_ID_1807848_gDNA_ID_2214520_Annot_ID_184584 3000 nt of promoter + ATG

SEQ ID NO: 11868 - DNA, 3000 bp, Unknown
  misc_feature (1)..( 3000): cDNA_ID_3023226_gDNA_ID_2214520_Annot_ID_184583 3000 nt of promoter + ATG
aaattattaacaaatcaagaaacgttatgaaaaacagaggatttgaatcttgttttacctttagaaacatgtcaattgcgcgatataacacgtcgtgagagtgtcttgggaagctagagagtgtctcagcgagagagaggaagttctgaagagggagattaggatctcttgatttctcagctaagtatccatcaatgagctttgccacggatactttcgagtgagttttcggatcacggttcataaactccttcactaggctctgcaccatatccaaatcatacattaagatatcattcactgttgtctcttcaagctgctcgctgactcttttctttaacttttctttcacggtttcttcacatccaagaaagatcgatgctcgatgtagcttggtcaagaagctagaggaaatgtttcctttctcatccgggagaagctctatgattgtattaatcaaagatctatcaatgagttgcatggactctttgctaaaaccagctattcttcttattgcataagcatgtaatgcttctccaataacgttactcgggactttacctcggttcttgattgctttgatggcttgtttatacaaatcgatgtgaagctcgcataaatcttccacccaccagtcttttggaacaccatcttctggttttctcactttctcaagcttcttcttcctgttgtaagtataagaccatttgactttcgaggtgtctatcgaagcagtagaagcaatagagccgagacaacgcttcacgagctcctctgagtcatcagacaagagatcttttgtggtctgaagaacaatgatagaatctttccaactacggaagatggttgagttcaagaaaacatcaatcttgtaaacgagattgcttttctcaaacgtttcattcatctccaagaactcagccgcgcaacgaaccgcaaccacattgtaagcgtttaaagtaaccgtgatgccgtaacagaacttgacacaaatctcaaaagcaacagaaccaccaggaatctctgatatgtcaatctcatcaatttggttcttcttctcctcttcattttttgatgttgctatgtgtttctgcaagaatccgcttttcgacagcaatgggaactgaaaaacacacaaaaacataaaaactttgcttcttctttgatgttttaaaagctagagtttgtttcataccttatgcagatagaacttgacattgccgatgatgatgatgatctctgtttctaactcatttgttacatacctaagagccaataaaaataatatcagttttagaaaaaacattgcttaagcataatcagagaaatacatagaggtaaatatttgttttctacaaacctaacattgtctcctttagacagaaatgaatcaggtttggttccaagtttcataaacttcatttttttctatctctttaataagttattgcacacaagactttcaagatctttagacacaaaagagaaaacaaagctaaggatcttagaagagatctatgcacaatcttgttttcaagaaagcttaaaagggtcactttaaaaagaaacattgttttatatacatgtaaacaaatatataatttacagagaaaacttagagattcacaacaacacacccaccaacctctcaaggctcgaaaacccaaacaccacgcttgttttttttttttttttctttttttctaagtgcttggcacatgaactcctctttttggttgcccattgtgttgtaaatttgttatgttaaaatataaacccgaatccaaaagttgcatctttcctgcggtaatcagaatttcttggtaacatttattcaaaggacaaaacgaatcaaatctttttgtatgttttctataaagatggttagtgaaagcataacatcagagaagtcagagatcgtttctcgatacacatattttctacttttcaacatactttaaaatttaatcaaggatcaaaatcgtggagtggttcaaagaaccctaaaagaaaattacaactacaaatatcaaataccaagtgtagttcaacctatataagtgttatgtttattagaatgttaagttaggatattcttacgctagtatataaagtttatggacttctgcattcaaaaaacaaaacaaacacataaaatattagcgaaagtctctcatctaatgagaagcacatagagctgataaacataaaaatcgaaactttatttatctttgttgttctctttgggtcacaatagaccggcccattagcctagtcacaccggcccattagcccagtcaactccattgtagaagagaggacttgattttgggtgagattgagagagagaagaagagaatcgtcaagtgtttatggtggtgaaagttataagaatcgttaaatttgacgaaagggtacgtaaaagaacttcctttttgatgatttatctatatattagacgtaattgattgtttctgatttaagtatcgtggcattgtgaaaaatttgataggcacgagactatgcacaccagttgctcgacgaattgtctaactaagatattctttctctaaatctgcttttttttttttgtttggttctttaattatgtttttgctgttaactgttcgaatttgtgatcataccctttagattattagaatcatatcttctctagtgatatgtgtgtgaatgaatcaatgataaaagactctcctttttcttaatcaaactgtgctttgtacgtaatttttatctattatattctcatgacattttgatccacttgtgatcagcacaagatcagtataaagttgaagttgatcaatttgtggagcatggatcctgaatataccgacgatttattaaagtgcgtctttgttttcagttttacgcttatttttcgtgtgtgcattgcgtataatgatttaccgttgttagcacatcaacagccatttggagaagcaaactgaattgcttttagaaactcgtaaaacgatg

SEQ ID NO: 11869 - DNA, 3000 bp, Unknown; identical to SEQ ID NO: 11860
  misc_feature (1)..( 3000): cDNA_ID_2707728_gDNA_ID_2214520_Annot_ID_184582 3000 nt of promoter + ATG

SEQ ID NO: 11870 - DNA, 3000 bp, Unknown; identical to SEQ ID NO: 11858
  misc_feature (1)..( 3000): cDNA_ID_2707736_gDNA_ID_2214520_Annot_ID_184579 3000 nt of promoter + ATG

SEQ ID NO: 11871 - DNA, 1898 bp, Unknown
  misc_feature (1)..( 1898): cDNA_ID_2707714_gDNA_ID_2214520_Annot_ID_134051 3000 nt of promoter + ATG
aaaatcagaggagcggcatttataattaattgtggaagatatatggttgaactagcagcaaccaattctacataattaggaggagtgtaacatgccttggaggttcagatatagaagctagagaaaaaaacttaattattgttgacatagtattctgcttttccatgtaaatatttgagaaaaaatcttaaattattgttgacatagtattctgcttttccgtggtttataaatgactctaaatctctaacggaaaaccttagtgtttgacgaaaaaataaattaaaaatagaagtagtgtggactctttggaagtgtaaaaagggttgttacatagtactccaagatgtaaaagaagttatagaatgaatctcttggaagagctccttaatctacaactacgaatagagttgaagatggtgattaggttcgtatctctttaactataaaaaaaaaaaaactatatgaatggatatgaaatgagaaaattgaagtacgaaacaggtcctaaaactgttcctatttatttggtatgatatcatttcaaacttgagaattatttagcattaaactctacacgaaaaaaaaaaaacttgcattacaagtgtttttttttttgttttttgaaacacgttaaagaaccgaaacttgatcagttattagacaagcgaagctaccctttgtgtttgttgacgatcctataataaagtttttcacggaacgccctgacggttaatcgcatcggtagaagaaagatccgtcgatgcagcgcctccaccgcgtccaagaccgcctgaaggagtgggagcatcggtggctccacctcccataccgagtttaggctcttggtggccttgtgctccgtaacctttcatcttgtaatcttccaagttatcatagtccaagtatggggtcttgatagactcgaggtcgtcgtttttaacttctttcacttcttgctcggtcgttggtggctttttctgatcctccatcttgttatgcgttttgctaaatgcttgcccgtgagaggtttacacttgctgcttatatagctcacgtatagctcgtatatttctgacacgtgcggtataccggtggcaattagtaagcttctcgatatacgtgacttttatgttaagatttacgttatctaaactagggtcctagaagcatctgcaatttaaaaaaaaaaaaacaaaaaaacattaaaagtttttaagttttatacgattgtttttgacgttttgtgcaagaaagcctatctttataattttatcatttatttctaaaaatataataattatataaagttatatgatcacagaaatattatacaaaatttcactattacaatatataatactaatattcaataaatttatattggacattccatctacctgaaaaaatttattttctttttctgattcatatatatgtgataaaataaattcgatgaatggtagatgaatgacaatgcatcatgaaaaaacacgaacaaaattatcttcattttgtatgtcaacacttctcaccaaacgtcttattcactaactcattcaagagaacgatcatgatctagtcatttattaccttatattgaatagtcattattcaaataatattagtatgatatttacagctaaatattatcaattaaatagaagaataaggagtggttgtctttgtataatcgaaaatatagccaaattattggccctcggcccttcgtaaactaaagcgcgttaaaaaaacaaaactacagctggaactggaagcatcgaatagttgaatcaaaatgagtctcaacgtgagagcctcaagtctaaaatggattgtacaaaatgataaaattggctgcttctttatccaattgtaaacaaacacaaacccatatg

SEQ ID NO: 11872 - DNA, 690 bp, Unknown
  misc_feature (1)..( 690): cDNA_ID_2711335_gDNA_ID_2214521_Annot_ID_134053 3000 nt of promoter + ATG
gccgagatagtgtatgattgtcactattaccaaacgatagtgctagcatcgtaacgtgagtccccattccccaagtttaattttgttgcggagagaacgattaacctttagatctgacacattccgtaatttttaatcttgctttagcaacaaagagaaaaaaaaacttttcatatttcttctatattatacggatacgtaacaataacaaaactatatgctagtagtaaatttatgaagattgattaaaacaaagagagtagcgttttggagtaaaaataggagagctcgaggtccaatggtgcaaaattgttagctattcaacggaccattagtctactattccccaatttctataatctctctacttcgcatctccaccctccatttttcacgtatacccctcaggatctcgacacgtcagatttctctttaggtccaaaatccaattatcttttaataaccaaaataattcggaaaccaagtgatttctaacaaaaacaactgtgcacacacgcttgtcgatattcaattttttcacaattcccaaataaaaaaactttaacaaaaaattcataattccaagtcccacgaatgtagcttttgatacaaagtcttaaatattcttttaaacattatatacaaaaacatcttttactcattgattgttcttgctgaaaacctgaaatg

SEQ ID NO: 11873 - DNA, 3000 bp, Unknown
  misc_feature (1)..( 3000): cDNA_ID_2707740_gDNA_ID_2214521_Annot_ID_134054 3000 nt of promoter + ATG
aattatcttttaataaccaaaataattcggaaaccaagtgatttctaacaaaaacaactgtgcacacacgcttgtcgatattcaattttttcacaattcccaaataaaaaaactttaacaaaaaattcataattccaagtcccacgaatgtagcttttgatacaaagtcttaaatattcttttaaacattatatacaaaaacatcttttactcattgattgttcttgctgaaaacctgaaatgcctcctctgtttcttccttcttcttcctctgctctgtttctacttcttctcctcctcttaactctccaaaccctaacctctatctctctctctcagccacaggctctccgttcaccagaaaagtgtggaaacttctctgtctccttccctttccaactctcttcctcctcctccgcagccgcttttcgactctcctgcgaaaactcctccactctgtttcttcacataaaccaccaaagctaccgaatcatcgagttcttcaccgacggtctcctcgtagacttcccttcgtctccttcttgtcgccaattcaacgacttacgctctttccctttctccgcaaaccaattcttctccatctctttcgaaaacgtaatcggtctttacgactgcgaagattcttctctctgtaaattcggttgcgaaaccaacgatctcttcggttgtgacggcagagaagaagacgaaacctccggtggagatatcggatgttgctatcctttgtctgatcatagcgcgtggcgtgtaggtgatgatttctctgtgtttagtagatatggatgcagaggattctcttcgtggcttgttccaagagggacgaacagaggaaaaagaggcgttaaattagagtgggctattccaagaaactcgccggaggctatttgtgatcgtgaggctcgaactgttaacgctacggctattgaaggaagtgttcgttgtgtgtgccgtgatggcttcgtcggcgacggcttcctccatggcaccggttgcttaaaatgtcagttttatttcttcttttcatttattttcgtgtatgaaacagagtacgtttcaagtaaccttattttactattctaaacaatgaatagaaatattttgtttcactatgaataattcataactgagtcatatggttcgttgggttactaaaaaacttagttttgattcagctcagtaattcattttgccttagtttaaaaagacaagtgtttcttgagttacaagcaacttacactacttggtttactgttgtaacagcttgcttcaaagacggaaaggaattatatggagacaaatgcaagatcaagaaacacaacgggaagaaactcactgttttagccggtaatttaagataatctcatctgaataatttgaaccaaacttcttgctaaaatcattaatcatatgcaggtgttttggctcctctgttcatactaggctcactgttagctctcttctgtctcctaaaacgtccggtaacaagtcacaaagatcaacagttcgatatatctacaacaactaccactactaatagtgtttcgtttcgcaaaggttacaacaagactcgtctcttcacgtaccgtgagttagaagaagccaccaaagggtttcaagattcacaaaaactcacacaaggcaaaaccggaacaatctactcaggcaatctaacaaacggaacacgcgtgatcgttcacaaggttctctgcgaaaaccagattgaattcatggagatttcgtctcagattgatcatctatccgcggttttgcatagaaacctcgcgagaatcataggtttttgtatggatattggatataatccactagttgtttacgagtatccggtaaatggatcgcttggagaccgattgcggctagggcttgattggtgcaagagagttaacattgtagctgaagtcgctggtttactcgcgttacttcagtatgagaactatccaccgattctacacaccaacatttcttctggtaacatcttcttagacgaagattttcaagctaaagtcacaggttttggtttgcagaggaaacagaggattgatactagtatgtacgatttcgcggttttgcttctagagattgtgactggtttaaagcagagagaagagacggtaactcaagcgttacagaagattagaagcggtaagcttgaagaaatcgtggatccttcaatgtattttcatgagcagcctgtggcttttagagaacagattggtttagtagctgatatagcgactcggtgcgttttgtttggtggtgatgggaaatttggaatggttgatgcagctagagagctgttgcagatcgctggaaacaacggtggaggcggctgcgataagaaaagagatggaattgaggaaacgttttcgaattcaagtttgcttcagatgatttctatgtctcctgattctatctatctccctaaaacctaaaacaaaaacagaggaagttaagggttttttttgtttgttttgaatgtatgtaaattaaaaacgctttgcttgagagtaaagaaacgtccttttcttgattactagattgtgttctgagaaaataaatcgtgatcgcgattggaagtcacgattataacaacgtgcaggcaaagagtaagaagaaacaccataaacaagtacaatgttttgtttttcttccatttttaaatactgaattttctttaaaagaaattgaaaggctgagaaagaatatctctcgaatcattaaattcgattttgaccaaatcgttatgctattattaaactctttttgtctggtatatatatatgatagctttgtttttgcagaacttacattttgtttttgtccctttgaaacgaaagaagatccaaaggtaattaatactaatctctgattgtttcttggtttattagatctttccaaatgctctgttttcttctgcacaatcaataaatctgttagttttaacgattgatgtgacaatag

SEQ ID NO: 11874 - DNA, 3000 bp, Unknown
  misc_feature (1)..( 3000): cDNA_ID_1807391_gDNA_ID_2214521_Annot_ID_134057 3000 nt of promoter + ATG
ctgctctcaaagcaaagtagtccacacaaaacaaagcgcccacaggattactcgtgtccaaggaaagcaagagtttgcagacctccaacgctgacctatgacagccacgcctgtccatgtttctcatgtgagtgaaaagcgtcttgaagaacagcttgttttcatcgtggttaaactccaaccggcagttaccctggaacggagtgaacataggatgccacgcacgctccaaaccgtacaagcattttccaatggaatctgcagccatatcattctcacctacaaacttaaagtaatccgccatagttatgagcgactcaatatggtaaggattgtgtataaggacacttgctacaccattcaaatcatggatagcttgtgcagcctgaaatgctctctgagcctgctcatatgaggatgaatgggtatatctacacatcaaaagaaaagtatttcatcagatgtacaaatttacaatgtctgtattttctatacacacacccaacgaaaaaacaaaaagctgtaaaaattgttacctgaagtagttgttaccatctttagtctctagaaactccattgagaaagatctatcccatcgagaccaattctcttttggagataccagaaccgtctttgtgatatgatggactccacgccttccccctcgtctagagctactaccaccttgagagccactctcactctcaaatgatcgcatagcctttgaaccatacgttctcctcaactcgttctcaagattcagatacttggaatctatttccaacacaaatcgtgaagaagcctttttggaagaatcagcatttggttttgtctcctgaaccttatcttgcttagagttagcattgagaccaagtgcttccaaagtttcatccaaagtcatttcagctttaggcacattagagccactctctttgttcttcttctttttctttttcttcgacttattctttgacaccggctgcacatgatcagcgacacttgactgatgatccgcatcttcgttcttcttctcagctatagtctcatcatcaatctcctgcaatcaaacccaattgttacagaaacactttgtaatcattactcctacgaccaacaaaatatgaatcagctctagacatcagaataaaaaaccataagaatctgaagatcaaaccattgaaactatctacattcaaacttatcaacacattagctattttagaacacggaggaggataaaattctagatactaaatctaccgaacaatctaatcgtcaaaatctgagagactgacctcaggatcttcatcaccatcgttcaagagatcgaatggattaatcgaagaacgggctcctgattcttcttcgtcctcttcttcttcttcttcgtgatgtttctgaagtttcgaatcttcatgttcctggagaaccttcttcagcaacctcccagacatatcttctcctgcttcgtcttcggaaaatcgaacaaggacgatttcagacggcggagaaaggcggcgacaccgacgactagatgattatctcgtcgatacacgctaatccctcgcttctctcaacctttttaggagaacaaggtatctttccggtttttacttaaccggtacatttaaaccggtagaactgtagattgttattccgggagagagagaaaacaaccgagatgcgggagaaagaacgacggcgttttacaatcccttttttacctcaacgacgtcgttttacttgacacaattggcgcataaatttatattaaagttcgaatttggaccgcatataaagttggttaatttatagaatccaatgctttcggctaagctaataattagagtcaccacgagcacagctaaattgtatctctttagtgatatcttcacttttacttcaaaaagtattgtaataacgaattcactatccccttattattaaaaggggaagtacaaagtaaaattttgtctaatttggcctcaattttgatttcaattttggattttgttatttgctattcaaaatcattaaagataatttggtcttaataatcttctaaactttatatgatctgattgaatctaaaccgttcaataaaattaattcccttcaatctaaaccgttcaacaaaaataagtgaaataattttatttttttatcttcactttaaagacatataattataaataacataattcatatggtctttattttgccaaaaaagtgtataacctgtcaaatagttaaaaaaaacacttataatcataaaaaatattataccaattttgtgaatcttacatttttgtaaatattttactttcactaaaattacatacacatttttaaacacattttaacacatttatcttatcactaaataacaacaaaaaaaaatcccaattattatttaattatgtttgattaaaaaatttatatttataaatttaaaatatcaaatttattcaaatatttagtataaaaaccaaataaaccgattgtccgcggtttaccgcggattaaatcctagttattattattgcgattccctttccccatgctctgaaatttgttaatcatttgtccctatttctgcttaaccacttacatttcataatttttgagtttatattgtttaatgtatatattttacactattactttcattacttaatagtcagaaatctcataccataatcattacgatacaaaatcatagtccaattattttcttcattactgactttttcggctcttttacaaaaagctaatatctttatctacagttgatcatattttaattttcaccaaaagtataattaaacagaagactctaatcatatcagtgatcaaagtgggccaacatgggcccatacacgccacaaagaacccaacccaaaagtccaaagatattctttaagctcagtttataaattgcattctctttctccttcctacaggccaacccaacatcaacgacttattcgagagaaaatg

SEQ ID NO: 11875 - DNA, 3000 bp, Unknown
  misc_feature (1)..( 3000): cDNA_ID_2707747_gDNA_ID_2214521_Annot_ID_134058 3000 nt of promoter + ATG
aataactatgattttaaaaaaacacttattagatacgacgtggacgagcccaaatagacaaaaacccattttaatgctaatttacacagaccaaagaaacaaaatcagaggaagaaacaacaaacaatgctcataataatacacaattaaggatctctagtaaccctattgaaagtttgaaacaaactaatcacagcttcttcaagtgttcttgtctttagtagcagcagcatgagatttgaaccatggaatccacaccgaagttgtcttctgatatgctctataagcttcagctctgtattgttgtttcaccatccgacgctcgacaaggatcgttacatagaccagacacagagtattgaccaatgcaccaatcaaagtccacccttgaccaaggttccaagcaaatatgaccaatccccaccaccacaattgctctcccaagtaattaggatgtcttgagtaacgccacaaacccgagtccagattggggattttgggctttccttgctccttgagcttttggtttccggttacaaactcgtgaagctgtgtgtctgcgaagtacgccatgacgattccggtcaaacagatagccgaggaaatgaagtcccagatgtttagtggctcatcaatggaatggatgacatataaaggcagacatatcccaatgaggaagatctgagcaaattttggaaaaaagaagcaacatgagaaacagaaagcatataagctaagcatcaaatatatataaaggtaacaatggttcaagcccttataaccaaaagactatcctgttctccaaatcatcctcataaaggcaagcttagattaaaaacgagctctttgaggcaattcatcgaacagttggtggtcatgtacctgctgagaaacgtagacagagaagaaggagagccaccaccagtgtttcccgtactgtttccgtaagtcgttgaacctccagtcttctctagctccccattcccaattttcccgccggaagtagttatgagtcaacctaatgctccaaatccatgtcagagttatgacaatcatggatctcagcttattgtactgtgacaatggatgcgaagcgaagtaatgaaccagcattacaggtatcactgtccaatacacatcgatcatctgcaaaattaacgaattttttcaaaaactaaaaaattgcgaattttaacaaatgggtaacagatttggagactatggatgcgtacccagtggctagattggagtaaaccgatgacccagaagagcacattgacgtttaagaagaagagaaggtttgctaatagaagaggatgattcaaacaccatgattgaatagaagagagctctgaatcggaagatgaagagtaattactgagaaaggtgaggtagaatacgatagaaggaagtggagcaagaaatgcgacaatggcgtttctaagattccgattcattttctctcgaataagtcgttgatgttgggttggcctgtaggaaggagaaagagaatgcaatttataaactgagcttaaagaatatctttggacttttgggttgggttctttgtggcgtgtatgggcccatgttggcccactttgatcactgatatgattagagtcttctgtttaattatacttttggtgaaaattaaaatatgatcaactgtagataaagatattagctttttgtaaaagagccgaaaaagtcagtaatgaagaaaataattggactatgattttgtatcgtaatgattatggtatgagatttctgactattaagtaatgaaagtaatagtgtaaaatatatacattaaacaatataaactcaaaaattatgaaatgtaagtggttaagcagaaatagggacaaatgattaacaaatttcagagcatggggaaagggaatcgcaataataataactaggatttaatccgcggtaaaccgcggacaatcggtttatttggtttttatactaaatatttgaataaatttgatattttaaatttataaatataaattttttaatcaaacataattaaataataattgggatttttttttgttgttatttagtgataagataaatgtgttaaaatgtgtttaaaaatgtgtatgtaattttagtgaaagtaaaatatttacaaaaatgtaagattcacaaaattggtataatattttttatgattataagtgttttttttaactatttgacaggttatacacttttttggcaaaataaagaccatatgaattatgttatttataattatatgtctttaaagtgaagataaaaaaataaaattatttcacttatttttgttgaacggtttagattgaagggaattaattttattgaacggtttagattcaatcagatcatataaagtttagaagattattaagaccaaattatctttaatgattttgaatagcaaataacaaaatccaaaattgaaatcaaaattgaggccaaattagacaaaattttactttgtacttccccttttaataataaggggatagtgaattcgttattacaatactttttgaagtaaaagtgaagatatcactaaagagatacaatttagctgtgctcgtggtgactctaattattagcttagccgaaagcattggattctataaattaaccaactttatatgcggtccaaattcgaactttaatataaatttatgcgccaattgtgtcaagtaaaacgacgtcgttgaggtaaaaaagggattgtaaaacgccgtcgttctttctcccgcatctcggttgttttctctctctcccggaataacaatctacagttctaccggtttaaatgtaccggttaagtaaaaaccggaaagataccttgttctcctaaaaaggttgagagaagcgagggattagcgtgtatcgacgagataatcatctagtcgtcggtgtcgccgcctttctccgccgtctgaaatcgtccttgttcgattttccgaagacgaagcaggagaagat

SEQ ID NO: 11876 - DNA, 3000 bp, Unknown
  misc_feature (1)..( 3000): cDNA_ID_2707783_gDNA_ID_2214521_Annot_ID_134059 3000 nt of promoter + ATG
cttttcgaaacgatatcgttgatgatccttctttcttgaatagacacaacagtaaaggtttggcggaaactacgtttaaggcaatctcaggtgcttcggttagtgccaatgtttccacggctaggactgggaatcaaatggcattgtgttcaagtgacgttttggagcctgctgcttcatttgagagcacttcctcgtttgcttctattcctttgcagccgctccctcgtggtggttcgggacccttaaacggattcatgtccgggcctctagagagaggttttgcatctggtcctttggatagaaacaacggtttcatgtctgggcctattgaaaaaggagtaatgtctggaccccttgatgtatctgatagatctaatttctctgcgcctctttcttttagacgtaaaaagcctcggtttcagcgttttatgaggagtgtgagcggaccaatgaaaagtacattagcaaggacattttctagacgatctggagggttaagttggatgcatcgcttcttcttgcatccagagactagggtttcctgggctgttggaaaggacggtaagctacatggtgaagaccctgaaagttgtctagagagcaaccgtaacttgcaatgggctcatgggaaagctggagaagatagggttcacgttgtgctttcggaggaacaaggatggctctttatcgggatatatgatgggtttagtggaccggatgctccagatttcgtaatgagtcatctttataaagctattgacaaggaattggaaggtcttctttgggattatgaagagccatctgaagataatcaattgcagcctgaccaggaacctcctacagaagagaacatgtgtgatccagaatctatcagtgagcagcattcaaagtcagtagtggcagaaagtgaggaggttatgattgatgatatcagtagccttggaaataccgatactcagattgctgatggtccacctggagactcagctggtcctggcaagaaaagcatgagactttacgagctacttcaattggaacagtgggaaggagaagaaatcgggcttaaacgatatggagggaatgtcgctctaaacaatatgaccaatcaggttgaaaatccatctacttcaggtggaggagctggaaatgatccttgtaccaccgaccgtagtgctcttgatgggattccgaactcgggacaaaggcatgggactaaaaaatcacagataagctctaagataagaagaatgtatcaaaaacagaagtctttgcggaaaaaactgtttccatggagttatgattggcacagggaagaagggatttgcgttgaagagaagatagtggagtcatcgggaccgattaggagacgctggtcagggactgtggaccatgatgctgttctaagagcaatggctagagcactagagagtactgaagaggcgtacatggatatggtagagaagtctcttgacataaacccagagctcgcgctaatgggttcatgtgttcttgtaatgctaatgaaagatcaagatgtttacgtgatgaacgttggggatagtcgggctatcttagcccaagaaaggctccatgatcgtcactctaatcctggttttgggaatgatgagggtatcgggcataagagtaggtctcgagaatcacttgtgcgtattgaactggatagaatatcagaggaatctccaatacacaatcaagcaactccaatcagtgtgtcaaacaaaaacagagatgtgacctcttaccggttaaagatgagagcagttcaactatcaagtgaccatagcacaagtgtggaagaggtatatctctgactaattcatctgaatagtagtgaaagtgcaagactttggctctggtttgccaaaaagcaagtttctttacctgtttcaggaaatttggcggattagatctgaacatccggaagatgaccagtcgatacttaaagatagagtcaaaggccaactaaaagtcactcgagctttcggtgctggatttctcaaaaaggtacaaacaaactttgataaccaaatcacattaagactagttcatcttctaacgattccatgcttgcagccaaatttcaatgaagctttgcttgagatgttccaagtagagtacattggaacagacccgtacatcacatgcgaaccgtgtaccgtccatcacagactgacttcaagcgatcgtttcatggttttatcctcggatggattgtatgaatacttcagcaacgaagaggttgttgctcacgtgacttggttcatcgaaaacgttcctgaaggcgatcctgctcaatacctcattgcagagcttctctctcgtgctgccaccaagaacggtacagttttaacaactaatcaatgattggtttagtacggttaagcagccggttaatgtgaaaataaaaccaacatatttggcaggaatggagtttcatgatctgttggatattcctcaaggagatagaaggaagtaccatgatgatgtctctgtcatggttgtgtcacttgaaggaaggatttggcgctcgtctggacaatattatccagagagaaaacaaaaattcaatagataaattaaccaaacacaaaaaaaaaaaaattaggttttggcttattgttttcaaacaatctttcaatttcccggaagttcaaaaaaagaaggcctaattctgtttttccttcttcccaatccaaaattgatcaaaatagctatttatgaaaatgttagttacaactagaatcagaatcctctgaatgagctagaaggtcttctcacctgaaaaagtcaacgcgtgtgggtcgttttgagccgttaatttacaatttcgtctttattcgattttttattttctgggcggagctaatcaaaatccaattctccggcttcttcttttgcttcttcttcaatggtcacgaatcttctgcgaatgtgtactgaatctctcgtttcagctaaagattcagattcattatg

SEQ ID NO: 11877 - DNA, 3000 bp, Unknown
  misc_feature (1)..( 3000): cDNA_ID_2707787_gDNA_ID_2214521_Annot_ID_134060 3000 nt of promoter + ATG
aaaacatgaccaggatattcaaattcaagtatcaccaacaacacatctgtggaagcaagcaagcaagcaactagagagagaaagagagtaccaaccagctcctttggaggcagcagcctgaatcaaagtgagaggcaccataagaagctgcgacggagatgtcaccaccaattgactttcgagtaacgagatctcatcgtctgtatctctcacattcccactcccaatcacacctaacacgataaacagccaaagccagaatatcgccgccgcaatacgcaacacactcttcatctccgccggagtcctgaacagagctgaaaatcttgactcgaaaagatcgatttctgtggactctgacaaatcttgtactgttgcatgtgtgtgattgatagcgagagaagtctttatggctttttctggttaaattctttcacgctttcatcattatggtaataaattgatttacgtcacgaaccaaatctttgaataattaattgattttcttgaaattaatatggttctaaaaatacaagatacagtactaattttcttgcaattttaatttatcttatttgagacataattattagaggatttttactgttattaacatgacaaaaagtgtctgtcttttgaatgttcctcctcaattactgccaaaaccaattaattaaatcattaattaaaaagcttaaatagtttatttcatttttgtcggcatcggctctgtttaacagtatcttatgccgcatccgcgcatcacacgtgttagtaatggtctgtaacgaggccttttataatcactgggcctatttaatcatcacaagcccacctcactattagctctttcaaggaccgtatgatccaactgtatgatacaattttggatgaaacattgaaactgattgtgaaaattctgcagacactcttacgcagtcttatattactactaaatgaatctatgatactaagtcatgtaaataaataaaaaccgtaaaacagaacggtgaattttaacgggaagttttcatttttgtggaggtgcctgcccactccaatatacaacttttgttttattctggggttttgaaataaaatatagtataatataaatagttaagttagtggatgaattgatgataatggctttggttttggatctgtggacgcaattactaataaataaaagaatacaacaaaaaacaaacaatgtgaaaccaaaagcataattttctagggcgttgaaagagtttgtcagtagtcagaaactcaaaggcaaaaaaaatgagagagtggatttggtttaagtcaacaaatttgttttgtttggtttaaagcgtgactctctctatgtgctcgtggagttggcctcttttgcatgttaggcatcattacaaatttccttatatatatatatatatatatataaatctcattcgttacatagaaagaatcttacggtattactagacatgaaaaatgttaagtttacctcgtttaataagatagtatatagagcattgagatttaaaataaacctacttggtaaacagaatatgataacattaaaaaagaagactaacatgttaacatactttaacgttcaaactatataatatcattaacactggtcaaatcttccgattatgaggagcaagattcaatgcaaccaaatataaaaaattgaagaccataacaaaaaaaaaacattgataaaatgggtgtgaataaaaaacgggacccgcatagaaaaaattgaaaccatgcaaagggtccatcgatgagaacaataatgacgtgaatcacctgtaattgtatacctccaatcatttgcaaaccccattaatataaattctgaaggtttaaaacattgtggaaattcacttcttcatctcttctttttaatgatcggttatgtatttactctctaagaatgtacgtaaaaaaaaaagtacttttaatgtatcaattcttgtaaaaaatatccaataaatcagatgtaagaggaaaataaaaataaaaactctaaaaagacgatctttcgcttttacatttttcaacgcagtttttagactttttactctgtttttttttttttttttttgattaccctccgaaaccatttgaaaagcccgagacaactcttttcttctctgctcactctcacctatgagcttaaggaaattaaaagaaaaaggtgaaatcatacataattcttgacctgcttaaatcaaaatcaaacctgttgcagcagcttcaagcttcttctttttcccctcttcttcagctctatttggattgtgactctactaattttcgattttgaatcttggtttctccgtaacatatctgaaagaggggtttctgggttttagcttcttttttttcccctgaaaagcttggatctttaacagctggtcgtctctgcatggttcaatctcaatctgggtcttcttcctttttttttttcttttttaaaaaatgggtataattgtttttttttgtttttgtataattagtttttaaaaatgggtactttttgtcagattcccatagaagaaatctaaaggggtgttttttccccttgtttactgtctctattttgcttccgatgtgttcaatacaacactgtcttctctttgccgctcctttagatctgtttccagtttctgcttgatgatccatctccttcttcaacaggtcagatcactgtttctgtttccatttcaagacctcagaatccaaagcttttgtgggcattcagctgatttttaaaaaaatccgaatttgatactatcaggtgcttgtttgcgttttaatgttcagagattgagcttcagatgatgcttggattctgcataacgcgtcgaatctttgtaggctttataagaatttcgcctcttgttaagtgttgtggtgctggaaattgcggaaactctttagaggtttatgatgagattgtgcctccaaggtgtttgtagtattgcctgagtgatg

SEQ ID NO: 11878 - DNA, 3000 bp, Unknown
  misc_feature (1)..( 3000): cDNA_ID_3023312_gDNA_ID_2214521_Annot_ID_184614 3000 nt of promoter + ATG
ttgtgctaacttcatgtagtgtttagatagtgtttcattcactggccatagacttattttacaaagttatatgtgcatgtcattatatagtgtagaacttaaaacacctaaccaagaacaacaatacacacacacaaacataaggaaaaaaaaacttttccatggggctcgtaattttcttggcactaattgtcttaatccttattattggtctcaggatattcaaagcttttatgattcttgtttggcatccatttgtgttgaccagaagactcaaaaaccaaggaatctcaggcccaaattacagaatcttttacggaaacctcagcgagataaagaagatgaagagagaatctcatctttcgattcttgatcctagctccaatgatattttccctcgtattcttcctcattatcaaaaatggatgtctcaatacggtgtcgttttctccaactctctctttgttcatcttttattttagattttattcgaggataatgcgtaacacacaagttatctatgttatatattattaggagagacttttctttactggaacggaacagagccaaggatatgcatctcagatcctgaacttgcaaaaactatgttgtcgaacaagttaggtttctttgtcaaatcaaaggcaagacctgaggctgttaaacttgtcggctccaaaggacttgtctttatcgaaggtgctgattgggttcgccatagaagaatcttgaaccctgctttctccatcgataggctcaaggtattttaatccttctttcttagcttgacttgagaaattaaacattagagccgaataacttaattttggttgtaaatttctcattttgttgatcagatcatgacgaccgtgatggttgattgtacgctcaagatgttagaggagtggagaaaagagagcactaaggaagaaacagagcacccgaagattaaaaaggaaatgaacgaagagttccaaagactaacagctgatataatagcaacctctgcgtttggaagcagttacgtcgaaggaatcgaagtgtttagatcacaaatggagcttaaaaggtgttatacaacttctctcaaccaagtctctatccctggaactcagtaagttaatcattctcctactttcagttctcaaacaagattcttaggttttgacatatattggtcttgtttcttgtattctaaggtaccttcctacgccttcgaacattcgggtatggaagctggagaggaaaatggataactcaattaagagaattataagttcgagactacagtcaaagtcagattatggagacgatcttctcggaatcttgttgaaagcttacaacactgaagggaaggaacggaagatgagcatcgaagagatcatacatgaatgcaggactttcttcttcggaggtcacgaaactacttcgaatttattggcatggacaacgatgttgctgagcttgcaccaagattggcaggagaaactcagagaagagatattcaaagaatgcggtaaagaaaaaaccccagattcagaaactttctccaaactcaagctggtaatgttcatttttttcaaagggtctcttgtgagacaatgtttcttgcggttgaagaaacctgtttatttcttgcagatgaacatggtgatcatggagtcgcttcgactttacggaccagtgtcagctttggcccgagaagcatcagtaaatataaagttaggtgacctagagattcccaagggcacaaccgtagtcatcccgcttctgaagatgcatagcgacaagaccctttggggatccgacgccgacaaattcaacccaatgcggtttgcaaacggcgtttcccgagccgccaatcacccaaacgctctcctagcattctccgtcggaccaagagcttgcattggccaaaactttgtcatgatcgaagccaagactgtgctcaccatgattcttcaacggtttcggtttattagcctctgtgacgagtataagcacacccctgtggataacgtcactattcagcctcagtacggcttacccgtaatgcttcagcctctggaagactgaagtaaaatgcccaaataaatcggatgtcttaatgaatatacctcacgtgtgtgacaagtctcctccatataggccggcttattgctgatggtgggggcttaacaaatcatccttgttaagttattgggcttttactatctcagtttggaacccttgatgggctaaatagttattaataatttaatatattgtgacattgcatgtataattgaaaagtggaaggaagtgtgtaacggttatgaattcaaaagccaggctaaagcaacttgaaaacatgagtaatcgacaattcagaaattataggaatctcgaacctcctttcgttcagaaaaagacagtccaaaatgttaataagttataacaatataaattgtcctctatgacttcaaaatattttattacagaaatggcaaaatgccaaacgaaaaatctggatcgctgtttacattatttgtggttgccttgtgagacgatcacgtgaactttagcttttacacgattttctacgtgtgtcatatatcccaagaaacaacatctacaacttctgtttctaacttgtaacgtgtaagcaagctacaagaagataaagattacttccataagcaatgacggcatctgttataatcgatgctgttaaaagactgtccccacacctccattagcgataggcgattttagaatccgaagtttcctttattgtccgttacgttgtcttactttctttcccatgtaaaataaattcccattactcctatgttattttgttcggttagaattttattcattatatcttcaaaacagcttgtgcttatatcagaaacagaagtcacgacgaccctcacactacacacgacacataaaattgaaagccccactgcgaatccaccacaaagcaaaaaaaatttgtttgttattcgaatg

SEQ ID NO: 11879 - DNA, 3000 bp, Unknown
  misc_feature (1)..( 3000): cDNA_ID_2711331_gDNA_ID_2214521_Annot_ID_184612 3000 nt of promoter + ATG
cttaaacgtagtttccgccaaacctttactgttgtgtctattcaagaaagaaggatcatcaacgatatcgtttcgaaaagacccagtgagtgtctcagaatcaatagtgcttgaatcaatggtgaacctctccgagttagacggagtaatatcaggagactcaaagatgcttggcctaacgtagcaaaaggaatggcctaaaccttcatctaaaggttccagaaactccaaatcaacaccgtttttgtcattagacggcacgaaacaaccaacaacacgggaagtcccgtttcccatcactcaggcaatactacaaacaccttggaggcacaatctcatcataaacctctaaagagtttccgcaatttccagcaccacaacacttaacaagaggcgaaattcttataaagcctacaaagattcgacgcgttatgcagaatccaagcatcatctgaagctcaatctctgaacattaaaacgcaaacaagcacctgatagtatcaaattcggatttttttaaaaatcagctgaatgcccacaaaagctttggattctgaggtcttgaaatggaaacagaaacagtgatctgacctgttgaagaaggagatggatcatcaagcagaaactggaaacagatctaaaggagcggcaaagagaagacagtgttgtattgaacacatcggaagcaaaatagagacagtaaacaaggggaaaaaacacccctttagatttcttctatgggaatctgacaaaaagtacccatttttaaaaactaattatacaaaaacaaaaaaaaacaattatacccattttttaaaaaagaaaaaaaaaaaggaagaagacccagattgagattgaaccatgcagagacgaccagctgttaaagatccaagcttttcaggggaaaaaaaagaagctaaaacccagaaacccctctttcagatatgttacggagaaaccaagattcaaaatcgaaaattagtagagtcacaatccaaatagagctgaagaagaggggaaaaagaagaagcttgaagctgctgcaacaggtttgattttgatttaagcaggtcaagaattatgtatgatttcacctttttcttttaatttccttaagctcataggtgagagtgagcagagaagaaaagagttgtctcgggcttttcaaatggtttcggagggtaatcaaaaaaaaaaaaaaaaaaacagagtaaaaagtctaaaaactgcgttgaaaaatgtaaaagcgaaagatcgtctttttagagtttttatttttattttcctcttacatctgatttattggatattttttacaagaattgatacattaaaagtacttttttttttacgtacattcttagagagtaaatacataaccgatcattaaaaagaagagatgaagaagtgaatttccacaatgttttaaaccttcagaatttatattaatggggtttgcaaatgattggaggtatacaattacaggtgattcacgtcattattgttctcatcgatggaccctttgcatggtttcaattttttctatgcgggtcccgttttttattcacacccattttatcaatgttttttttttgttatggtcttcaattttttatatttggttgcattgaatcttgctcctcataatcggaagatttgaccagtgttaatgatattatatagtttgaacgttaaagtatgttaacatgttagtcttcttttttaatgttatcatattctgtttaccaagtaggtttattttaaatctcaatgctctatatactatcttattaaacgaggtaaacttaacatttttcatgtctagtaataccgtaagattctttctatgtaacgaatgagatttatatatatatatatatatatataaggaaatttgtaatgatgcctaacatgcaaaagaggccaactccacgagcacatagagagagtcacgctttaaaccaaacaaaacaaatttgttgacttaaaccaaatccactctctcattttttttgcctttgagtttctgactactgacaaactctttcaacgccctagaaaattatgcttttggtttcacattgtttgttttttgttgtattcttttatttattagtaattgcgtccacagatccaaaaccaaagccattatcatcaattcatccactaacttaactatttatattatactatattttatttcaaaaccccagaataaaacaaaagttgtatattggagtgggcaggcacctccacaaaaatgaaaacttcccgttaaaattcaccgttctgttttacggtttttatttatttacatgacttagtatcatagattcatttagtagtaatataagactgcgtaagagtgtctgcagaattttcacaatcagtttcaatgtttcatccaaaattgtatcatacagttggatcatacggtccttgaaagagctaatagtgaggtgggcttgtgatgattaaataggcccagtgattataaaaggcctcgttacagaccattactaacacgtgtgatgcgcggatgcggcataagatactgttaaacagagccgatgccgacaaaaatgaaataaactatttaagctttttaattaatgatttaattaattggttttggcagtaattgaggaggaacattcaaaagacagacactttttgtcatgttaataacagtaaaaatcctctaataattatgtctcaaataagataaattaaaattgcaagaaaattagtactgtatcttgtatttttagaaccatattaatttcaagaaaatcaattaattattcaaagatttggttcgtgacgtaaatcaatttattaccataatgatgaaagcgtgaaagaatttaaccagaaaaagccataaagacttctctcgctatcaatcacacacatgcaacagtacaagatttgtcagagtccacagaaatcgatcttttcgagtcaagattttcagctctgttcaggactccggcggag

SEQ ID NO: 11880 - DNA, 3000 bp, Unknown; identical to SEQ ID NO: 11877
  misc_feature (1)..( 3000): cDNA_ID_3023320_gDNA_ID_2214521_Annot_ID_184611 3000 nt of promoter + ATG

SEQ ID NO: 11881 - DNA, 3000 bp, Unknown; identical to SEQ ID NO: 11876
  misc_feature (1)..( 3000): cDNA_ID_3023324_gDNA_ID_2214521_Annot_ID_184610 3000 nt of promoter + ATG

SEQ ID NO: 11882 - DNA, 3000 bp, Unknown
  misc_feature (1)..( 3000): cDNA_ID_3023328_gDNA_ID_2214521_Annot_ID_184609 3000 nt of promoter + ATG
acgccgtcgttctttctcccgcatctcggttgttttctctctctcccggaataacaatctacagttctaccggtttaaatgtaccggttaagtaaaaaccggaaagataccttgttctcctaaaaaggttgagagaagcgagggattagcgtgtatcgacgagataatcatctagtcgtcggtgtcgccgcctttctccgccgtctgaaatcgtccttgttcgattttccgaagacgaagcaggagaagatatgtctgggaggttgctgaagaaggttctccaggaacatgaagattcgaaacttcagaaacatcacgaagaagaagaagaagaggacgaagaagaatcaggagcccgttcttcgattaatccattcgatctcttgaacgatggtgatgaagatcctgaggtcagtctctcagattttgacgattagattgttcggtagatttagtatctagaattttatcctcctccgtgttctaaaatagctaatgtgttgataagtttgaatgtagatagtttcaatggtttgatcttcagattcttatggttttttattctgatgtctagagctgattcatattttgttggtcgtaggagtaatgattacaaagtgtttctgtaacaattgggtttgattgcaggagattgatgatgagactatagctgagaagaagaacgaagatgcggatcatcagtcaagtgtcgctgatcatgtgcagccggtgtcaaagaataagtcgaagaaaaagaaaaagaagaagaacaaagagagtggctctaatgtgcctaaagctgaaatgactttggatgaaactttggaagcacttggtctcaatgctaactctaagcaagataaggttcaggagacaaaaccaaatgctgattcttccaaaaaggcttcttcacgatttgtgttggaaatagattccaagtatctgaatcttgagaacgagttgaggagaacgtatggttcaaaggctatgcgatcatttgagagtgagagtggctctcaaggtggtagtagctctagacgagggggaaggcgtggagtccatcatatcacaaagacggttctggtatctccaaaagagaattggtctcgatgggatagatctttctcaatggagtttctagagactaaagatggtaacaactacttcaggtaacaatttttacagctttttgttttttcgttgggtgtgtgtatagaaaatacagacattgtaaatttgtacatctgatgaaatacttttcttttgatgtgtagatatacccattcatcctcatatgagcaggctcagagagcatttcaggctgcacaagctatccatgatttgaatggtgtagcaagtgtccttatacacaatccttaccatattgagtcgctcataactatggcggattactttaagtttgtaggtgagaatgatatggctgcagattccattggaaaatgcttgtacggtttggagcgtgcgtggcatcctatgttcactccgttccagggtaactgccggttggagtttaaccacgatgaaaacaagctgttcttcaagacgcttttcactcacatgagaaacatggacaggcgtggctgtcataggtcagcgttggaggtctgcaaactcttgctttccttggacacgagtaatcctgtgggcgctttgttttgtgtggactactttgctttgagagcagaggagtatgcgtggctggagcaattctcggaggagtaccgaaatgataactcattatggctctttccgaatttctcttattcgcttgcaatagcacgagtttatcttgaaaagatggagcctacctcttcctcagaagccactcccagagatacttcgaagcaaagctctttggatctcatgacgcaagctttgaagcttcatccaacagtactcaacaaactagtggaaaaagtacctttaaaagatcaggcatggacaaagatactcaagcattcttacttccgatcagatgaatcaaagatcccgtctttagatcacctcatcaaaatatatgttgagaggaattatcttatatggaggcttccagatgtacagaaattgcttcggagcgctgctgatttagtcattgaatctctggaacaagatggaaccgaagctgagagctggctttgtgtaagattagaagctttctcttctgagaataaccagtaagcgttttgaactctcactcacttgtcaatttctttttttttggctagagctgatcacgtatggttctaacccattgcaggtactctcatttatcaacccatgatttctctgattcgatgccaactctcccaccagacaatttgcagaactttgtggctgatccaagaatggtgggaggagagcaaatggctgaaggtggcgggagaggtcaacaccaagcaccaccaccacgtccacgtgatttggcaaatcggagtccattagctgtgttgattgagtcaatacttccatgggctaattttggagatggagaggatgagattgcacatgatgctcaccaccaaccagacaacaatggctaatcaatggctctaactgaagaaagaagaaaactgctttaaagtttacaaaatgtggccttccttttgttgtacagtgccattttgatggtttagtctatggatcatttgttacttgggtaaatcggacttggtcattttcgattcatgttctggtggaataattgacagctttcattgctcaaaggctcggttaaggtttgagccggttcacgatgtcaggtcaaaatactgccacgtattaaaataaaaaaatgaagagtaattatagaaaataaagctgtctcatcttcctcagttctcagtttgtcaccatcctcgagcagcttttgagctttgaaggtatcgactaaattattattattatttttttctcctagacattgttactctttggggataaattttttatcttgtataagcttatccatcaggttcgaaa

SEQ ID NO: 11883 - DNA, 3000 bp, Unknown; identical to SEQ ID NO: 11875
  misc_feature (1)..( 3000): cDNA_ID_2707747_gDNA_ID_2214521_Annot_ID_184608 3000 nt of promoter + ATG

SEQ ID NO: 11884 - DNA, 3000 bp, Unknown; identical to SEQ ID NO: 11874
  misc_feature (1)..( 3000): cDNA_ID_1807391_gDNA_ID_2214521_Annot_ID_184607 3000 nt of promoter + ATG

SEQ ID NO: 11885 - DNA, 3000 bp, Unknown; identical to SEQ ID NO: 11873
  misc_feature (1)..( 3000): cDNA_ID_2707740_gDNA_ID_2214521_Annot_ID_184602 3000 nt of promoter + ATG

SEQ ID NO: 11886 - DNA, 3000 bp, Unknown
  misc_feature (1)..( 3000): cDNA_ID_1808366_gDNA_ID_2214521_Annot_ID_184625 3000 nt of promoter + ATG
atataccagtcaaaacttaatttatgtgcatagaaatctctgtaatgttttttaaaaaactatatttttacattaaatccgttacccttattatttggactcttgtttaattcacaattaaccagaatcatacaaattaaaacattcttttacttgatttttctctgttagtaaattatagattataacttaaatgtaaataaaaattgttgtcgttgttaatttgctcattttatattttgaaacaaaattaggattagtgactcggtacccacagataaaaacgccacaattcactctttatcatccattcatttttgaaaatagtcaaaaccaaaaacaaaaaacatccaaatttagaaaatccatataaatcttttatatatacgtaacatttctcttcctgtttctaatccattcctttccaatccacgtccaaaaaacaaaaccaaaaaaaaaaaaaaaaaaagacaaaaaaaaatgaacactccaataaaactcgcctttctcattctctgcattgccctaaccgcaaccgcatttatagtcccagcaaaacgtgacgccgtttcaccacaccaccaaaaagccgtcgatggaatctgcagcgttgtgcaagacaaacgtctatgcagcattaccttaagaaacgtcccaagcgatgatcccgccgttttggttcgttacttagccacggcagcagaagcgtccgttaaaaagggtttgaagttcctctccggaatcaaaccaaaatacaaaggaaacgccttcgccacaacatgcatcaccggctgcgagaaacagctacacaacgccttggacgactttgcagatttctggaaagccgcaggaaaaaatctaacgagcatggctgagaattacttcacatgtaagaagaagatgacttccatcttcacttaccattccacttgtctcgatgacatttacgacaagacgttgcacaaagtggtcgaaggagggattggccttgggaaaagaatgagtggtgagtctgtggatgtgttcgctggaatgggcaaagtctttaacactttcaacattaagaccaaacttaaccagaaagataccgacacgttgctcccaccacctttgtccttttactactattgattttatttatcaatatatattatatatcataaaacacaacaaaatgtactgcttcggtcgatggtgatgaataattttcatcgattgggttttcagatattttggggatcttgtaaccaaaggttccttttgatgtatgtttgtatttaatatgttatggattataatcatgtatggacctcgtgattggaaaggatatggaataatgtgattatctaataataaaaacgtaattaatatcgtatttgcatatatgtattttatgtttatacattcttactcatattttcgtttgttttttttcttcattgatgctccacattctgacgtaaattttgtaatcaatggctacatacatttttttaaaaacaccaaaaaccaacgcaatttgattccccgtaattcgtcattatttagtgacctaactaactttttaccatacatcctactcagccgaagatgaataccatttcgtcgctgattttacttttgtggatttgtttgtagtatataatataccctttatgtttagtaggcaaaatgtgtagttattaaaaaaaattgtggttatatattataagtacttaattggttttattaactagacatgctactgatcagccgaagatatataaataccattctgccgctagttaatttatattttttgttgctacaattctgttttctttcttgtagtgagtgatttactctctctttgttggttaatgtaaagatgtgatgatttactctcactattgatttatttttcactatgaaaatatgtagatttagatattttacaaaggggaaaaaatcaattgaaaagcaatttagaagttttatcttttgtgggtcacatattaattcttatacgtatgtattaagttccgaggggcgagggatacgaaaatgtaaatataatgtttctcgttaattaatcaaactgctatatatatatatatatatatatatatatatatagctacgtttatatacatagcatgttgcaataaatcaaatacgtacgggattgttgcggtgcatacgtgaagacaaagtatatatattgtatgacaaattgaactggtctggttacctatagtagagctcattttttaggattttctgttaagaagagctcatttaaagagtttgttatatagaagctctgaatatttataatttagttatataatctggttcattcatatccgatactgcatgcagaccagttaaccaatggaatgaaggtgaaaatatgcgctttaatgttttgacctatacatagtcaagctatgacatgactgattttaaaaggattttttgtaactcggttttatacaagtttggtttgtttggtccaacttgacatagtatttaactaaggattaaaagtaaaattacagctaatatcacttaaggaattataaatttctctttatttttatttatttttttcttctttattttatttttagtcaatcaaaccaccacaacttctaatcaggggacgtacgccatatttatcttatcgtgaccaattttaatccgcaactaagcaattacaaaaacaaatctttaaagttaattatagctttcttgaccgaatactctcagccattcgtcgaccgcaaatctctccctctccatgcaaaatccatgcacggtcctaattttagaaaccaaaaagcttctatataaacctccagcatccatcacaatagatactggcccaagtcattcaacaacttggcttttatctaataaagcccctccctctccgataaaccttaaataaaaccggagggagagcaaaaaataaaaacaaaaatatacaaaaacaaaaacaaaaaatcataaaaaatg

SEQ ID NO: 11887 - DNA, 3000 bp, Unknown
  misc_feature (1)..( 3000): cDNA_ID_3023285_gDNA_ID_2214521_Annot_ID_184624 3000 nt of promoter + ATG
atgactaaggctggacgtggcagtaatgacggtggtgctaggatcagagcaacctttgtggtggctaaggacggaagtggacagtttaagactgttcaacaagccgttaatgcttgtcctgagaaaaacccaggccgttgcatcatccacatcaaggctggtatctacagagagcaagtgatcatccctaagaagaagaacaacatcttcatgttcggagatggtgcaagaaagaccgtcatttcttacaacagaagtgttaaactcagccctggaaccaccacttcccttagtggcacagtccgtaagtctcaccaaaccctaattcactagttaggttaacaaatatttttctctacatatatagctcatgttatatattattgcgcagaggttgagtccgaaggattcatggcaaaatggatcggattcaagaacaccgccggtccaatgggacaccaagctgtggctatcagagtgaacggagaccgtgccgtgatcttcaactgcaggttcgacggttaccaagacaccttgtacgtcaacaatggtcgtcagttctacagaaacattgtcgtgtcaggaacagtcgacttcatcttcggcaaatccgcaaccgtgatccaaaactcactcattgttgtccgtaaaggaaacaagggacaattcaacacggtcacagccgatggaaacgaaaagggtctagcgatgaaaatcggtatcgtcctccaaaactgtcgcatcgttcccgacaagaaactagcggcagagagattaatcgtggagtcatacttgggaaggccatggaagaaattctctaccaccgtgattatcaactccgagataggagatgtgattagaccagaaggttggaagatttgggatggggaaagtttccacaagtcatgtaggtacgttgagtacaacaaccgtggaccaggagctatcactaaccgaagagttaactgggttaagatcgccaggtctgcagctgaggtcaatgacttcactgttgctaactggttaggtcctattaactggattcaagaagccaatgttcccgtcacgcttggattataaggcgtataaatcaaatcaaatcaaatcaaaaaaaaaaaaaagagtagtacgtgctcatgtaaaaggtgaaaatacaacgtcgttttcggtagggtaatatgcgcggggagatgaagttgtaagatttgctttttgtttgtctcacgtatgaaagatgaggaaaaaaaaaatattgaaaatttatgttgtttgatttttgtttctatgttttgggatataataatttattcgctgtgttgtacctatgtttaataacctttttaaaatattataatttaactaatttattttacgttgttgtcaattctctaatttactgaaattattatggacattcatataattaacttgcccgatatttctccattttgggtttactttgagacagaggaacaatcgtgtcttcttttctaactcagtcctgtcttttttttttttttttttttttttaatttgcatacaaatggattacagtcgtcgcaaatgcttatttttaaaaataaaaaatgggtatatcaagtttattgtgatctttttttgtttccaaattgttttggttttagaagatatatggcaacatttttttgggtgaaacggatacaatgcaacagtggtttaattgattaacaccaacttacccaacagagatgcaagctgcacaaaaattttgcgagattttttttttttttattttaaaaaggaaactgctaaaatatacgtacgagactaatgctatgttacatatttccaaagatttaatcttcttccaacgggtatttataacatctagtttaaaacctctaagacgtaaaatttcctttctcttcttagacgtagtcatctgagattctgtcacgatagctagacccatatctctttcaacgttatgtaaattataatataagtttctaatttttatttttaaatgattattacttttgatccctcattgttttttaaaagtttttttacaccttttcattcaagattttattttaaagttgagttttagcatttaagtccaaacagaaagttttataatactagaaacttggatgataaatttgcaatacaatataaatataaactggattttggatcatgttatttgatataatttattcatcattagagatttcacaaattcaatttttcgtgccatcatgtagatttatcatacaagttattaatttaatttgatttttcaaaaatatctttttaaaaagttttaaaatttgatttaaatttttatctatttaaattttcaatttttagaatttgaagtaatagaaagttaatacgtttgatatacgatgtaaaaactaaccattgaataatgtcaattgataattagggattttcacaaacttaatatataacacaatgtcgatttgttacacaaatcccttatttagaattttaagtaatgaaaaattagataataaataagaaaaattaaccatatttggatcatttcacctgaccttgtttatagtaaggactaatgactattatagaaagttaatcctaaattccatatatatggacgtaagattgaaataacgtaaatacccttagtaagatttggaactgcaaatttacgttcggcatccttttctaagttcgacgtcacgagctccagcgaaagttaaataaagctttttgaccaaatattctcagccattcgttgacccacatcaatccctctccatgcaaaatccatgcaagttactaattttagaattcaaaaagcttctatataaacctccagaatccatcacaatagatactggcctaagtcattcaacaatttggctttaatctaataaagcctctccctctccgattaaccttaataaatccggagggatcggagagaaaaaagaaccaaaaaaaaaaaaaaacagaaaaaaaaaaatg

SEQ ID NO: 11888 - DNA, 3000 bp, Unknown
  misc_feature (1)..( 3000): cDNA_ID_3023289_gDNA_ID_2214521_Annot_ID_184623 3000 nt of promoter + ATG
agatggtgcaagaaagaccgtcatttcttacaacagaagtgttgctctcagccgtggaaccaccacatccctcagtgccacagttcgtaagtctcatcaaaccctaattcagtagttaggttacacatatttttctctacataattcatgttttcgatatatatattgtgcagaggttgaatcggaaggattcatggcgaaatggatgggattcaagaacaccgccggtccaatgggacaccaagccgcggctatccgagtgaacggagaccgtgccgtgatcttcaactgcagattcgacggttatcaagacacattgtacgttaacaacggtcgtcagttctacagaaactgtgtggtctcgggaacagtagacttcatcttcggcaaatccgcaaccgtgatccaaaacacactaattgttgtccgtaaaggaagcaagggacaatacaacacggtcacagccgatggaaacgaattgggcttagggatgaaaattggtatcgtcctccaaaactgccgcatcgtgcccgacaggaaactaacgccagagagacttacggtggcgacatacttgggaaggccgtggaagaaattctcgaccaccgtgataatgagcaccgagatgggagatttgattagaccagaagggtggaagatttgggatggggaaagtttccacaagtcatgtaggtacgttgagtacaacaaccgtggaccaggagcattcgctaacagaagagttaactgggctaaggttgccaggtctgcagctgaggtcaatggcttcacagctgctaactggttaggtcctattaactggattcaagaagccaatgttcctgtcacaattggattataatttataaagcgtatatgaaaattattttagtttttaagtatatgaaaattggtgtatgaaattggtttatgaaaactttttaagaaagtctataatgtttttcctctgttaatttgcttcatctaattaaggtcatattgcaatgcagacaagtactcatgttgctttattataagttccttcttactgagtctatatgtttttcctctgttttcttcatcttgttttttttataacaaatcctcggttttcttaaagaagagaaaactaaagtaatgacaataataaaagtgttttctatgtgttttaacttcttataaacttttcatcgaacgaggaaaaagaattagattatcctttggtacagataatggaacaagcttcatgcccatataccataggcctacatcagggaaatattcaatatcaaaccattacgccaagttttaaaaaacactttatcatttaaaatttcatataagttttgtttatttgaaaatttagaacctcattttttggaaattattttagtttgaagtatcagccacatattttattttctattgtttgtcaatttctaattcattgaaattattatggacatgactattttagggaagttttaaaggcttattggcaaagtagacactttttcaaaaataatttgtaaagtaggtagttttttttttaaattagagaaatagatactttttttgctttttgtgagatagagaatttgtctaatagactaaaaaacaaaatacatatcaaatactaaaataccctttatcttgagagagaataaaaattatatgaagaaccatttttattttattttgtttgtctttatctttttatttttttattttagtattcttaaatacttaaaaaaattaaatattatttttttaaaaaaattacattaacttttagactatttatctgtcatcattataatgcacaaacatttaaaacatcgttttgtacactaaccattattcgttggtgtacaagtgtgtacaccgatatttcataaatcatcaccgacttctcttatacttattaatataagtaatattgttttaatattttacaaacataatgattgtataaaccaaatattattattcaatataatggtgtacatgatggtgtatataattaagttactcttaataatgtacaaaatgattgaaactattatgacgattggtggatagaatgatatatacaacttttaaatgataacatacaagattggtagacaaagtgtacaaaacttggtgtacacttatagagaatgtataaatcattattttaattagtggtgtacatcatctcgtacaccaatgttagtacattgtctcatagatttttaaaggtgtacgattatgtacaccatatttttcatcatctatgtacatcattttgtacactgttatactcagtgtatcattttctacatcagtaattatattaatttttacgttattgttgtatattactattagtacaccaattttaacaatatcacgtacaccgtcggctgagtttaaataaaaattgctacatatttttgaaatagcaaaattagactttttaaattcacataaaaattttaaaaactaatatgattatgtggtaaaattttatgaagaaatatcatcaaataaagtaaaaatatttaagtaaaaataaaaaataggatttgacttgaattttgtctttatcttactaaataacaaaataacaaaaggttatataagtcatttagtaaaatctttattaaacaaaaagtattattagataaaaaagagaaaaatgtctatttctcatatttctaaaaaaattacatactttacaaattatttatagaaaaagtgtctattttccaacttatctcaacttttaatttcaaatttcaaatatatagacgccagaacgaaatgacgaaaataccctaattaagatttggaactgcaaatttaccaaaaccctcgttttatcttttctcgacggcgacgagagaagccgccgtcacgagctccggcaaaagttctttcatcttcaccgttcggtctgaaacttaaccagacagatcgaaagagaattcgaaaacttgtgctaaaaaaaacatg

SEQ ID NO: 11889 - DNA, 3000 bp, Unknown
  misc_feature (1)..( 3000): cDNA_ID_2707761_gDNA_ID_2214521_Annot_ID_184622 3000 nt of promoter + ATG
taaggtcataagagggaagccaagaccatttccaatagatccaagcgtcccgaggatcatcaagaggaaatcaaaggaatctgcaaaagcaaagagcttataaaacggcaccgttttggttttctcatgttcctcgtctttcttctctgttttcttcacttcttcttcttcttccttgtctcttttggtctcagaaacctcttctagtatatttggatctccatttaagccgctctctgaagccattagagtttcacagatacctcacgatcctaagcatttaaaagaacagaggagatatgtaataagtttctaaatctatgagctgatgagatcttcaagagagagtatatatctaaatagggaacataaaggtcaggccaagaaggaaaagaaacaaagacttttcaccaaccatgaaaacaccctaaagatctgtatattgttttttcaagaacatgtgaaaaaataacgaaacctgaagcaagatctgtcgtttacaatgaggaataaccgaagctacggcccagataagaacataaagtacagagtttccagtataaaaatgattaaagcagagaatataaaaatatatatatatacctcgaaaagcaacaagaagaaagtgattagggtttagcggcttcttggtgtcttgccgtataaacagcagttgaaaaatgtgcagagagctctctctctctctctctgcttatatatttttatataattgtaagtgaagtttggaaggactcatgtgagtttatatatgctctgtttatttcttgacgaacaagctgtgacttgtttgagagaaagagaaaatggatgccatgaaattaataactactacttcgtaaaatttgtgaaaaatagtctttttgttgttgttgttagtaaagttaaattgtaaccatagcacaattggcgtagttataaaatagggaatcttgtgtatataaaatgaattatgcctttatgtttgtaatacaatataatacgtaagataacattttcaatattttatctgcccattattgtctaatgctgaccaagatgattaattatagcattaaaaaaatataaagaacgaattgatcacagcgatcgacgattagtctagctgttttgttcaactacaactctattattttaacataaagttttaatacgggaggaccgtatgtctgtataatcccgcgaatcactcatatgtacaatatagttattttttttattttttttggtatcagtgataagatatatttgatctcttattatagctagttaattagccatgttattagcagcttccatatgtccttactccttatcatcgtttaaaacgattcgttttatataaaaactcgaattttgtatgtacgtctttgtgtgtacatatacacatcaatatctcaaaaaaaaaggaagaagctgagttatgatgattttcttgcatcgctttagttgactttctcgttggcattagttgtgacttgtgactatggatggacaaattgacaagtgctgcaagaacccattcctcactagtaatctttgttatcataattgcgttttgccaacggatcgatgggaattattgatgtgttaaaacaaacgaaaaatcgaattcccataaatgtatatttcattagttattttgtaagttaagctaaaaatattataaaattatattttctggtcagattatatctttgcactaccattctaggttggaaccacgtgaagcttattttactttacgagcaagaaacacgtccgaattttaaattatcgattcaaaataaaacaaagaaaagtcaaaactacagagaaagggacctttctttcttccagggagccagggaaggaatggtctcgcattacttcttctgcgccttttcagaatcaatgaatcttatcgaaccaataacgattctgacgtcattcctgacatataatgatattcctatatttatcacctacccacgtatatcttttgtctatagcaagaatttactacttggggaacaagttatcaaatactacttttctaagaaaagaaaaactactagttgcaattttattccaaacattgatgtgagagtgactacaccattaataaatcgtgtgaggcgctattcagatttttcatttttcgatgaagtgtggatttgttttgtcatttttattgtaagtttttgttttggtgcacataaatatttaatttctattaatttaaaatatctgctgaatgacactaattattggactcattaattcactcgatagattattgacatttttttcagtaggcgtagtagacctttttccgggggaagaaaaaaagtttaagcggttcgattcccactaaccttttggagaatcgtgtcacgtgtcgaatagacccaaatcctttaccctacatgtttgaaactgtataaaattcccgacgtaaataagacgatcttgacccggcccgagaacccgaatctatggattttgaatttggaaacccaacctacaaattttttatatatcccactgacaaagccgttactagcccatgggcctaattacttcaaagaatgctcaacttttgatttttaatagagaagaaaaagtttgaaactttatcatatattgacttgtcttgttgctctctagagtgcaatcataccattgaatacattttaggattcgttttcagatggtttaagatataatcactctgaacgcaaatgcaaattagaatgtattttgatccaagcatttctacatgtactgctttgatctgaatcgaaaagagcaagtcatggttactccctcaataatcgccactaagaagagtaacagcttctttgacttttggaagcatttatcacatagagattaaatcattcaccaactaccactgcagtccacacaaaaaaaaagcttaaatagattaaccaaaaaagcacaagaaaactaaatgcagaaagagaggaaaagagacaa

SEQ ID NO: 11890 - DNA, 3000 bp, Unknown
  misc_feature (1)..( 3000): cDNA_ID_3023293_gDNA_ID_2214521_Annot_ID_184621 3000 nt of promoter + ATG
tttgtttgattggtcttctgtgtatgctttgatgcatttagatgacaaatcgaagcaatctgcagctcgaggactacccatgtgaggagcttcgaagccaacctcattgcagaagttccaagcttcaaatgccactctgagaccgtctctcttcatcccaggatctccaaccgctgatctctcgtctccatgaaccaggaggatcaagtttaccacggccaagattggagccagttgcttcatttgtctcttttcctctctttctgcatttagttttcttgtgcttttttggttaatctatttaagctttttttttgtgtggactgcagtggtagttggtgaatgatttaatctctatgtgataaatgcttccaaaagtcaaagaagctgttactcttcttagtggcgattattgagggagtaaccatgacttgctcttttcgattcagatcaaagcagtacatgtagaaatgcttggatcaaaatacattctaatttgcatttgcgttcagagtgattatatcttaaaccatctgaaaacgaatcctaaaatgtattcaatggtatgattgcactctagagagcaacaagacaagtcaatatatgataaagtttcaaactttttcttctctattaaaaatcaaaagttgagcattctttgaagtaattaggcccatgggctagtaacggctttgtcagtgggatatataaaaaatttgtaggttgggtttccaaattcaaaatccatagattcgggttctcgggccgggtcaagatcgtcttatttacgtcgggaattttatacagtttcaaacatgtagggtaaaggatttgggtctattcgacacgtgacacgattctccaaaaggttagtgggaatcgaaccgcttaaactttttttcttcccccggaaaaaggtctactacgcctactgaaaaaaatgtcaataatctatcgagtgaattaatgagtccaataattagtgtcattcagcagatattttaaattaatagaaattaaatatttatgtgcaccaaaacaaaaacttacaataaaaatgacaaaacaaatccacacttcatcgaaaaatgaaaaatctgaatagcgcctcacacgatttattaatggtgtagtcactctcacatcaatgtttggaataaaattgcaactagtagtttttcttttcttagaaaagtagtatttgataacttgttccccaagtagtaaattcttgctatagacaaaagatatacgtgggtaggtgataaatataggaatatcattatatgtcaggaatgacgtcagaatcgttattggttcgataagattcattgattctgaaaaggcgcagaagaagtaatgcgagaccattccttccctggctccctggaagaaagaaaggtccctttctctgtagttttgacttttctttgttttattttgaatcgataatttaaaattcggacgtgtttcttgctcgtaaagtaaaataagcttcacgtggttccaacctagaatggtagtgcaaagatataatctgaccagaaaatataattttataatatttttagcttaacttacaaaataactaatgaaatatacatttatgggaattcgatttttcgtttgttttaacacatcaataattcccatcgatccgttggcaaaacgcaattatgataacaaagattactagtgaggaatgggttcttgcagcacttgtcaatttgtccatccatagtcacaagtcacaactaatgccaacgagaaagtcaactaaagcgatgcaagaaaatcatcataactcagcttcttcctttttttttgagatattgatgtgtatatgtacacacaaagacgtacatacaaaattcgagtttttatataaaacgaatcgttttaaacgatgataaggagtaaggacatatggaagctgctaataacatggctaattaactagctataataagagatcaaatatatcttatcactgataccaaaaaaaataaaaaaaataactatattgtacatatgagtgattcgcgggattatacagacatacggtcctcccgtattaaaactttatgttaaaataatagagttgtagttgaacaaaacagctagactaatcgtcgatcgctgtgatcaattcgttctttatatttttttaatgctataattaatcatcttggtcagcattagacaataatgggcagataaaatattgaaaatgttatcttacgtattatattgtattacaaacataaaggcataattcattttatatacacaagattccctattttataactacgccaattgtgctatggttacaatttaactttactaacaacaacaacaaaaagactatttttcacaaattttacgaagtagtagttattaatttcatggcatccattttctctttctctcaaacaagtcacagcttgttcgtcaagaaataaacagagcatatataaactcacatgagtccttccaaacttcacttacaattatataaaaatatataagcagagagagagagagagagctctctgcacatttttcaactgctgtttatacggcaagacaccaagaagccgctaaaccctaatcactttcttcttgttgcttttcgaggtatatatatatatttttatattctctgctttaatcatttttatactggaaactctgtactttatgttcttatctgggccgtagcttcggttattcctcattgtaaacgacagatcttgcttcaggtttcgttattttttcacatgttcttgaaaaaacaatatacagatctttagggtgttttcatggttggtgaaaagtctttgtttcttttccttcttggcctgacctttatgttccctatttagatatatactctctcttgaagatctcatcagctcatagatttagaaacttattacatatctcctctgttcttttaaatgcttaggatcgtgaggtatctgtgaaactctaatg

SEQ ID NO: 11891 - DNA, 3000 bp, Unknown
  misc_feature (1)..( 3000): cDNA_ID_3023297_gDNA_ID_2214521_Annot_ID_184619 3000 nt of promoter + ATG
tatacaacttctagcaacatttgtaggaggctttgtgatagctttcgtaagaggatggcttctaacgttggtcatgttatcttcaattcctctacttgtaatggctggtgcacttctggctatcgtcattgctaaaacagcttctcgtggacaaactgcttacgccaaagctgccactgtagttgagcaaacaattggttctataagaacggtaattaggcttacttatacacttttacttagccaaaattaccaaaaccacaaagacttactatctacatttttgcaggttgcatcatttacaggagagaaacaagcgataagcaattacaataaacatcttgtcactgcttataaagcaggagtcattgaaggtggttcaactggattgggtcttggaacgctctttcttgtagtcttttgtagctacgctttagcagtatggtatggaggaaagttgatattggataaaggctacacaggaggacaagttctcaatatcatcatcgctgttttaactggatccatgtaagtacctttcattagcaatacctctttggttcattaacttccctgcaaactaatttgagatatctttttgttccttccttaggtcgttaggtcaaacatcgccttgcttaagcgcatttgcagctggacaagccgcggcttacaagatgtttgagacaattgagagaagacctaacatagattcttatagtacaaatggtaaagttttggatgacattaagggagatattgagctcaaagatgtttactttacttacccagcgagacccgatgagcaaatatttcgcggattctctctgtttatctcgagtggtacaacggtggctttagttggacaaagtgggagcgggaaatctactgttgtgagtctgattgagaggttttacgatccacaagctggtgacgttctcatagatggtattaacttaaaagagtttcagctaaaatggattagaagcaagattggacttgtgagtcaagaaccagttttgttcactgcaagcatcaaggataacattgcgtacggcaaagaagacgcaacaaccgaagagattaaagcagctgcagagctagcaaacgcatctaaatttgtggataagctaccacagggtttggatacaatggttggagaacatggtactcagctttccggtggacaaaaacagagaatcgcggtggctagagcaatcttaaaagatccaagaatcttacttttagatgaagctacaagcgcgcttgatgcagaatctgagagagtggttcaagaagcgcttgatagaattatggttaaccggactactgttgtggtcgctcatcggttaagcactgtgcgaaatgcggatatgatcgctgtgatccaccaaggcaagatcgtcgagaaaggtaaactacctaacattcttattcactttttgcatatggatacacatgtgtgatagcaaaatttgatgaacaggttctcacacggaactactaaaggacccggaaggagcttattctcagctgattcgtctacaagaagagaagaaatctgatgagaatgcagcggaggagcaaaagatgtcatcaattgaatcattcaaacaatctagtctgagaaaatcgtctctaggccggtctctaagcaaaggaggatcatccagaggaaacagcagccgccattctttcaatatgtttggttttccagcaggaattgacggaaacgtcgttcaagatcaagaagaggatgatactacacaaccaaaaaccgaaccaaaaaaagtctccattttcagaattgctgctctaaacaaaccagagattccggtgctaatacttggatcaatatccgcagcagcaaatggcgttatccttccaatctttggcatactaatctccagcgtaatcaaagcgtttttccaaccacctaaaaagctaaaagaagatacaagcttctgggcaatcatattcatggttcttggtttcgcatccatcattgcatacccagcacaaaccttcttctttgccatagctggatgtaaactagtgcagaggatcagaagtatgtgttttgagaaagtggttcacatggaagttggatggttcgacgagccagagaattctagtggaaccataggagcaaggctatcagcagatgctgccacaatccgtggtctagttggagactctttggctcagacagttcagaatctttcatctatattggctggtttgatcattgcatttttggcttgttggcaattagctttcgtggtcctcgcgatgctcccgcttatcgcactcaatggatttctttatatgaagttcatgaaaggtttcagcgctgatgcaaaggtaaactagttttttttttttttttttttgctaagataggtaaactagttactacttttcatacatataccaactagattctctcaatcatttgattaacgttactttaaatcattggcagaaaatgtacggggaagcaagccaagtagcgaatgacgcggtagggagcataagaaccgttgcttcattctgtgcagaagacaaggtgatgaacatgtactcaaagaaatgtgaaggtccaatgaagaatgggattcgtcaaggcatagtcagtggtattggtttcggcttctctttcttcgtcctcttctcttcttacgctgccagtttctacgttggagcacgccttgtcgatgatggcaaaacaaccttcgactctgttttcagggtacggaaacaaaacacacaacatgttgatgataaatgccttcccttgagagtttcttgatcccttgtcatgtttaacaatgcaggttttctttgctttgacaatggcggcaatggcgatatctcaatcgagttcgttatctccagattccagcaaagccgatgtagctgctgcctcgattttcgcaataatggacagggaatcaaagattgacccaagtgtggaatcaggaagagtgttggataatg

SEQ ID NO: 11892 - DNA, 3000 bp, Unknown
  misc_feature (1)..( 3000): cDNA_ID_3023300_gDNA_ID_2214521_Annot_ID_184617 3000 nt of promoter + ATG
tcatttcaattcatcaaacttcgttattataatttcatccttcacaaaataacacaacgtgcaagcatagtgtagcttggtttggattgaaccatgtaagcaattagagacatatacgcactagagttgaaaccggcttggttccctcgcttaattcaggtttcgatatttcagtttggaaaaaatgtactaattagttggaaccaattgagttttagagaaatattgaagaaacaaaaaaaaaatcaagagaaaaaggataaaggagagatgttccctaacaacactacaaattacaatttcctcactttcttattttcttactgcctccgcctcctctctgtcccctcttttcttccattattttcatttgcatcttctctttatttctttgcaactttaatcttatgatatgtaaattgtaaatatactcatttttttctatattgaataaaaaaacttttgttagaaaaagatacacatatacgatatttcctcaaaaataatatgaagtactgattttggcagtcattatagaattgcattttattggaaagatacacacatagttcaagtactttatatatgcgctaattttgagaactccactttactgcgtcgtggttgcttgtcagtcaaaacttgggcttgcttttaagatgcgtgattgcatttgcatgtctcgtggctttctttttctgtagcccctcttgttggactaatcatagccttttgtttcctccctttgctttaacattactgaaattatcggattgtttctttcatttgttgattggatgtatgtttacattattacatgtgtattcattgttataatatacaagttttaaaacattacttcccctaccaaataatttcaaatatatatatatatatatatatatattcatgaagcattttttattttattttggtttaatgaagcattaaattttgaacttgcttatgttacttttatgatattggaagaagtcgaattatttcttcgttgatatcgtatataaaatttaaaactcatagaatttctattcaaaaagtaattggtgattaaatgaatggagtgcctatatatgtattttttttttcttgcaatcaattttgatttagaatttgcatgcatgatatttttttaatatttttttatcctttaataatttttttttatattatctaaagttgtatttgtattccttacataaagtttggttactttcatctctaaggtaaactgctaatattaaagaaagtaatttaatggaagcaaaaagtgttaaaatatgtaatataatttgaatggaagagtagcccccgagggcaatcaagtggaggtcttccatggttaggatgcagaagcttaatacgtttatatagatagataaacaatagcctccataaagtaaaagatacttgcatgcgtgcgtgtaggtattgagtcgagatgttacgtgcgtgtctttttatagatactatatattattggttcttctaaatccttaaaaatgttaagattacgcacgcaattcatgaattgtatatagatttaccaaatcttgaattgattttaaatttcttacaaagcaaatacactggtagtgtgacattttgtccctgtggattctgtatgacgtaatctcgttcctcacattatgacacttaatcgagtgtttttttttccctatcattttttttgtaaatttatcctctacaaattatgtatgtttgtgaactattaaatacgatgttgatatatatatatatatatatataaactatataataaataagtgaattattttacgagtatggatcataaataaaacatggaataacaatagaatgtttgttaaatagaactcaaattaatgatcagttatgtacagtccggccttaggcccaggcactacccacttgggccgggcctggttatgtagcatatatataaacgctagtcaccgggatagttggacttggatggctctagcctgacccgtcaaagtttaacggaaacttgacatatgcaaagaccgtctccgtttgaactttgaagcgattgaaattttttgagaggcgaattaaggcgccaaaattttgagaatgataagtagattacgacacatgtactcacctcaatctgacggttacgatgcaatgtaaatacgaagaaatctcagggttaaaatcgtccaaatgttcggcgtcgtgtatacgcaattcagctacagacagtgtttgttacacaccattttgagaaatctaaattttcattttcccccgcttctctcctagaaatttcgaatttctgcttctctctctctctatcagttttctcagatcttattccagttaatattccggcgatcttctttctctctttgatcacttaattcttcaccggaatcagagagtcagggctttcgcacttgtacccgcgagctttgattaggtaatttcttagccaatgataccatcgctcgattttctctgttttcgttttcgattcatggctcgttactctcatattcagtgataagtcgtcgcgatctatgccccctttcgttaaattggtgttatcgtctcgattttgagtttagtaccagcgttatagtgttgtctttgcataatcggagagttttggtatgaaattcgttgctagagatatcacatctcgctagttgttcatcgtttcaagcatctattatctgctgcttctcttgttttcgtcatattatccagatctagcaccttcttattttgggattttctattaccaaattttttatccgagtgttagaaatttaccattcctaatgattaatttatcatccattatcgctgaatatagcctgcgttgtactgctttacttctctgtttgtgttgctattcagaaattatatgagtgattaggtgttcgttgatatttacattctttttcccagcagaattgttaaccttgtggtgatacatttcaggaaaagatg

SEQ ID NO: 11893 - DNA, 3000 bp, Unknown
  misc_feature (1)..( 3000): cDNA_ID_3023308_gDNA_ID_2214521_Annot_ID_184615 3000 nt of promoter + ATG
aaaccaatgaacaaatgaacaacaataagaagaagctaaagtcctccaaaatcgaatttgagagaaatgtttcgaaaagcaacaaatgtgttgaatcatcaacattaattgatgtttctgctaaaggtccaaagaatgttgaagttactacagctcctcctgatgagcaatctgcagctgttggtagatccacggaattgtattttgcttcttcatcgaagttttctcgaggaacttcgagagatctaagttgttgttctttaaagaggaagtatggagatattgaagaagaagaatcaacctatttaagtaatgtaagagaaattaattagctgcttgtcttagttctttcacatggtagatcattaattgtctttttcttattgcttatgcagaattcagatgatgaatcagatgatgcgaagacacaagttcatgcgagaacaagaaagccggtgactaaaagaaaacgaagcacagaagtccataagttatatgaaagagtgagtttatatgtatgaaaatttcaccttagttagtagaaaaaaaataatgtatgaaaattaatgctaattaaggatttgttaacagaaacgaagagatgaattcaacaagaaaatgcgtgctttgcaggacctactaccaaattgttacaaggtttgagattaacttaaatcacattacattgtttacttagtcttagagagttaattaattttctctttgtggagatttctgaatatctgtaattgttgatgataggatgataaggcttcattgttggatgaggctatcaaatatatgcggacccttcaacttcaagttcaggtattcaaaataatacaccaattcaataaaatttcattgagagataataaaatgattcaggtgttaattatttaaacacagacttgtgtttatatttacatataaatttgttttttaacattaaaatatactttgtaaagtgtttttgttatcaaatattattgcgtttggcttttacctttacgaatgattcttgataaagtcactagaaactagtttcataagagaaaccaaaacaaattataaacgtaattaaacactaatcaataaacaatcaaaagtttattccttatttattttactacaaatttttttacatatatataagattcttaattaacatgctctaataattatttacagatgatgagtatgggaaatggattaataagaccacctacgatgttgccaatgggtcattactctcccatgggtctaggaatgcatatgggtgcagcagcaacaccaacatcaataccgcaattcctgcctatgaatgttcaagcaaccggttttccggggatgaacaatgcaccaccacaaatgctaagctttcttaatcacccaagtggactaattccaaacactcctatcttttctccattggaaaattgctctcagccattcgtggtgccttcgtgtgtttctcagactcaggctacttcttttactcaattcccaaagtctgcgtccgcctcaaacttagaagatgcaatgcaatatagaggaagcaacggttttagttattatcgctcgccaaactaatgatttgtagaaagttgatgttttctccaactaactaactttaagcaaaaaaaaatgatcgtctactctgtgttgttagtctatgggcttttgggccttgattcttggaacgatttgaacttaattccaactattttcaaagtggatgtacaaagtaaaatataacaaatataagttatcatagactctataacaaagttataagtagaggacgtgcaattgcataatgatggatgatgatgagtgttcaattacgataaaccgattttaacgcaaacccaactaagatgaagacaactcatttgacctaaatcgtaatttgaaacgaattttgccatgtttttgggattaaggaacaatctcaatgatgagattgagtaaagtactacaaaacttgggcttgatgggctttttagtggactaatatctactttattctttcttttttcaaacattaaaaaattaattgggctttttcaaacacgaaaacaagggagtgcaatagtgtgatgaagatgagactcacacattgaatttctgatattttagcgtcaggtgcgttgaaaacttgaaatcaatgtgaagattctcttttaaaaatagatgactcttatttcatgagttaacatgatacttaaagaaagtggatagttaagtctaaaccaattcttttagtatagaaataaaatttcaaccacttcctttaaatatgaaaccatgcaaaagtagataacaaacgaaaaagtgtttcattttaagattcgatgtcacgatccatcacattgcaccgttggttgataaatatctctcatctttgtttatttattttcacaatgttgtacttctatttctataacattttcgtttgaattcaaataccaaattaactctccaaacaattagttcatcaagtattttgttcacaatgatatgttaacaacaaatcattgattcattgtccatgccggattattttaaagatacagaaacagtaaacctaagatacaatgaatgctaaaactaaattattctcccaaaaggattacttagctttcatgagtaattttatatttttcttttatccactcattttttatatactttctataattgtcttattacgtaacaaatatgtgctataggcatatttagaatctactctatcatcataccatatataagacacattttactttattaattactttttgtttgttctcaaattgaaaataaacagacgtgtttgtgctaacttcatgtagtgtttagatagtgtttcattcactggccatagacttattttacaaagttatatgtgcatgtcattatatagtgtagaacttaaaacacctaaccaagaacaacaatacacacacacaaacataaggaaaaaaaaacttttccatg

SEQ ID NO: 11894 - DNA, 3000 bp, Unknown
  misc_feature (1)..( 3000): cDNA_ID_3023266_gDNA_ID_2214521_Annot_ID_184634 3000 nt of promoter + ATG
atctctttgctgtggttttgataacagaaattattaatcagggctttagaaaccggtttaacaaaatagtacatcttagccgatgaagattcatatactgtagcagcttcaattatgtttggttaaatttggaattgcaaacattttggttaagtttagtatttttgaaatttgttgactttttaaaaagtaaagtaactgacaaaaatacaacattatagttttgggcttaggcccatcaaagcattctttcattaggcagtggcggaaatatttgttatagtggttaattttaatatcactatattataatatttaacttatttatctcacattaaaaactttattattaattaatttaaatattttgagcatttctatttcttttttttaataattattgttttctgataaaaagatttgtagttctagaaatatttcaaaagtgtgaatttgttaatttatcattttctactaaatttttttaatatacttgcgagttaaaactggtttaacatattttcttactcaaatttatttatctaaatgtataaattagtattcatattaccgcatttgtgtataggcgttaatgtagagagttccaccattgatgtgccttcccgtttgaatttaagcgttataaacacattttgtacaatatgtgaagatccttataatcagtttgtgatttattttctttctttgaacgagttctatattgcaaatgagtatgatgaaattaatttgtccaatgaaatttaagacataccaatgttgatgcattttttcaattattttattttcattggacctttttggaatcatatttgttagttgataattctgttaaccaaaagagagtaagcaaagagttgacagaagattcagctagaatgcgcaaagacaaaaagaagcgtcttgagcagaaaaaataaaaaaaggatctggagctgcagatcaaagaccttcaaaataaggttatggattcggcaaagaaggttaatgagctggagctacaaagaaatcaaattgagaaggagaaaaaaaaattgactagatacatgaaaaagttaatgaacataaagttaattatatagtaaacagtgtaacataaattttcagtttattaatagaaaattgagaaaatttatcaagatagactagtgtggggatctatgtcaaaaccataaatgtgaccaagctcttagtaaaatatgttaccatttagataaatatgatttgtttctttgtttgtaatcaacatatattaagataaaacttaaaactacacagatttagtgaaaactttttatatatcattgaaataatgattatctaccttacatagatttctagtgcataatcgcaaatgattcacgtgtataaatattagcctcatgagtcgtgatgtactatcgccctaatataattgctgtgtcctttgaaacctatttaacaatgtcgcaaagcaagtaattgcttaatttctctctttcagtctctcacacacatttaacatttttattaattcgtttacaagttgttgttttttttttaatatataaattattattattattattatttttcattcataaaattccaataatccgaaaaacgttacaagaccaaacggtccagcacagcacgcaggccgaaagagacataaaaacaaaggcccaaacaacacagagagggcccaacaacaaaagagccaaatactgaaaacctgaagcaggccaaacaagcccaagacaaacaaaggaagcccctgcaccttggctcccaacctgcaacaagcacgacaattcgtttacaagttaattacatatctaatgatctactttttctatatttatacagaagaatggatggcaaaatcgtgattataacagggggagccagtgggacaggagccgaatccgctaggttgttcactgaccacggagctcaagtggttgtagttgacttacaagaagagcaaggcaaaacgtcgccgtttcaatcggcaaagacagagcaagtttttaccgttgtgatgttacaaacgagacggaagtagaggacgcgtcattaagttcaccgtcgaaaaacatgggaagctagacgttctgttaagtaacgccggcgtcgttcttttcagccaacccggcgtcttggaaacaccgggaagcatccttgatttgaatcttgaacggtttcaccgaacaatggctgtcaacgttcgtggagcggctgtgtctatcaaacacgccgcacgagccatggtggagaaaggcacacgtggctccatcgtttgtacgaccagtgttacgtcggagatcgtggtcagggacctcatgaatacacggcgtcgaagcatgggctcgtcggactgattaaataggtttgtggtgatttagggaaacatgggattagaataaacggcgtcgcaccgttcgctgtggcgacggggtcacggggatgactagtcacgacgaggagacggcgaagcagacggaggagtattgcgaagccagagggatttttaaaggtgttgtgttaaaggctcgacacgtggcagaagctgctctgtttctcgcttcggatgattcggtttatatcagtggtcagaatttagcagtggacggtggtttttgcgtcgttaagcctatttgaaactaaataaataaataaaatcggttatttacttattaaagtgtgtatatttttttcaaccaaataaaaacattattatataggaacaagtgtcactattatggtgcataattcagaggtcaaaccaattcttgagccattaaaaaagtaaaactcacatggcacgatagagttgacttttaagatacatatacccccatgtataaatatccacacatagctctctcgtagctctatccttcaaattttcataacgtctcaacaatgtctggaaaaaggcaatttcctcatctgattttgtaacctttctgctcaactttatacccatatacataaatg

SEQ ID NO: 11895 - DNA, 3000 bp, Unknown
  misc_feature (1)..( 3000): cDNA_ID_2707769_gDNA_ID_2214521_Annot_ID_184633 3000 nt of
cacacacatttaacatttttattaattcgtttacaagttgttgttttttttttaatatataaattattattattattattatttttcattcataaaattccaataatccgaaaaacgttacaagaccaaacggtccagcacagcacgcaggccgaaagagacataaaaacaaaggcccaaacaacacagagagggcccaacaacaaaagagccaaatactgaaaacctgaagcaggccaaacaagcccaagacaaacaaaggaagcccctgcaccttggctcccaacctgcaacaagcacgacaattcgtttacaagttaattacatatctaatgatctactttttctatatttatacagaagaatggatggcaaaatcgtgattataacagggggagccagtgggacaggagccgaatccgctaggttgttcactgaccacggagctcaagtggttgtagttgacttacaagaagagcaaggcaaaacgtcgccgtttcaatcggcaaagacagagcaagtttttaccgttgtgatgttacaaacgagacggaagtagaggacgcgtcattaagttcaccgtcgaaaaacatgggaagctagacgttctgttaagtaacgccggcgtcgttcttttcagccaacccggcgtcttggaaacaccgggaagcatccttgatttgaatcttgaacggtttcaccgaacaatggctgtcaacgttcgtggagcggctgtgtctatcaaacacgccgcacgagccatggtggagaaaggcacacgtggctccatcgtttgtacgaccagtgttacgtcggagatcgtggtcagggacctcatgaatacacggcgtcgaagcatgggctcgtcggactgattaaataggtttgtggtgatttagggaaacatgggattagaataaacggcgtcgcaccgttcgctgtggcgacggggtcacggggatgactagtcacgacgaggagacggcgaagcagacggaggagtattgcgaagccagagggatttttaaaggtgttgtgttaaaggctcgacacgtggcagaagctgctctgtttctcgcttcggatgattcggtttatatcagtggtcagaatttagcagtggacggtggtttttgcgtcgttaagcctatttgaaactaaataaataaataaaatcggttatttacttattaaagtgtgtatatttttttcaaccaaataaaaacattattatataggaacaagtgtcactattatggtgcataattcagaggtcaaaccaattcttgagccattaaaaaagtaaaactcacatggcacgatagagttgacttttaagatacatatacccccatgtataaatatccacacatagctctctcgtagctctatccttcaaattttcataacgtctcaacaatgtctggaaaaaggcaatttcctcatctgattttgtaacctttctgctcaactttatacccatatacataaatgtgtgtttctaatgatttgttttttttttccagattggatggcaaaatcgtaattattactggcggagcaagcgggattggggctgagtccgttcgattatttaccgaacacggcgctcgagtcgtgatcgttgatgtacaggatgagctcggtcaaaacgttgcagtttcgatcggtgaagacaaagcgagttactatcattgcgatgtcacgaacgagacggaagttgaaaacgccgttaagttcaccgtcgaaaaatatgggaagcttgacgttctgtttagtaacgccggcgtaatagagccgtttgtgagcatcctcgacttaaacctcaacgagttagaccgaacgatcgccattaacctccgcggcacagccgcattcatcaagcatgctgcacgtgccatggtggagaaaggcatccgcggctccatcgtttgcaccactagcgtcgcggctgagatcgctggcacggcaccacacgggtaaaaactaatattcacaacaaagactttttaattctttagacaaaccaaaagtgcactaactaatttcgttttcaaaaccatgtaataataaatagtggatcgctgcaacggagtattataattaaaagaataacaaagtgatcatgttgtcacgatttattgacaataattttttatcgttaaaattcaaaatagaatgaattgcttactaataatataggtacacgacgtcgaagcatgggctgttgggtttgatcaaatcggcttctggtggattaggaaaatatggtataagagtaaacggcgttgctccatttggtgtcgcaacaccgttagtttgtaatggtttcaagatggaaccaaacgtggtggagcagaacacgtcagcttcggcgaatctaaagggcattgtattgaaagctcgtcacgtggcagaagctgctctgtttttagcgtccgatgagtcggcttacgttagcggacagaacctggctgttgacggtggttactcggtggtgaagccgtagctataacaacttggccacaaagatcccatgatggaatattggaattttgtttttttggtcaaaagttgacttgacttaattgttgtagaggcatggggattgagaagtttctgaggttgcaaatttccttgaaatgtggatgttgtatttttatatggtaacattcattatccaacatattgcacatctcgaggataatttatttaaacaaatactacaagcttatttgataaatcgtctttctagtctctctattttgactatgggttttgaattttgatatttcagtgaagaatcctaaccatttagtactaatttacacgttatagtttcaaaataattgattaaaaaacaaaataggaaaaaaaaaattgattaatataaagtctacgataaatacagagaacggagcatatctagtcgctctttcaggtctacttgacttataattaatctgtctctctgtctacttttgaaatccttcaaaaatg

SEQ ID NO: 11896 - DNA, 3000 bp, Unknown
  misc_feature (1)..( 3000): cDNA_ID_3023273_gDNA_ID_2214521_Annot_ID_184631 3000 nt of promoter + ATG
tagagtcaacggcgttgcaccatacgcggtggcgacggcgataaatagccgtgacgaggaaacggtgaggatggtggaggaatatagcgcagccacggggattctcaaaggtgtggtgcttaaggctcgccatgtggcagaggcggctttgtttctggcttcggatgattcggcttacgttagcggtcagaatctggctgttgacgggggttatagcgtcgttaagcccatttgaaggagagaatattctataaatcaacacttattaacgccttaatattttactttcaacgagcttttcacgccattatctttttttttttttttttgggtcaaatcacaccatggaataatcgcctataacgttacgtaagcaattacgtatgtactatagttaattcggataaataagggtaacgttattaatacttactattaaagtttctttacttgtaatttactgcaaaaaacaattgttggcttaatggttattaattacaaagtatcagtccacaatcacatcaaagaatttgtcgggacaagaaacagaagagttgacgaagagaagtcaagaagaagaagagtcgtcgaaaaagaaaagtcaaaaagacacacaaatatcttgggcttggcttcatcaccaaataaagaaaaagccgacaaaagtccagaggcccattaacagctcaagcccaagatcagattcaaaaacacaaacaaagatttcagaaactcaatcaaaaacttcctcctgtacaaattacaatgcaaccgttatcaagttcttttttttctttgatccttaaataatgatgataagattgaaagtctcagatcatggttgcataacattagtctataaaaggaaacataagatgtaatcaaaatcataaagttgtcatctttaccgttatcttatccttttcattttctcttcacaaagaagataaaactagaagtactaccatcaagttgtaccaattaggcgtggagccatggaaaatatgcgtgtaaaaacatcgcagatatggatggacatgtgttgtttcaatggtagacacaattagttttttgaaaaaatggcatttggaaattgggatgtcactgttgagtaactttatataccggaaaacttactattttttcccaaactcatctaaattatatctaatttatatgtctttatcaactcaaaactatgaattaaaagtatgatggaaatgaatccaggcataaaatatttacttcacatgagtagcaaatagaaatatagatttgggatatttttttggttgggttaaaggttgatgtcctcatgtggatatcaatttgttacttaaacacaaacactggttaaatttagactgttataggatatcaattcgtggttagcggagttaattattgtttcttttacacatgtcaacaccgtgtttaatcttagttcaaatctcaaaatgtgtgggtaagttatagctagaccacaagaagaataaaaaggacaggaaaaatcaagaaaacgtggagtaaagtggtaaaagcaataaaatgtgaaatgcaactcttgggttataaattaagtgtacacatatactcagtcgacattttatctcagtttgtatacctttcgacacatcaatgtcgggactcaggcaattgctttatctctctataaacaattgtgcatgtatcttacatacaaatgttgatcagttcaataattacttgtccatgcagtagattggaaggcaagatcgtaattataacaggcggagccagcgggattggagccgacgccgctaggctgttcacggaccacggagctaaggtggttatagttgacgtacaagaagaactaggccaaaacgtcgcagttttgatcgggaaagacaaagctagtttttaccgttgcgatgtgacaaatgagacggaagtcgaggacgcagttaagttcaccgtcgaaaaacacggaaagctagacgttctgtttagcaacgccggagtcttggaaccactggaaagcttcctcgactttgacctcgaacggtttgaccgcataatggctgttaacgttcgcggtgcagctgcgtttatcaaacacgcggcacgagccatggtggagaaaggcacgcgtggctccatcgtttgtacgacgagcgtctcggcggagatcggtggggggcatcatggttacacggcgtctaaacacgggcttgtcggcctgattagatcggcctgtggtgatttggggaagtatgggattagagtcaatggagtcgcaccgtacgcggtggcaacgccaatgactagccacgacgaggtaacgggaaagcagttggaggattattttgacgccaagggaattctcaaggggatggtgcttaaagctagccacgttgcacaagtggctctgttcttggcttctgatgattcggcttatataagtggtcagaatttggcggtggatggtggttatactgtcgttaagccaagccgtgattaaaactacaatcaaaatcgggactttttacattttgaagaataaatgtggtattaactattaagaaacatataagcaacagtatgtatgtaaactgtaatacattaattttgaataaagcaagtcaaaatatataattttaacttacaatattgaaatcgttaaaaatgcttatatcctattttgtgtgtagtttccccctataaatctttgttttcccattttattttgttaatattgaccttgatatttttggacttctctttcatttattttatcaactcttaattttaaaattattcatgattcatgttttcatgtacatgcatctataagttatctaactgtcaatttacacgagtaacaaacgatcacaacagctggtcgtctcgctttaaaaacaacccacctgccgaaaattccactccatgcataaacaaaccactttatttttttagaactaatcaaatgataaaaaaatttgtagttagtaaatcatg

SEQ ID NO: 11897 - DNA, 3000 bp, Unknown
  misc_feature (1)..( 3000): cDNA_ID_3023281_gDNA_ID_2214521_Annot_ID_184628 3000 nt of promoter + ATG
aagaaagtatccgtgaattcccatcaacacagtagccaagaagttgaacaaagttatcatgtttaagcctagaaaccatggaaacctacaagcagtgtcaaaatttcccaagttcttaaacacaaaaaaagtgagacatttatgtgaccataacacagtagtaacagaaaaccacacaaaacctgagcaaggaattcattgtcaggctgtttgttagaatccaactttttaatcgctgaaggcagatcattgtttaataccccgtagtatactcttccataagagccttcaccgatgagagaattcgatccaaaatcatcagttgcttctttgagttcactaaaagggataataggtacttcaataggctgcaacttcacaactggaggacccttctgtgcagtttcagaggcttggtggtgccttgcatcatttccttcacaccaaaaccaaaactccaatgaggaaacaggaaacaagtaaagtcttgattttttggatagcaagatccaactttgatacctggaggaaagtgtttggcttggttatgacgacctccataatcagcagttttatgcatatcatcatcctccccacaacacccaaagcaactcattttctttaaagaatcaaaattggagttcaaaatggaaaagagaagagcataaaaacggaaaatcagtcgaaatcgagaagagaggaacgaaatagaaataatctggggaaaaaggttttacctttgggggatccaacaacacggagtgaaacggaatgtgcaaaatgttctggagaattattagagagagtgaagaagaacaaatgacaatcaatgtcttgagcttaattagagagaaattataggtacgagtgattagctctcccaagtttgactggattttcaacgccagcgtgtcgacattaacaccgttggattatttgacaatgacccaaaatccaacgaccagattgccacatcgttttatttcattttgtttttgtcttacatgatataataattacaatcataataattttcttaaatgacgctttctatatggagtattttcctttgtttgttaattagtgccatatcttttagatataaaactattaactatgacttggtaattaatacgtatagtcaaatactaggcatcctacgttacgtttctatgcatttttttatataaaagtgtaagaaccaatactagcttaaaaggaaacgagtagaatttcgtaatgaaaaaagacttcaaatgttaccttttaaattcagtttatgtttccgcgttaccttttgaaatctcgttgctttcgtacgaaaaagacaagaaaatagaaataaattagaaagggtggtttggtgagtaatgggtcgtatatgtgggagtcgttatcgtgcatgtgaacaaaatatggccatgttcgagacgaatcatggtgtcttttaatttggtgactacattattttaacactaatcaatatctttctcgaaccatatgatcatgattagccgtttctatattttctcttttaaatagattatatatgggaattattagccggaactttgccgctgcggttggtaataccttttaatacacttatgatttgtctctttattcggttcctaattcagtatacatattggggcttgagtttgaacggaaggtatatcaatgtcataccaccaataataatcagcatcatgcatggtttttaaaatgtggaataatatatacttttaaggacgataatgagattatataattgaaaggaattagatccattgagattctaaagctaccaagacgaggaacatggaagacgtggcgcattggattcttcgttcgagtttatcatcatatcatgtgactggtctctctttctttgtactcacactaacaaaacaaaatgttaatatcccacgttaaattaaatgattagaggccatcaaaggataaaaacaagaaaccaaatctaatatactattttataataaaaaattaaaagcgggtttatgtaagtgggccaaataaaaagagtgggccaagaaagcccagaccataatgaccacatggagaccgaaaggttgacccaattagaaaacttgttatatctttaggagtcaaagtcaaagcgcgtttacaaacaccgacactttctttgtcaactagcggttaccgcggttgttcactaggcacggaacactcgatttcttcccaagaagtcgcaaccaacacttactatgtatggtacatcacaacatagacaataaaaactcttggaatgttccgcgaaacaggtgattattgactaccatgagtggggaaatgtggggtaagttaacaagtacactgcttcacatgggaaaaagaaaaatgagatacacataattcacaaaatataatttttatcttagacaatttttttaaaataatattaaaatcagtgtagaagtggtccccaccactattttgtttttccttaaaattaattattatttttgctggactaaataaaattggtttttttttttctctctctgtcctaactctttttctttctctgttttgtatctctctctctctctcactctttgtctctcccctaacctttattgtactagcataaccattaccatacatactcttctctatcacgccacaaacgcagattcatcacatcttcttcttgttcatagcatctccatcactattgggctctcttcaaaggtgtatttctggggttacttattccttctttgtattgattagtgttgaaaaggtgtctctgttgcgttcaagagctagctttagggctatatattaagaggtttccagaggttttttttggattataggcatctgtgtttggcttacatggatcctttttttaaggttttctgggcaagactaattgattaggaccaaagtttgtgtttttatttgtttggatctacaaagatcaattaggctgttgttgaattggatcgagtg

SEQ ID NO: 11898 - DNA, 3000 bp, Unknown
  misc_feature (1)..( 3000): cDNA_ID_1808200_gDNA_ID_2214521_Annot_ID_184627 3000 nt of promoter + ATG
ttttcctccgacgtttattatggccagccaaacgtctacgacaacttctctttccttcatcaaactcctgaagaagatggaacctgcaagagagaagaagaagaataaagttggattcattttttgttgttgggaaagagagagagagagagacatacctactacattgctgacaaaagcgctgcaagatacctccgacagtggcactagtagccttggaatgcatctcacagaccttatggcgtctatgataatccttaactttactaagatcagcttcacagttttcgacctgacaaacggctccggatttggtcttcttggcaggaaaaaggccatcactttcaccattaagattcaaagtaagagcaccattagtgtctccttgaatggcaacagctctcctcttcttgtcattgccttcatcagagcaggaggaggagctattggacgagtttcctagagggaaaaactgacgtcccctagtagtttgggtggcgagaaagagatcaccatcccatttccaatcattcaaatcccactccacacttcttttacctacggacccatagaattgttgagcctccccaccttcatcaattctagcttccatcactcgatccaattcaacaacagcctaattgatctttgtagatccaaacaaataaaaacacaaactttggtcctaatcaattagtcttgcccagaaaaccttaaaaaaaggatccatgtaagccaaacacagatgcctataatccaaaaaaaacctctggaaacctcttaatatatagccctaaagctagctcttgaacgcaacagagacaccttttcaacactaatcaatacaaagaaggaataagtaaccccagaaatacacctttgaagagagcccaatagtgatggagatgctatgaacaagaagaagatgtgatgaatctgcgtttgtggcgtgatagagaagagtatgtatggtaatggttatgctagtacaataaaggttaggggagagacaaagagtgagagagagagagagatacaaaacagagaaagaaaaagagttaggacagagagagaaaaaaaaaaaccaattttatttagtccagcaaaaataataattaattttaaggaaaaacaaaatagtggtggggaccacttctacactgattttaatattattttaaaaaaattgtctaagataaaaattatattttgtgaattatgtgtatctcatttttctttttcccatgtgaagcagtgtacttgttaacttaccccacatttccccactcatggtagtcaataatcacctgtttcgcggaacattccaagagtttttattgtctatgttgtgatgtaccatacatagtaagtgttggttgcgacttcttgggaagaaatcgagtgttccgtgcctagtgaacaaccgcggtaaccgctagttgacaaagaaagtgtcggtgtttgtaaacgcgctttgactttgactcctaaagatataacaagttttctaattgggtcaacctttcggtctccatgtggtcattatggtctgggctttcttggcccactctttttatttggcccacttacataaacccgcttttaattttttattataaaatagtatattagatttggtttcttgtttttatcctttgatggcctctaatcatttaatttaacgtgggatattaacattttgttttgttagtgtgagtacaaagaaagagagaccagtcacatgatatgatgataaactcgaacgaagaatccaatgcgccacgtcttccatgttcctcgtcttggtagctttagaatctcaatggatctaattcctttcaattatataatctcattatcgtccttaaaagtatatattattccacattttaaaaaccatgcatgatgctgattattattggtggtatgacattgatataccttccgttcaaactcaagccccaatatgtatactgaattaggaaccgaataaagagacaaatcataagtgtattaaaaggtattaccaaccgcagcggcaaagttccggctaataattcccatatataatctatttaaaagagaaaatatagaaacggctaatcatgatcatatggttcgagaaagatattgattagtgttaaaataatgtagtcaccaaattaaaagacaccatgattcgtctcgaacatggccatattttgttcacatgcacgataacgactcccacatatacgacccattactcaccaaaccaccctttctaatttatttctattttcttgtctttttcgtacgaaagcaacgagatttcaaaaggtaacgcggaaacataaactgaatttaaaaggtaacatttgaagtcttttttcattacgaaattctactcgtttccttttaagctagtattggttcttacacttttatataaaaaaatgcatagaaacgtaacgtaggatgcctagtatttgactatacgtattaattaccaagtcatagttaatagttttatatctaaaagatatggcactaattaacaaacaaaggaaaatactccatatagaaagcgtcatttaagaaaattattatgattgtaattattatatcatgtaagacaaaaacaaaatgaaataaaacgatgtggcaatctggtcgttggattttgggtcattgtcaaataatccaacggtgttaatgtcgacacgctggcgttgaaaatccagtcaaacttgggagagctaatcactcgtacctataatttctctctaattaagctcaagacattgattgtcatttgttcttcttcactctctctaataattctccagaacattttgcacattccgtttcactccgtgttgttggatcccccaaaggtaaaacctttttccccagattatttctatttcgttcctctcttctcgatttcgactgattttccgtttttatgctcttctcttttccattttgaactccaattttgattctttaaagaaaatg

SEQ ID NO: 11899 - DNA, 690 bp, Unknown; identical to SEQ ID NO: 11872
  misc_feature (1)..( 690): cDNA_ID_2711335_gDNA_ID_2214521_Annot_ID_184601 3000 nt of promoter + ATG

SEQ ID NO: 11900 - DNA, 3000 bp, Unknown; identical to SEQ ID NO: 11879
  misc_feature (1)..( 3000): cDNA_ID_2711331_gDNA_ID_2214521_Annot_ID_134061 3000 nt of promoter + ATG

SEQ ID NO: 11901 - DNA, 3000 bp, Unknown; identical to SEQ ID NO: 11878
  misc_feature (1)..( 3000): cDNA_ID_2707751_gDNA_ID_2214521_Annot_ID_134063 3000 nt of promoter + ATG

SEQ ID NO: 11902 - DNA, 3000 bp, Unknown; identical to SEQ ID NO: 11893
  misc_feature (1)..( 3000): cDNA_ID_2707755_gDNA_ID_2214521_Annot_ID_134064 3000 nt of promoter + ATG

SEQ ID NO: 11903 - DNA, 3000 bp, Unknown; identical to SEQ ID NO: 11890
  misc_feature (1)..( 3000): cDNA_ID_2707803_gDNA_ID_2214521_Annot_ID_134068 3000 nt of promoter + ATG

SEQ ID NO: 11904 - DNA, 3000 bp, Unknown; identical to SEQ ID NO: 11889
  misc_feature (1)..( 3000): cDNA_ID_2707761_gDNA_ID_2214521_Annot_ID_134069 3000 nt of promoter + ATG

SEQ ID NO: 11905 - DNA, 3000 bp, Unknown
  misc_feature (1)..( 3000): cDNA_ID_2707807_gDNA_ID_2214521_Annot_ID_134070 3000 nt of promoter + ATG
gggattcaagaacaccgccggtccaatgggacaccaagccgcggctatccgagtgaacggagaccgtgccgtgatcttcaactgcagattcgacggttatcaagacacattgtacgttaacaacggtcgtcagttctacagaaactgtgtggtctcgggaacagtagacttcatcttcggcaaatccgcaaccgtgatccaaaacacactaattgttgtccgtaaaggaagcaagggacaatacaacacggtcacagccgatggaaacgaattgggcttagggatgaaaattggtatcgtcctccaaaactgccgcatcgtgcccgacaggaaactaacgccagagagacttacggtggcgacatacttgggaaggccgtggaagaaattctcgaccaccgtgataatgagcaccgagatgggagatttgattagaccagaagggtggaagatttgggatggggaaagtttccacaagtcatgtaggtacgttgagtacaacaaccgtggaccaggagcattcgctaacagaagagttaactgggctaaggttgccaggtctgcagctgaggtcaatggcttcacagctgctaactggttaggtcctattaactggattcaagaagccaatgttcctgtcacaattggattataatttataaagcgtatatgaaaattattttagtttttaagtatatgaaaattggtgtatgaaattggtttatgaaaactttttaagaaagtctataatgtttttcctctgttaatttgcttcatctaattaaggtcatattgcaatgcagacaagtactcatgttgctttattataagttccttcttactgagtctatatgtttttcctctgttttcttcatcttgttttttttataacaaatcctcggttttcttaaagaagagaaaactaaagtaatgacaataataaaagtgttttctatgtgttttaacttcttataaacttttcatcgaacgaggaaaaagaattagattatcctttggtacagataatggaacaagcttcatgcccatataccataggcctacatcagggaaatattcaatatcaaaccattacgccaagttttaaaaaacactttatcatttaaaatttcatataagttttgtttatttgaaaatttagaacctcattttttggaaattattttagtttgaagtatcagccacatattttattttctattgtttgtcaatttctaattcattgaaattattatggacatgactattttagggaagttttaaaggcttattggcaaagtagacactttttcaaaaataatttgtaaagtaggtagttttttttttaaattagagaaatagatactttttttgctttttgtgagatagagaatttgtctaatagactaaaaaacaaaatacatatcaaatactaaaataccctttatcttgagagagaataaaaattatatgaagaaccatttttattttattttgtttgtctttatctttttatttttttattttagtattcttaaatacttaaaaaaattaaatattatttttttaaaaaaattacattaacttttagactatttatctgtcatcattataatgcacaaacatttaaaacatcgttttgtacactaaccattattcgttggtgtacaagtgtgtacaccgatatttcataaatcatcaccgacttctcttatacttattaatataagtaatattgttttaatattttacaaacataatgattgtataaaccaaatattattattcaatataatggtgtacatgatggtgtatataattaagttactcttaataatgtacaaaatgattgaaactattatgacgattggtggatagaatgatatatacaacttttaaatgataacatacaagattggtagacaaagtgtacaaaacttggtgtacacttatagagaatgtataaatcattattttaattagtggtgtacatcatctcgtacaccaatgttagtacattgtctcatagatttttaaaggtgtacgattatgtacaccatatttttcatcatctatgtacatcattttgtacactgttatactcagtgtatcattttctacatcagtaattatattaatttttacgttattgttgtatattactattagtacaccaattttaacaatatcacgtacaccgtcggctgagtttaaataaaaattgctacatatttttgaaatagcaaaattagactttttaaattcacataaaaattttaaaaactaatatgattatgtggtaaaattttatgaagaaatatcatcaaataaagtaaaaatatttaagtaaaaataaaaaataggatttgacttgaattttgtctttatcttactaaataacaaaataacaaaaggttatataagtcatttagtaaaatctttattaaacaaaaagtattattagataaaaaagagaaaaatgtctatttctcatatttctaaaaaaattacatactttacaaattatttatagaaaaagtgtctattttccaacttatctcaacttttaatttcaaatttcaaatatatagacgccagaacgaaatgacgaaaataccctaattaagatttggaactgcaaatttaccaaaaccctcgttttatcttttctcgacggcgacgagagaagccgccgtcacgagctccggcaaaagttctttcatcttcaccgttcggtctgaaacttaaccagacagatcgaaagagaattcgaaaacttgtgctaaaaaaaacatgagggtgttaattcggccaaatttcttgagcaatctgattcgatattgctctagaggtacgcattcacacgatcgtagcctgcgatcggttctctcgtcaaatatgattcgtctgtacaccaccggtacgtaaatatgatctgaataaacattgcattggattatagtttagtatttgattgaattgagatgtataatgacaggaatg

SEQ ID NO: 11906 - DNA, 3000 bp, Unknown; identical to SEQ ID NO: 11887
  misc_feature (1)..( 3000): cDNA_ID_3023285_gDNA_ID_2214521_Annot_ID_134071 3000 nt of promoter + ATG

SEQ ID NO: 11907 - DNA, 3000 bp, Unknown; identical to SEQ ID NO: 11886
  misc_feature (1)..( 3000): cDNA_ID_1808366_gDNA_ID_2214521_Annot_ID_134072 3000 nt of promoter + ATG

SEQ ID NO: 11908 - DNA, 3000 bp, Unknown; identical to SEQ ID NO: 11898
  misc_feature (1)..( 3000): cDNA_ID_1808200_gDNA_ID_2214521_Annot_ID_134074 3000 nt of promoter + ATG

SEQ ID NO: 11909 - DNA, 3000 bp, Unknown
  misc_feature (1)..( 3000): cDNA_ID_2707815_gDNA_ID_2214521_Annot_ID_134076 3000 nt of promoter + ATG
aaaggttgacccaattagaaaacttgttatatctttaggagtcaaagtcaaagcgcgtttacaaacaccgacactttctttgtcaactagcggttaccgcggttgttcactaggcacggaacactcgatttcttcccaagaagtcgcaaccaacacttactatgtatggtacatcacaacatagacaataaaaactcttggaatgttccgcgaaacaggtgattattgactaccatgagtggggaaatgtggggtaagttaacaagtacactgcttcacatgggaaaaagaaaaatgagatacacataattcacaaaatataatttttatcttagacaatttttttaaaataatattaaaatcagtgtagaagtggtccccaccactattttgtttttccttaaaattaattattatttttgctggactaaataaaattggtttttttttttctctctctgtcctaactctttttctttctctgttttgtatctctctctctctctcactctttgtctctcccctaacctttattgtactagcataaccattaccatacatactcttctctatcacgccacaaacgcagattcatcacatcttcttcttgttcatagcatctccatcactattgggctctcttcaaaggtgtatttctggggttacttattccttctttgtattgattagtgttgaaaaggtgtctctgttgcgttcaagagctagctttagggctatatattaagaggtttccagaggttttttttggattataggcatctgtgtttggcttacatggatcctttttttaaggttttctgggcaagactaattgattaggaccaaagtttgtgtttttatttgtttggatctacaaagatcaattaggctgttgttgaattggatcgagtgatggaagctagaattgatgaaggtggggaggctcaacaattctatgggtccgtaggtaaaagaagtgtggagtgggatttgaatgattggaaatgggatggtgatctctttctcgccacccaaactactaggggacgtcagtttttccctctaggaaactcgtccaatagctcctcctcctgctctgatgaaggcaatgacaagaagaggagagctgttgccattcaaggagacactaatggtgctcttactttgaatcttaatggtgaaagtgatggcctttttcctgccaagaagaccaaatccggagccgtttgtcaggtcgaaaactgtgaagctgatcttagtaaagttaaggattatcatagacgccataaggtctgtgagatgcattccaaggctactagtgccactgtcggaggtatcttgcagcgcttttgtcagcaatgtagtaggtatgtctctctctctctctctttcccaacaacaaaaaatgaatccaactttattcttcttcttctctcttgcaggttccatcttcttcaggagtttgatgaaggaaagagaagttgtcgtagacgtttggctggccataataaacgtcggaggaaaacaaatcccgaacctggcgctaacgggaatcctagtgatgatcactcaagcaactatctcttgattactctcttgaagatactctccaatatgcatagtatggtgttttactctgctcatctctatgttgtcttaaagtttgtatcagctgctaaatttctatccctttgcagaccataccggtgatcaagatttgatgtctcatcttctgaagagcctcgtaagccatgctggcgaacagttagggaaaaacttagttgaacttcttctacaaggaggaggatctcaaggttccttaaatattggaaactcggctttgcttgggattgagcaagctcctcaagaggagttaaagcaattttcggctcggcaagatgggacagctaccgagaacagatcagaaaaacaagtcaaaatgaatgattttgatttgaatgatatctatatagactcagatgacacagacgtcgaaagatctcctcctccaacgaatccagcgaccagttctcttgattatccttcatggatacatcagtctagtccgcctcagacaagtaggaattcagattcagcatctgaccagtcaccctcaagttctagtgaagatgctcaggtatgtatattcttacctcatccattccattattttctggatctcttagcctgctgatattttcctgtgaccttttcgtaatttgttatgattccatctcagatgcgcacaggccggattgtgttcaaactatttgggaaagagccaaatgaatttcctattgtcttacgaggacaggtattggtctgcttgattattctcaagttcttactttgtgatgttggaagttaaactgatgtgctagtttctcgatatacagattcttgactggttatcgcatagtccaactgacatggagagctacataagacctggctgtatcgtattgaccatctatcttcgtcaagctgaaactgcttgggaagaagtaagctaaacttcctctcccctctttgacaatactcgtctttataaagttccagactcctcaagggtttttattttgcttggcagctttcagacgatctgggttttagcttagggaagcttctagatctctccgatgatcccttgtggacaactggatggatttatgttagggtgcagaaccaacttgcatttgtatataacggttagttttgagaatactttcaccttgtgaatacctctctggatttctcagtatttatcgtcaatccggggttgcaggtcaggttgtcgttgacacttcattgtctctaaaaagtcgtgattatagtcacatcattagcgttaaaccgcttgctatagctgcaacggagaaggctcaatttacagttaaaggcatgaatctccgtcagcgtggcacaaggttttgttccgtttttctttttaatgaaattttggccttccttgtcttaattttcttcttctttgatgtctaa

SEQ ID NO: 11910 - DNA, 3000 bp, Unknown
  misc_feature (1)..( 3000): cDNA_ID_2711325_gDNA_ID_2214521_Annot_ID_134077 3000 nt of promoter + ATG
acatataagcaacagtatgtatgtaaactgtaatacattaattttgaataaagcaagtcaaaatatataattttaacttacaatattgaaatcgttaaaaatgcttatatcctattttgtgtgtagtttccccctataaatctttgttttcccattttattttgttaatattgaccttgatatttttggacttctctttcatttattttatcaactcttaattttaaaattattcatgattcatgttttcatgtacatgcatctataagttatctaactgtcaatttacacgagtaacaaacgatcacaacagctggtcgtctcgctttaaaaacaacccacctgccgaaaattccactccatgcataaacaaaccactttatttttttagaactaatcaaatgataaaaaaatttgtagttagtaaatcatggcattgatcgtttattggtatgacttcatctgctttgcgatagttgcggctgcaatcgtcacgtccttgtggtttctatcccgcagagacagaggctgcgtagtaattgatgatacgtcccacgatagcttgttaccactttatagatcgaacaaccgtggttcggctcggttatgggccagttgctggacaagattacatcccggctggctactctttactcgttccacctcttttctctccatggctgctttattggcttgggatgtcatcaagtgggacgcaagcatcttcgtctattacacagagtgatctttcttcttttagtgttctaagccaaaattctgaatgtaatcagatccgcattgttcatgactaatgttatttggttttgtaacagatggaccttcatgcttgtgatcatctactttgcggtacgtcgtaacagcttttcgaataagagtgttaaatccgggtattgtttatgttcattgggttctctgcagatgggtattgtagcttcagtatatggttgtttgatacatttaaaggagctaacacttgaaactgatgaagatgtggtagtagaaaaggtcggagatgagttccggcgaagattagaggtttgtggttgtttcatgcagacaatttttcaggttagtgtcaacagtcacggagtcccaattttttgcttcatacacactttcacacagtaactcttctgtctggtttgtgttaaagacaagtgcaggggctgtagtgctgacggacattgtgttttggttagttatagttcctttcctatcgactactcgctttgggttaaacacggtaagaacgaacatttcagcctatgtttaacaatgaaactactcaagactctactaatcgaatttatgatttgatgcagttgacgatctgcatgcacacggcaaatgcaggcttcctcctgcttgaaacactcctcaatagccttgtaagcaaaaatgaagttaaccaagacaatagattttaagaaaagagcctaaagaaattcgtttgttctgatttcagccattcccttggtttcgaatgggatatttcgtgctatggagttgtctctatgttatattccaatggatcatccacgcatgtggcttcacttggtaagcaataacgacttacattgatgatacttaacccacaacttagcgcaaccaacctattctaatcaactcgaacctatctcaggtggccatatccgttcctcgagctagacaagccatgggctccgatatggtaaccatcctcattaattctatctaatcaactttataatcgttttaaagatttgacggattgtgattatacactaacaaaacaacatattcacaggtacctatgcatggcaattgttcatatcccttgctatggagcttatgccgcaatagtaaaagccaagaactcctgtttcccatatctattcccaaatgctcttgtaacttagattagattgtgtgaactataaatcaatcatgcaataagatttgaaagtaattcaaataaagagcataaaaatatccataagaaaaacctagatatgaaattcaaacaagttcaacataagatccacaacatccaaaaacaacttccaaattccaaaaaaaaagcagtattcaattcaaaatgatagagatcgagatgaaaatcattcctgagctccttctttctggtaaacgtaggtgagaccacacttaccacagtagtgacgatcgaaatgactcgccatgaaagtcccagcaccacaggttgcgttagggcactccttcctcaaacgctgaaccttacctgaaccatcaaccttgtagaactgaagaacagcgagcttgaccttcttgtgcttgtgcttgatcttcttaggcttggtgtaggtcttcttcttcctcttcttagcacctccacggagacgaaggacaaggtgaagcgttgattccttctggatgttgtaatcggctaaggtacgtccgtcttcgagctgctttccggcgaaaatcaatcgctgctggtccggtgggattccttccttgtcttggatcttggccttgacattgtcgatggtgtcagaggactcgacctcgagagtgatcgtcttccccgttagggttttcacgaagatctgcatctttttttgcttttacggcggaagaaaatttctggggaaactctttaagtggtgagaagaaataaaagagtagtggttgagaaactagggttttggagctcgcttttacaattacgtaattacccctttgaaaatgggttttattaattacattgggcttcaaaggccttttaacgaatctcagaaaattaaaaaatgagttggagatgcgggggatcgaaccccgtgcctctcgcatgcaaagcgagcgctctaccatttgagctacatccccaatatgtttacttgtgtctgaattaaaataataataggattgttgttccttcgtctcttttctcttataagtggcctgttgcaatctctctctgggtttctcctgagaaaatcgttggagttagaaaccatg

SEQ ID NO: 11911 - DNA, 3000 bp, Unknown; identical to SEQ ID NO: 11895
  misc_feature (1)..( 3000): cDNA_ID_2707769_gDNA_ID_2214521_Annot_ID_134080 3000 nt of promoter + ATG

SEQ ID NO: 11912 - DNA, 3000 bp, Unknown; identical to SEQ ID NO: 11894
  misc_feature (1)..( 3000): cDNA_ID_2707773_gDNA_ID_2214521_Annot_ID_134081 3000 nt of promoter + ATG

SEQ ID NO: 11913 - DNA, 3000 bp, Unknown
  misc_feature (1)..( 3000): cDNA_ID_2707876_gDNA_ID_2214522_Annot_ID_134083 3000 nt of promoter + ATG
atttaaaaaatagtaaggttgcggttgtgcacgcaccttagaacttgaataagttctccattttccgctggtacttgagaaaagactgcaattcgcttttcaattgcctaataatagcaaacgaaaaggaatataatttacaaaattgtaaagttgatcaaaatggcacgcctttaaaagatatgagagagtgacttacctgtattattggataacttctttctacatgagttagaaacattccggagcttgtcctcacgtcacttttaactccctaagcaagaagaaagtgataagaaaatggaagagtatggttaagactttgaaagcataactagaatatgtctactatggaagagaatgaattagactttgcaggcaaacctagagcgtttctatttgtgtccaatgtttgattgaaacaactgaacaatcgaaggcagagagtggatgtaatagaaattttacttcttctacagaactaaaaggaaggtattgtccaatacctttccggtttttacatcaacaacagtggaaacttgaaggcgaggccgggcgattgcttttaggtattcacattcctgcaaatatacatatcaggagaaacaagaaaactattttaatgggaagacaaaaaacagccaaaagctcttttgctaattcttatgataatacttagaactgagcctaagattttgcttttctatcaaatcttagcttatccttgctagaataaagatgatatgaacaagttttttctctacttaaaggcctaacatcagcaagaacagactattctacaatcagctaactcaatgaactagaatttattagtggggggtgtatatacctccggactgagaaagtcatgaagcacaataattcgaggggaccaactgactacttcaggcttgacctgcactaaagaaaataaacattagctggaagcacacaaaacggacctagatttacagaagtaaaacaaaaaacgatacatgtgtgtgtaattttcatagtttcacaaagagatagtatatttaagaaatgtgtccgtactacaaacaatttaatttttctcctccatgtaccaattcttcaactgtagaggtatataaatgaaatttttaggcaaccataggccctaagaaaaaaaaacaactgcaaaatggatacgatatacttacattgccaatccgtaacaattctgcatctttgtcatttgcccaccgggagacatctgaaaataaacaagtcttgccattaatcgattcggtatcataacatgtccacaaatcaagctctataagaagagtcttgtcataaagccgagattcaaatagttagaaagagactattatgttaacaacctaaatgcaagcatagttttggatagaaatgatcacaccaacctcgtagatagcgggtgttctgtcctcgaagtcctcttagagacggaaatccagttcctgaataagaaggagaaagaatttagaaatcaaaaggacaccacaacaacaaaacaagcaatagaaaatccaaaaggggatcatctcttcattgtagtaagcataaactacaatcaaaatccctgatctagtcctacgaattcgttgacattgtagtgcaatgtcctctcaatcccttgctcaagagctcagatacctatatttgcaattctatcaccaaagacacatctacaagtataaatgaagaaaataagaaagaaagaggagttaccgtacgaatcttccaatctattaataaaggccaattgtaacaaggaacctgcagattccaggaacaaaagagaaacacaatctccatgagtttacgaaagagccgtttcaatttctcacagagtcaatttggccgagagaaaacaaaaaaaaagatataaactttgaagaccaaaattaaaaatcaaatgtagaggactataaatagagagaaagtaccgatgaccattccgacagtgacaaatgtcaagagaccgaagacgatcttcatggcaggagccatgtctagctgatctcgatctccgatcaaaataaaataaaaacttgggagagagagagagagatcagtaacagttgttgttgttgcagaaggaagaaaaagagaggagcttgagagttgagagagatttgggtggagaaaaaacgtcagaggagtttcttctcagagatcttctcttctctttaaaaaaacaaaggcctttttctttcttctttcccttcctttttgttttaattattttttgaatatccgtcatggactctttttctctttttactttctttttggaaaaatattcatcttgtcagagtaaattaaggtactaattacaaagggaaccaaacagaaaaaaaaaaacaaattgttttgtaattagctcaaaacgaaattcaaagggaaaagattttaagtacaaactgtaaatttcttgtaattttatataaccaagaaggtgtttctctcctgaattattcgtttttcttgatatttctattgttaaataaacagataaatcgagttcatataaattagttatctaaataatttagtttttcttgatagttatcaaatgaagaacatttaaaccggccggtacgatgacatttagaatttacaatcaaactcctctacttaactgttctatttgtttgtttgacatactagacaagtcaaaatacatcgtggggatctgaattctgctcaaaatacttttgaaaccattatattttacataatgcgacatatattaatttatgatttttgattagttgagcaaaaagagctgtcgtatatcatatagttttaatgaatcactcaaaaattggcacaatagaaacagtaaaagaattattgaatttagaggataaaaaagactataatatcgaccgtccgatatatcccagaaagattttaacagcaactctttgtctcttcttcttcttcttcttcttcttctctccgatttgctcagtcgattgcgtcatg

SEQ ID NO: 11914 - DNA, 3000 bp, Unknown
  misc_feature (1)..( 3000): cDNA_ID_1807585_gDNA_ID_2214522_Annot_ID_134084 3000 nt of promoter + ATG
gcggtgataagagaaataatgagaggaaatggtatctagatgcatgtagtgacgaagaaaaagagagctatgggagttaccaaaatgtcttggccaacccaagaatacgatgtgtgacgttttataaaccagaaaacagcaaacgccaaacaaacaatattcaccaaaagcgacaacactgacattgttccaagcaaagggagcttcacagatttccgagcaagatgtctgcattttctgcaggcggaacaaacatatatctgttaagagatgttgaccagaaaaagagagaagtgaaataatcaggaatatttcagaatacctcaatataacagccataatgatgttgtgcataccctgaaaacaacagccactgcgttaaattgacggaaaaagcacatatacatttaatctaaattctagacaggttcaaaaccgccggatgttaatgaaattacctgcatgccgccaatgcagaaaaatatggtgagcacccatacaaaccatgatgacatgaagtagaaaaggagcagcagaaatatggaggctgttacaataaaaaatacagcaccagtgacacttatatcaaggatttccttctctgggtcatcttttctggtcccagcactagaaacatcctggaaaaaattcagtaaattatttttttttctttaaaaagacattgttaattcagctacataaactgaagttttgatcaccaagtctacagaataacaagaggctgctacgcaaagtatctgggaaatgtaaactacgtgtataggatatcaaaggcagttaattgtagaaaccatagcatgcaaaagtgcttaaccacaattctctggtacacctttgctagtatgctgtaagattcattagcttggtcaggatctgtaagctctgaccacagtgatgcaacgacaacagttcccacagccatgagcaataacaatccagctgtgaggtccacggcaggacgctttggagcatacaacaaaagctcaactgcatcataaagaaactggacttagcctaaaagagatttatacgaataccagatggttcaaattgtagagctacaggaccaacaagagaaaaactgaagtgcgaaatcacaaaggctcaccattcttattgtcaaccatagacttgttgagagcatctccgcttgacttagagatcattaagacaggtatgctcacatttagagatgtgtccttttccatacatcccatctcatcaagatctgataacagatcatgagtaaatcatatgatccaaagctacgaaacacgaaaaacatcaatccgaaaccgtattgaaaagaaaaaaacaccttctttgtcattaatgactaagagagcagaagcaccagctgcctcagcatgtttggccttctcagtgaaagcacaattgccacggatcgacaaggcaatatgtccatctaactggaacaaacaatgtcaatacaagatatcaatgaacattgccaaaaaaaaaagtcagcttgcacttccaaattacatggtggaagccattgacttcattctaaaagcaagaagaaaagagaaactgaccctggaagagagatgggaacaagagtccaaaggatctacaaaagcagcaggaaatctaagagcttgatcaggaacagaaggcaaggcagctccaaattgagcagttaagccagtaaggaagtctccttcaacaccatcaacccaatttaagacctttacctatatgaagatcatttccaccaaatatagaatctcattaacaaagagagagagagaaggaaaactagatcaatcaactccactgaaccagagagtgattagatacgaagtaaagataagaaattgaatgcaccatttgaaacttattggtacagccaggagactcgaggctggaatcttcggtccacgatacatcgtcggccgccgctaccgaaaaaccaagcaggagaagaataagtactaaggctgaatatcggtgattcggcggatcaaacgacgacatgacgcaatcgactgagcaaatcggagagaagaagaagaagaagaagaagaagagacaaagagttgctgttaaaatctttctgggatatatcggacggtcgatattatagtcttttttatcctctaaattcaataattcttttactgtttctattgtgccaatttttgagtgattcattaaaactatatgatatacgacagctctttttgctcaactaatcaaaaatcataaattaatatatgtcgcattatgtaaaatataatggtttcaaaagtattttgagcagaattcagatccccacgatgtattttgacttgtctagtatgtcaaacaaacaaatagaacagttaagtagaggagtttgattgtaaattctaaatgtcatcgtaccggccggtttaaatgttcttcatttgataactatcaagaaaaactaaattatttagataactaatttatatgaactcgatttatctgtttatttaacaatagaaatatcaagaaaaacgaataattcaggagagaaacaccttcttggttatataaaattacaagaaatttacagtttgtacttaaaatcttttccctttgaatttcgttttgagctaattacaaaacaatttgtttttttttttctgtttggttccctttgtaattagtaccttaatttactctgacaagatgaatatttttccaaaaagaaagtaaaaagagaaaaagagtccatgacggatattcaaaaaataattaaaacaaaaaggaagggaaagaagaaagaaaaaggcctttgtttttttaaagagaagagaagatctctgagaagaaactcctctgacgttttttctccacccaaatctctctcaactctcaagctcctctctttttcttccttctgcaacaacaacaactgttactgatctctctctctctctcccaagtttttattttattttgatcggagatcgagatcagctagac

SEQ ID NO: 11915 - DNA, 3000 bp, Unknown; identical to SEQ ID NO: 11913
  misc_feature (1)..( 3000): cDNA_ID_3023382_gDNA_ID_2214522_Annot_ID_184647 3000 nt of promoter + ATG

SEQ ID NO: 11916 - DNA, 3000 bp, Unknown
  misc_feature (1)..( 3000): cDNA_ID_2707872_gDNA_ID_2214522_Annot_ID_134087 3000 nt of promoter + ATG
aacatccgtcgcttccaatttcaaacccctagtttctcgagaagcatcctcatcgttcgtcactcgctccgccgccgagccacaagaaagaaaaaccttccatggactgtgctatgtcgtcggcgacaacatcgacactgaccaaatcattcccgcggagtttctcactctcgtcccttcgaatccagaggaatacgagaaactcggttcttacgctttagttggtcttccagcttcttacaaggaacgattcgttcagccaggtgagatgaagacgaagtactcaatcatcattggcggtgaaaactttggatgtggatcgtcacgtgaacatgctccggtttgtttaggagcagcgggagctaaagcagtggtggctcagtcttatgctagaatctttttcaggaactctgttgctactggtgaggtttatcctttggattctgaagttagggtttgtgatgagtgtacaactggtgatgttgcgactgttgagttgagggaaggagatagtattttgatcaatcatacgactgggaaagagtacaagcttaagccgattggtgatgctggaccagtgattgatgctggtggtatatttgcttatgctaggaaagctggaatgattccatctgctgctgcttgattttgacttcaggtatgattctgtaacttgatgatgatgatgatgaggattggtaataggttaggattgagatcgaatttgtggaatagtctaggaagcttgacattgaattgaacgatgcaaaacatagttttcaatggttctagttagagaaagagaacacagtagttgggattctagttttgtgttgtttaaaatgtgttggtttagtttttgtgtgagattgataatgacttgttattctttctcttcgcttaagacttactttatctttccattggttcaatttctagattgtacatctcttgattgtagttgttgggagggtaaaagttatgatgttggctgatcttttccatgctcatatccattaagacttgagtgtccgatagtagaacaatacttcactcttattttgtctctaagactcctttttttttttcctttttttgttctatttgttttgcaggtgtcaatggaagtgcatgagagtcacttcaaggatcttgatccaataataagaatatgtaatgtttccaaaagcttatgaacctaatctatgttttatgaatatatatgactatcggctttagtcttcagtatcagtttcttgtttacatttggatgtatcagctgctaaaaaaatgcatagtttcccatcccatttgaaacgacgttttctctcatgtcttccactaatataatcttctggtcatgagaacagaacaggagctctgtttttctcacacaatgatcgaacacacttttgtcatatagtatagagaaatattaacacttctttttaggcatccgtatctagagtctttgtttcactgtgacctacctaagtatatcaaaacgcacgtttggaattctgaatggcactttcgtaaataggagggtacaaacatttctccttttaaattgttttcatcgtgaactctctcactcactcaacaaagtaaagaaacaatggcgtattctcttcctacatttccccaagccttaccttgctcgtcaaccaaaacttcttcctccttggctaccttccgatctcctttcttaagattcaatggttccacttccttaatcccctcctctatctccatcacttcacgtggcacatcctccccgaccatcatcccacgtgctgccgcctcagaatccgactctaacgaagccctagccaacacaaccttccacggcctctgctatgtcttgaaagacaacatagacaccgaccagatcatcccagcaggagccgcttgcaccttcccatcgaaccagcaagagcgtgatgagatcgccgctcacgctctctctggtctaccagacttccacaaaacacggttcattgagccaggagagaacagatcaaagtactcaatcataatcggcggcgaaaactttggttgcggatcgtcacgtgaacatgctccggtctgtcttggagcagctggagctaaagccatagttgctgagtcttacgcaagaatctttttccgtaactcggttgctacaggagaggtgtttccgctcgagtcagaggttagagtctgtgaggagtgtaagacaggagatacggtgacgatcgagctgagtgatagtggtggtttattgactaatcacacgaccggtaaaaactataagctgaagtcgatcggtgatgctggaccggttattgatgctggtggtatttttgcttatgcgaggatgatgggaatgattccatcattagcttaatcctcttccataaccatgatggtgttcttgtatgcataactatttgatgaatatttgtgttttagagttttctattttcttaacttttttatgtttgtttgatttggtattgttgttgttacctaaagaataagaaatcaaaagcaaaatagaccgacatgttccaagatatgtgaatatggtgagtgtttactaaattatgcgaatattgttgttgcaaccttattttcttccaagttgggcatcaatttccctttttgggcttagtcttcttttgtttgtaaatttagtttgttttagtttattgttggcccatttctgtagggtttggcccgttaagtaagtaccatgtaaacccagaaaatttacaacgaaaaccctttagcaaaaaagtaataattccgttggtaacttttctcattgtagtacatggcatattttacttactctactaaccaatttggtttggttattgaaaatttggcggtttaaacaaaccgatataaaataaccgttaagcggtaaaagaaaggacatcgctaaacctaaatttgcgactcctactttataacgccgctcttcttctccattgtttgtatactctgaaaaac

SEQ ID NO: 11917 - DNA, 3000 bp, Unknown
  misc_feature (1)..( 3000): cDNA_ID_3023374_gDNA_ID_2214522_Annot_ID_134089 3000 nt of promoter + ATG
aagggccgtcgaggttgaagtcggagctgagattctctagtgggagtagtagccatcaagaacataattctctaccgcgaatctcggaggttgaagcggctgcagcggctagaaacggtgtcgcatcaagtagtatgagttttggaaataatcgtactaacaattgggacaactcgtcttctcatatcagtttcaccattgatcaacccggaaaacggtccaagaactccgactttttcaccttagaaactcaggtattttctataactttaatttgaggttatttatgtatgtgtatcaatacttttagattatttttttatacaacaaagttaataaatctcggattcttctaggtaaagggagaaaagagtgaatatccccaatgttagttgttttgtgtattattagtttctataggcttggagaaggtttatgattgatctataataggttgacaacttgatactaagaaagtatattatcatatcgtatgaaattttatatcagtttaattaacttccataaagttagcaatagaattccatgttgaaatattgccaacagcaatgtctatgtcacaggttcatgtgtataaactgcttggagaaggtttataacttttcacaagtccttggcaattaaatgatttgtgtgtttaattatatgtatggtccacaagttgtatgctaacaagtgttattatatagtgcgcgtcatatacaatatgaattctacaagcccaatttaaattccatatccacaacagaattccaagttgaaataaatgccaataaagtgcaaatagccaaatttctgtgtgtagaagccagagttgagtggttgtgtaatagatataaatagcttagagaagggttatgattaatttatgtatatttttcacaagccctttgctaccaaatgatttttgtgtaaacattctcactgatgttggtttggttatgatattcattgagtggttatacattgattttcatctcaatatatatggttttgacttttagtatagcatgccgcaaacaactctggaaatggcgacaatggagaacttgatgaacatcccagaggactcggtgccttgtagggctagagccaagcgcggcttcgcgactcacccacgcagcattgctgaaagggttagtttattctattattatggtgattactattgcataagtctagatacaaacttaaaaggtgaattcatttgaaaccaaagaaaacaagagtaaaaattaggttttatatatgatttggtttgcgtgtttgtggtatataggagagaagaacgaggataagcgggaagctgaagaagctacaagaacttgtgcctaatatggacaaggtaagtgatattatttctgtttttaatgtaatgttggtgtggttttacatatctataataagtttgaaaaatttggcagcaaacgagctacgcagatatgttggatttggctgttgagcatatcaaaggtcttcagcaccaagtagaggtgcgtccttagatacaaaatgaatctatatatgcaaaagtgacattttctcaaattgaagcaaagggtgatcatattccttctatgttgggaaaatgttaccttaaagccaaattttagtattttagaaaatagttatattaatataatggttagttattgtccaatatgatcataaccatggatcaaccatttactcggacgtgttttttttcttccagaaaatttcatgacatatcaaaatgtcatgcacgtgaaattaaaatattacattctcatgatctcttaacaaaagggtttttgcgttggtctcatgaaaatgttttcgttatgttcatttatatcattttcacccagttgaaataaaactgatcatacatgcatcttaaattttgttaaaaactttcgtaatagaatacgttaagtcgttaacagtagactcttctaagaatctaagttaagaatcatgcataatagatggttatacattatatactatatatttatcatacacttggtctacgtcatgtttgatcggttagattctgatgtcccgtttattcacatgtctaggtctcaatgtcttattcaagctaagtatgcatatggagaaattaatatgattttttaaaattatctcttatatatgtgcagtcactggaaaagggaatggagagatgtacttgtggggcatgcaagaagcgatgatgaatgatattgttccaagtatgatgcaataaagtatagaagaaaaggagatcacttacgaaccaaattctaagacagaaagaaacatagcaaaaaggagttattttggaggtctaaagaaagtgatgatggattaatgaaggctggttttgttactctctgaaagtcttgacctttattataacttaaaattcgatcaatcgattttttttttcctgttttcctcaaagttggttaattttagcttagagcaaaacccattatttgagattgaaagagatgcgcgtttgtgtgtgtgaatataatcctacgttttgaattttgatctgtgaataaaaatctcagaaaaacatcaggaggatcatagttgttttcaacaaatgtatataaaataaaaccttaattgaaccaaattcattatttcaaggaaataaatgtactcagaccaatttattttttcttttgaaaactcatatggaaaatccacttggttaccaattattttagaagttgtaaattacacacacacacaaaaaaaatgtgtactctttgaagaagtttatttcatcaatttagaaaagattcttataaaaaaatacataattaataaattaaaatagaaataaatcataatatgaattttggttaattatgatggaattaatttcatgcgcaaaataatactcattaattgcgctcacaaacaacctaataaaatccaaacaaagctctctttctccaacaaaggcgttacagagaagaagaagaaggagaaatg

SEQ ID NO: 11918 - DNA, 3000 bp, Unknown
  misc_feature (1)..( 3000): cDNA_ID_1807341_gDNA_ID_2214522_Annot_ID_134090 3000 nt of promoter + ATG
aggcttcctttctagggctaaagttaattatctttatagacttctagtgcaatgttatagaagctttattaattatgactaagtaaaatacttcccaaatctcatttacaagcgattttaataatattagtggttgtagctttcttagtcttatgtatctataagaacaaaatattgcatatttcttactttatgtaaatactttaagatatatcttggaatttgactgaaaaaaagtaaatcaacgacatttaatttatgtgagctattaacttcacttttattgtggttttaatacagtatattctaactatttctcacatttttatcgtctattattttttaaaatagcaagatttttaagcatagaacttgagaatacataataggtttttttttgttgttaagaagtttaatattggtggttggtaaatttgaaattttgtatgattttaactgagtcataaactgttttaagaaaatcatgatcggtctgattcatgtagggttgttaaccccgttgaaagttagacaacctttagttgccatgaccagagcatttttctaatcaaaactgcactgaaatactaaaaccgaaaccaaaattaatgtaacgagtcaatttccactcatcgcatcatcactaatttttggtcttgaaaacatattaaaaatcctttattaaattttttttcaagcatataccatacaaaaatttatagtcattaaatacctatatttacacaacgcaaaaaaaatcaataactgtgtatacgtaagaaaatcgctgagcacacatccacatttggaatttcgtacttggaaccacctagctgtcatgaagtgaaagtgattcgatcaaataaccaatgatatctcttaattagttagttgttgcatatacacactctacataaacaactaaaaatcaagaaaataataaaatatagttaggttaaccaatttatttttttgctaagaaaggttaaaaccaatttatacaaggaagagacaaagtttatctaaaattttcaatccggttagtttggttattcttttatatactagagaatgtttattcttgtatacttacatgtcttttgtaagaataatatacttacatgtatacaagcaagacatgtaagtatgttattcttgacacactttcttttgcagctttcgccaaaaagagacagaaaatcgtattacatgaccaaccgaattttctaaaattgagaaagatagaaataaatagattgatcggcaactaactcgcctctctagtctctagataaaaatttgttggccggcaaaaaaagatataatttgttgtcttctctgtttcatttaaattgataataataatagcaaatttcacaggtaaaaaaacacatgggtaaaagatatttgaacatggacctgaaaaatcaaaatagatagtccatattgattcaaatgggccaactctgtactctttttttttttatatatatatataaccgttattctattgaaaaaggataagaaaatatatgttacaagcttttaaggcctgatcggctaaatagcccaatacaggcataaaagcccaaataaaagtttagtcgatggcccaagtaaaagaaatcaagtacccaatttttgattctttagatttgatgaaaacgatggaaggagaaagacgaggagttgacggagagatagatgcggtgaagattgaaatcaaatattgcagtggagttacgatatctatttgtttccgcccaaaaagaagaactccatcctacaatcaaaagaactagttaaatatttctgtatgaagtagaaattctacaacctaaaagtaagaataatatacttacatgtcttgcttgtaatgtcttgtcgcaacagacttacgtgatccgttagcaaaatttaaaacgttaaagtaatatgttcatactcctcaacataaccctagaaatgatgaaacaatagtatagatatagacatatagtaatcagcaacaaagtcacataaagatcctcatcatggaacaaatgggatctttgcccatcttaaacataaatgtggaatctaaatcaactgtttaaaaacaaatacaaggtctatatcctaatcaatggacgttcaccatggtttaatttaataaaaagtgcatgtgtatttttattataaaatcaactaaacgtataaatgtaaaatggatgttttgtcatggtctgcctttctcttggatcatatgggtggtcgaaaacatgaacaatgaaatagacttttaaaatcagaataaactataagtatccataataaagtacaaagttaaataacaatttgattcccatattaatacaaaatggaatcttaatgacccacttgacgataactaaactaatatccatgttaatttcatcacccaaaaaataatgaaggcttcgattctctgtaaatgtattcactaacatttgtacagtccatcatcattttgatatttgcttctctcttatgagaatataaaattggcattttaggctgtaaagtttatcaatgaatatgcccggaatcattatatcgataccgtcatacataataataactccatttaaaattgaatttttgatagaattaagattaacctaataaaacgaaatatcttataagaaaaatgatgctaagttataagaaaaattcgcaaataacgtcaagccaccatctgtcaaccacgtgaggtgcacgtgcgttgacgggaccgtgagtaggagactctctcttggtcaagcacccacaaggcacaaggacaagccatcgctctaatttgtcacccttagtttaattaatttaatttaacagtcctaactataattagtaaccctcttgcattatcatatagtattaattaataactactcaaagtctctttctctcaaaccctctcctcaagattttttcctaagcatcagattagcttttgtagggtttttcttttccggtttcatg

SEQ ID NO: 11919 - DNA, 3000 bp, Unknown
  misc_feature (1)..( 3000): cDNA_ID_3023363_gDNA_ID_2214522_Annot_ID_134093 3000 nt of promoter + ATG
cttccttgagattgttttagggtgaatctgaacaaagacaaattcgatcattgctgattgctttgttgccgttcctcaattccatgtatctggctcttacgattgtgtaattgaaatgagattatgatgaagaatgattcgtttgtttctttttgttctatctatacatttgtggtgatatatatatatatctttgtttgaaacgttaatagataagctgctcatactagttatacaacagactccatagaaggtgacatttgtttaagatactcttgttcctggaacacatacgaagatgaagaaagtcttcggacaaactgttagagacctgtaagtattttcgtacccgaaatttaatgatattctcaatctgtgtgtggtttatttcttttttcattgacgggatgcttcattttatgttccatttattcagtaagagagaggtcaacaagaaagtgctcaaagttcctggagtagaacagaaggtaatggatgctcttagcttcttctctctttttcttcttatcagaaattcttccgcagcagagatttagatactgttttccatttttatgcttgagtttatcaatttctttatttgtttctaaaaggcttttataaatagagagcttatcttggttgcattcatcgtcttgctaaacaatgtaaagcgagatatccaactttctcttatcttgttttgtctgtgctttctcttattcaggttctagatgctactagtaatgagccatggggtccacatggatcacttcttgctgatcttgcgcaagcttccagaaattagtaactacgaccaccttccaacttgctatattttgctgcgattttggacattgcacaggaattataaaaacatgttacttctatttcagtcatgaatatcagctgatcatggtggtcatatggaaacgccttagcgacaccggaaaaaactggcggcatgtctataaggtaaacaatattattgtcttgctggcttaatttgtgttgaatttctgtagcagtgactaaagtatttcatgctgtttacctcttctctctccccttcaggctttgacagttttggagtacatggtaggccatggatcagaacgtgttatagacgagattagagaacgtgcatatcaaatttcggtaatgactaccttgagtacattattttggaagtattcaacatcaagagaatcctttagtgctatatctcagtagttgactatcttacttgtatatatgtctattttccttgtggcagacattgtccgattttcagtatattgattccggtggtagagatcaaggaagcaatgttaggaagaaatcacagagcctggtggctttggtgaatgacaaggaaagaatagctgaagtcagacagaaggctgctgctaatagagataagtaagtttgcttgtcattgtatctttctggaactggtggatagttttctctctgtgtgagtctcggtggacactcgtttgatttcttgttgctagtggcttacaattgttattatgcttctcggtagtctattaattggtagtactggcactttaactgtattagcttctgaattttgaaagtttttatctcgagaaaaaaaaatgacatgtcttttggttcattcaaaatatgctgaacatatcaacctacattattttacaacaggtatcgcagctcagcaccaggtgggatgtataagccttcaggcggatatggggataaatatgattacggaagccgggatgaagagcgaagtagttatggaagagaaagagaatatggttacagagatgatgatagaaatagtcgtgatggagatcgtcattccagggactctgaagaccggtatgggagagatggtaatagggatgatgattacaggggaaggagcagaagtgttgataactatgggtcacgaggtaggagttcggaaagagagcgggaggatgatggccattcttcatcacggtatgttaaatttcaagtcgcctaaatcctgaaataaaaaaggaaggggaaaattttgaagattatcaactccatttggatagaatatttttattttgaatactagcgtagatgtccttgattttaaaaatcatttcgaaccgcaatcttcttagtctagttccattttcaaattttaaatggatacactcctttttgtcctgtaggggcagtggtgctcgagctgatgataattctcaggatgggaggtaatttctgataaatttctactgaagtttaggcattcttttattgtatgacaactcatctcaccttctttcgggattataatggtagaggggggctccagaggaagttttctgaacaaaatattggcgctccacccagttatgaagaagctgtcagtgattcacgcagccctgtatatagtgaaaggtgatcattttctgctttgaaaattgaaagctaccttggtttttattggtgctgatgaatctttctatgccagggatggtggggagaccccacaagttaccgctccaggagctgcttctcctcctcccccacaagttgctgctccagaggctgcttctcctccaactggaaccaacacagccaatacaactgctacttttgttaatgaatcaccttctcagaaagttgagactttcgatgaatttgatccacgcagtgcgttttcaggtacagaatactcaaactcttgcaattctttagttgtatcttgagatattttcttagtttttcaaactcctcggcagcatagagattacatgaaaatctttaatcaataactataactaattcagtaaatgtttcaaggcttagttggagggtgtatgattgtattctcatgtctgtatggtatatttctatcccattaaactctgcttgttctgagtgtggccgttgtgttcctttacttttccagctggccctccagcatatgcatctacagatggtgttacagctcctccaactgtgacttct

SEQ ID NO: 11920 - DNA, 3000 bp, Unknown
  misc_feature (1)..( 3000): cDNA_ID_2707848_gDNA_ID_2214522_Annot_ID_134096 3000 nt of promoter + ATG
agaaccctatttgcataaacagattcgagtaagtaatcatagcaaaacatactccttatcagattcagtgaagctaaaaaactgtaaagtcttcaactttatggagaacacaatcaacaacagtagacgatcaaattcacaataaccagatacaaattgtgaagaattggtttagcaaaaattaatcagtgatggatttataaatcattaccagaggtgatacagtaaggaaacccagctcgttcgatgagtttggcactaagagcatcgaagcaacatggaccctgaagaacaccaggggattgcataatattccttagcttcttcgccggagaagatggaagtttcgcgtttcccgattcatcggaaactacggtggagttaacggcgccacgaaatcgtcttgagacagagaaggggttcgcaaataattctccgacggtttgtgtgaaagaagaagaggcagaagaagggaaaaaactcgatttggattgtttatgaagaattcgaggaggagaagagctgcaaaagctaagtgccgccattgaagccttgaaggattcacttctgttcggtaaaagaaagaaacagaaattgatcaaaagaaagaagttggacaaaccgaaacaacaagaaccagaccgaaccagatttaataattaaaaaaaaaaaaaaccatgtcacgtgagcttttttagggttcacgtgatcatctctatcgtcgaaatacaagcggcggacttcaaaatcataacttttttcttcgctcctctcttagcatcgccgtgaatcgttggtctcagtttctccgtccatctttgattcgtcgatccgtaagcatctattcagtttcatgtcttttgttctaaactttttggtttgattggggttttacctttggttaattaaagctttctagattcttagtgtttggattgaattctgtaaggtttggtaaaactataccaggttagttgctatctagctgcaatgggtacagagacggttgtgcatgatcaggcaagatgggcaatggctgcaatggaacgaaggcttgctgttgcaaaagctcagcttcttcaacaacaacaacagaagaatgagaaagataagaaggggacttctgatgtagatgtctctatgaaagaatctcatcaagctgattcactgcctactccctcaaagacatcaattaaaaaaggtttgatggttgagtataaacgaagaatgattctctctagcaactctttattgaactctgattgtcatgggaatttggttttgtagtagatcccaaggatgatgattctgttgcatatacaaagttgtcccatcccgttgatgagaatctgctggcaaccaatgttaaggtatattcagattcttgaggagaacgaagctcggccttcttctgtatgatagataagattgctcaatgtgtgtgtttttttgtgattcagttttctagtgcaaagggaactatagtagacaaggttttgcataaccttcttcgaagcggtgactctgctcaaaagtacttgcaaggtactaaaagtgtgaagctggataactatatccttcttgataattttgtacagtcacggtcttcggcctctggttctaaaaaggcatcacagaaggattcaaaacgttctaaaagccgtatgtctatgaagcgactcaagaaatctggtgctttgcatatccctaaagatctccaaaagtgagttctttatattttttttttttttttttgctgtcatatagattgaactggctcagcctatgcatctgagtctattattttggtattcttaataaagtttaagtgattacttgttcacttgtgtttgagtgcaggtttgatttgtttaagccaatgcatggtatgtgggaaagttacatgatgaaactcatcaaggtgaccgggtaagctacttatctgattaccgaaatactgattcaaactatgtgctttctataaggacgaaactgatgggagtaatctagtatacacaatcattttaagcttggtcatcattcttagacaatttactttttgcaggaagattcaattatctttaactcttctctcagcagatcttcatggtgctttcatgtttggtaatccttcattctttcacaaatctgtagtactaggatatgatcttttgtctctcactcactttccaaaacttaacttctctgtacgcttaaacaaaccttaaaactagtccttttttttcatattgtaatttgttccaatcatagcaacctattttacttgtgacagttgctgagtgcaagatagcatcattcactggtgtacaaggcataatggtgcgcgagacatccgaaacatttggaataatcacacgagatgacaaatttcgaggtatcttaaagcttttttcaccaatatatttgccataaatatcttgaatcgttctcttccccagcctcaaggcttaacttagttattgtaaacaatctgatacagttgtaccgaagaagctctctgtcttcatcatccaactcgactgctggaagattactttacatggggacaagtttatttcaagagacaatattgttcaacgttaatgctaaaaatgaagctctagtcgtttttcttagctagtggtagaaagcaaccattgatgaccacagaagcatcctaatctcacaagattttgctttagatctttccttatggacccaacattttaatatatttcttaatcttgaattttgtatgaatcctctgtaaatatactactgtgttattgttaatactaatttttattattagaaaatgagtgcttatatctcagaaatccatctggggccactaataaagacaagtacagttgaagattccaaggtgagtctgacttaactaaagtaataatatttcacatcactgtcctctctctctctctgcagctctaaactgttttgaaacctaattgcagaagaagtccagacaaaaaaaagagg

SEQ ID NO: 11921 - DNA, 3000 bp, Unknown
  misc_feature (1)..( 3000): cDNA_ID_3023355_gDNA_ID_2214522_Annot_ID_134099 3000 nt of promoter + ATG
ggcgttcactgacagcttcttgttctcctagcggtttcccttgtgctcatcctcacaccttccaaaatattatcaactcggataacaaaacatatatatgtgatcaaccagacaattttttaatatatatttctatagtcaacgatgagtacgcattttaataatccggtgaaagattagtcggactaactaaataatttttttgacatataataaacacttggaccccccaaattgagccttaagaaaagactaaaccagttctattagttgcgtacaactaacgatgatcaacttgagtgatttatatcggagatcgtgggtagtgatacgggtcaacaatataaggatttagagatcaattaggaattgaagttaaaccttttcaattttcttaaagttccctgatccttattcattcatcgtatccacaaccattcttaacattgcccatggctaagacgctggacctcttttggcacgaacatcctttatatgaaaaatatcgtatgttcacttgccaagagtgccataggagtgctatacccttctttgaagttttttatggatgcttcagatgcaatataaaatggcatccctattgcgtgccaaggtcaacgaagaatattaaccacccttgtcacccgaaccatcccctagaggttctcctccaagggccacctagttactctgacgagaagtgcagcctctgtcaacggaaactctccaacttcgtttaccattgtaagttatgcaatttcagcatagatatggaatgcggaaacaggcccccgccccacaaagtggatcatccaaagtgccacgagcatgcactcaccctcatgggaagggaagtatccttcacttgcaatgcttgtggtacgcatggtgaacggaacccttatgtatgcctaccatgctctgtcatgtttcattatgattgtattgatctaccacacgtcatcaacatcaatcgtcatgatcatcgcatttcacattcatatcctctcaaacgtgggaattgggtatgtgaaatctgtcgtcaagatatcaacaccacgtacggaggctattcatgcaacaaatgtccagatttttttgttcattcaaaatgtgcaactagaaaagacgtgtgggatgggaccgaactcgaagggatacctgaggaagtagtagacgttgcgccatttgaagtgatcgaggaaggggtaatttatcatttctcccacgagaaacataacttattccttattgaggatgtttttatagatggtgctgaagacatgcattgtgaagcttgcgcccgtccagtctcttctgagaagcactacaagtgcgtggaatgcaagtttattcttcacgaagagtgtgcgaatcttcctcttacgaaacgacatggactttccacaggtatattttatcttcgcttcgggaaggattttagcgaacaaaatttcagttgtgatgcttgcaatagagatggaaggggttttagctacaaggatgaagagggtgtggtactcgatgtgttgtgtgcgtctctctctttcttcaagcaccccaaacttcatcctcacacgttatttctaaccacaatagatcgtggtacttgcttagcttgcggtgagaataaactcaatgtgctgcgttgtgttgattgtgattattctttggattacaaatgcgccactctaccattagtcataaagcataggtgtgatacacattatttagttttgcgctctggggaggaggcgcctgaaggtaaatattggtgtgaaatctgtgaagccgaaaccaatcctgaaagatggttctatacatgcgatgattgtggggtcgtgtgccatattgaatgcgtaaccggggactttttgaacataaaacctggaataataatgaagaacagggagaataagtttgaagtgggtttcaacgatcacgattctagaccaaaatgcactgattgtggctctcgttgtaggttccctaggtttttcaaggttactagaaaaaatattgagtactactattgctcaaaagcttgttttcagaatgcgaaattctgaatgcctgaaggaaggcgaaaggaaggatttggaaacataaaaagaatatgggtttttacagatggaggctgtgtaatgtttttcaattattttcagataaacttgttttctatatttggatttattgttggtttgctcattcagttcataaaactatttatgagaaagagagaaagagagagagagagactttgaaggtaattattcttcacaccttttattataattcaccaaaattgggatgtttgttctattcttgatcacacgcctctctgtcgcttccttttgacgttttctttcttttcttagctttttcttttatcttttgtgttttctgtcttttcttttccgtagttatttgggattccaaatttttttcattcctaaatttctccacgagctcatcacctcctttcgtctctgcctctcatttgtctacaaacattttttccttttgattcgtctctctggtttattgctcgttgatcgtttgtttctaaattgcattctgatttctgatggatcgtgattttcatcgtcgtggtcaagtggtaagcattacacgcaaacacagctttgatcattaaaaatgtcatcttatttaaatcatgtcttgagatcacgtaatggtcttaggtcaatcaagatcaacgcgcaacaaattctaatgtttttacaaaatttgaaaatacttatctacaaatgtatttataaagaaacctaatttgcctttgtgttgatcatgatagacaattgttgttattagcctgttgatttgaaggcagagtcctctgttttcctgcaacatgttagaacagctcatttatgtgttttggtgaaaacgcaggcgaatgatcgtacacaaagcaactttgttcgattggataaaccgagagctgtagacgatcttgatataggcaagagagggaag

SEQ ID NO: 11922 - DNA, 3000 bp, Unknown
  misc_feature (1)..( 3000): cDNA_ID_2707838_gDNA_ID_2214522_Annot_ID_134100 3000 nt of promoter + ATG
acttcagcatccgtgcctggacatcattagttatcagaaaccttcgcgagcttgaaaatatagcagagccattaagttgtggtacgagactattagctagactttgcatcttgcctcctgcatcttccacggcagcaatatcaacaaaaggagattccagaaccataaacgacgaaccaacctccccagccacccttttggcagccaataaatgaccattaaaacttgtcccgaaaatctcccttaaaaccacaatccctgcaatactttcatacttttctttgttaaccttgtctacaaaacactgtataagaactttaaaagctgatgtagggattgaatcactaatcccatttcctaatacactctcttcaacttgagcttccccaaaagctgatttgtccacttgagcaactaccgcaccaggacgaatttctcgtataagacactcagcatcactagcagatctctctgataaattctgagcagcaagtatgtaaatagttgaatcatgctcaggaactctaatagcaaacacaaagttctttgtactctctggtaacgaaagtctatgaacaagctcctttgattccttcaagtcactgttttgaaaaatcgaaaagggccatatattttgaagactattcgcaaaaaaaaatgccaccattatcgaattcgactccaaagacagagactttcaacctcagtaaaccaagccctccaaggcaaaccaaacgaatccgagaaaacacttagattgaattcaatcgagctgggcatagataaagcaattcgtctactgaatcatgcaggcaatttcgtatctacttataatcgaattttgaagatcaaaacgagcacacagatgaatcaacaaaggccgatggagagagaatttaaaaaaaccaaccgggaaattgagaatcacagcagacggaggaaggacatacactgatttcgagattagggttccgattagtatcaaattcgatggttcgaacccagtaatggattcttcaattcttctctgtgtcctttttggtcgatgaaacacagacgacgaattcgcacacaacacacagtctatattgagattccggttagtagttattcggtttggttcaagttggttatcttcattttctttatttagtcggttttgtattagaatctgaaagttattaattttggttcaactttgaataaaattagcaaagtttatatggatataataatcactgtacagtaattaatcttaataatgtaaacaatgtatcaatatattaaatttgaagttataatttggtgtcacaagtaaattttgttttggttcgaaatcagttttagtttatacagaatttcattctaaatacggttttgctttggtaataaatccggggataattcacaagtaaatgatgttgtgattgaacaaaaaattttttatgaccgaactgaaaactgattgtaacactggtgaatcttcttttaaagtaacgaaaatgaaacttcattacaactttataagaatcatttataaagtgtgaagtgtgaaaacattcgttgtgtttatgtgttcgataatgttttgtgtgcaactacaagtctacacgaaagtgcatgcatattgtgtgtgtatcttgttttaaggaatgaattatagatcatatgccgtagatgtcacatatttctaggatcatgtgaattcgtttattgttacggtattcaaattcagacaaaccctaaaatacttcaagaccaattcaaaatttagtttaaagtggagtaccaaaaaaaaagatagaataaaattcatgataagtgactccaagacttcttatatcaaaaatttcattttaaatttgcttgtttagtactccatattcttattcaagttttaacatcacaatgatgaagctctcagttcataaaacgaatgcattaacattatattatagtccttaattagataagtcctacaacaacaaaatcagttaatattcgtgtttacgttacactaaattaacaaaaaaatagtattaaacgaagttacgaaccaccattgagtcattaactaaaaacataaacaaacaaaaatcaaagtttgttttttccttttataaatgtaagtccaagcgaaagaaacattggaccaaaaagccaaaacttggatacaaatacaatcctttccatcacccgcatgacacgtcagcgtcactaaagcttcaacaccactcatactcaactcttattggtctgtcacaatcagcaatcaccacgtgtcaacgccagaaacagacagaaatccaatttttttttttgttaaaatttgatttttgtgggatgttttttgtttaattaaattatttccaaaggtaacgcaataaaacggtgttgtgaaatcaaagcaaaaaaaacacaaagggtcgtgcgagagcataagagcgcactctaatcgaccgacggattcataccctcttcttcctcatctctctctgcttagtttctgaatgtgaagcttgaggagagttctatatccttttgaattgctgtaatttggatcttacatagacgagagcagtccttctggatctacgcggtttaggcgggaggaggttttggtattgggaatgcgtttttgagctgatcttatacgtctattcaggttggtttgatcgatctggttccttatttattttcccagagttttatttctgttcataaaaatgtgatttttacaatgacgctactagttatgcttgattctgctcttaccttacattcttgttctttatttggttttgagatctgctttagctcattttctctgtgaattgtcggttttgtagctattgagatctgattgcgttttgtttgagttcctctttaaagttgatatcttttgttcagaaggtgtttccttttgcttgattgctgtttttcaggtttagctcagtctagaattggttggcttgggaaaggtcgatgaagaacgggatg

SEQ ID NO: 11923 - DNA, 3000 bp, Unknown
  misc_feature (1)..( 3000): cDNA_ID_3023351_gDNA_ID_2214522_Annot_ID_184662 3000 nt of promoter + ATG
gcaaagatatcaacttcagcatccgtgcctggacatcattagttatcagaaaccttcgcgagcttgaaaatatagcagagccattaagttgtggtacgagactattagctagactttgcatcttgcctcctgcatcttccacggcagcaatatcaacaaaaggagattccagaaccataaacgacgaaccaacctccccagccacccttttggcagccaataaatgaccattaaaacttgtcccgaaaatctcccttaaaaccacaatccctgcaatactttcatacttttctttgttaaccttgtctacaaaacactgtataagaactttaaaagctgatgtagggattgaatcactaatcccatttcctaatacactctcttcaacttgagcttccccaaaagctgatttgtccacttgagcaactaccgcaccaggacgaatttctcgtataagacactcagcatcactagcagatctctctgataaattctgagcagcaagtatgtaaatagttgaatcatgctcaggaactctaatagcaaacacaaagttctttgtactctctggtaacgaaagtctatgaacaagctcctttgattccttcaagtcactgttttgaaaaatcgaaaagggccatatattttgaagactattcgcaaaaaaaaatgccaccattatcgaattcgactccaaagacagagactttcaacctcagtaaaccaagccctccaaggcaaaccaaacgaatccgagaaaacacttagattgaattcaatcgagctgggcatagataaagcaattcgtctactgaatcatgcaggcaatttcgtatctacttataatcgaattttgaagatcaaaacgagcacacagatgaatcaacaaaggccgatggagagagaatttaaaaaaaccaaccgggaaattgagaatcacagcagacggaggaaggacatacactgatttcgagattagggttccgattagtatcaaattcgatggttcgaacccagtaatggattcttcaattcttctctgtgtcctttttggtcgatgaaacacagacgacgaattcgcacacaacacacagtctatattgagattccggttagtagttattcggtttggttcaagttggttatcttcattttctttatttagtcggttttgtattagaatctgaaagttattaattttggttcaactttgaataaaattagcaaagtttatatggatataataatcactgtacagtaattaatcttaataatgtaaacaatgtatcaatatattaaatttgaagttataatttggtgtcacaagtaaattttgttttggttcgaaatcagttttagtttatacagaatttcattctaaatacggttttgctttggtaataaatccggggataattcacaagtaaatgatgttgtgattgaacaaaaaattttttatgaccgaactgaaaactgattgtaacactggtgaatcttcttttaaagtaacgaaaatgaaacttcattacaactttataagaatcatttataaagtgtgaagtgtgaaaacattcgttgtgtttatgtgttcgataatgttttgtgtgcaactacaagtctacacgaaagtgcatgcatattgtgtgtgtatcttgttttaaggaatgaattatagatcatatgccgtagatgtcacatatttctaggatcatgtgaattcgtttattgttacggtattcaaattcagacaaaccctaaaatacttcaagaccaattcaaaatttagtttaaagtggagtaccaaaaaaaaagatagaataaaattcatgataagtgactccaagacttcttatatcaaaaatttcattttaaatttgcttgtttagtactccatattcttattcaagttttaacatcacaatgatgaagctctcagttcataaaacgaatgcattaacattatattatagtccttaattagataagtcctacaacaacaaaatcagttaatattcgtgtttacgttacactaaattaacaaaaaaatagtattaaacgaagttacgaaccaccattgagtcattaactaaaaacataaacaaacaaaaatcaaagtttgttttttccttttataaatgtaagtccaagcgaaagaaacattggaccaaaaagccaaaacttggatacaaatacaatcctttccatcacccgcatgacacgtcagcgtcactaaagcttcaacaccactcatactcaactcttattggtctgtcacaatcagcaatcaccacgtgtcaacgccagaaacagacagaaatccaatttttttttttgttaaaatttgatttttgtgggatgttttttgtttaattaaattatttccaaaggtaacgcaataaaacggtgttgtgaaatcaaagcaaaaaaaacacaaagggtcgtgcgagagcataagagcgcactctaatcgaccgacggattcataccctcttcttcctcatctctctctgcttagtttctgaatgtgaagcttgaggagagttctatatccttttgaattgctgtaatttggatcttacatagacgagagcagtccttctggatctacgcggtttaggcgggaggaggttttggtattgggaatgcgtttttgagctgatcttatacgtctattcaggttggtttgatcgatctggttccttatttattttcccagagttttatttctgttcataaaaatgtgatttttacaatgacgctactagttatgcttgattctgctcttaccttacattcttgttctttatttggttttgagatctgctttagctcattttctctgtgaattgtcggttttgtagctattgagatctgattgcgttttgtttgagttcctctttaaagttgatatcttttgttcagaaggtgtttccttttgcttgattgctgtttttcaggtttagctcagtctagaattggttggcttgggaaaggtcgatg

SEQ ID NO: 11924 - DNA, 3000 bp, Unknown
  misc_feature (1)..( 3000): cDNA_ID_3023355_gDNA_ID_2214522_Annot_ID_184661 3000 nt of promoter + ATG
cagtttctagacccatattcatctgttccttgtatagctgccattggattcagtggtacacaagtttggagaaccggtaagaccatatgtactttagattttaagtatttacacgttatagtcaagcaaacgtactcaagtttgttttctatccctttctatctttcagaaggatttatcactgctgaagaccttgcatccagtttagagaaagcgtggttaggacttcatatccaggtacgtgatagctgctttctcacttatggtggtgttcgtccttctatacattttcagttgacttttctcattttcaggaaacaactgcaagtatcttttcagcagcacttgcatcacagaactcagagacacctgtttctagtgcttcgagtgttgtcttgcctcccggaagtgttcctttagatgcagcggttgcatctccatcgacggcttctagtgttcaaccctcagagacaaagtcaacggtaacatctgcatcaacaacagaaaacaatgatggcacagttgcagttaaggttgtccctggagctgaaatcatttccacattactttagtttgttgttttgcttacatgatgcagcctttttttaaaacagggcaaagaatctgctgaacccagtaatttgtgtgatactactaaaaaccagccagcaccctctgttgatggaactaaggccaatgttgaacatgaagcgacagagacccctttgcgtgttcaggcagaaaaggagccaattcgtcctacagccccaggaacaaatgataatacatccagggttcgatcttctgttgatagaaaaaggaaacagggaactgtgataaatgaagaggatagtggtgtaggtgttagtggaagggacattaatctaacaaaatctgtcgatacaaaagagaccatgaagccaaaggatgaaggaggagaggaagaggatggagaaaaatccaaaaaagcatctgacgttcatttaaacattcgattacctgatggtagtagccttcaggagaagttttctgtgacaagtatattgagaatggtcaaggattatgtgaacagtaatcaaacaatcggactgggtgcttatgatcttgcggttccttacccacgtaaggtgtatactgaccaaggtacgtaaaatctacaatgcatccaatagatttttatttttatttggtaaagaacattttaccttaaaaccagcttcatcttgatcgaagatgatgttttctgccatttaggttttttttttttttttttctggtcagtttggactagtgtagtagatacataactccattactcttaatctctgcagatctggataagtctctatccgagttgagattgttcgatagacaagcacttgtagtagttccgcgaaaaagagcaaccgtctatcaaagaggaacatcttactcggagtctaacaacaacacagaccctaatagtggcggttactttgcttatgttagaagagtactgtcttatgcaaacccgttttcatattttggcggtggtactgccaacgcatcaagctctgttccagaacgtcaaacaagtatgcgggaatatgatgagtttataaaatccattctaatgcagaaagtcgtgtaattgctaatctgattctctctttttctatctataggaccaaatacggaggtgagaaacaatctggggcaagtagggacgtcctttcaagatccatcagaaggtaggagcaacgttaggaataggagaccaaccacttctcggattggaagtaacatccatacgttgaatcacaatgaagatgaggctccgtttggtgatggaaacgctttttggaacggaaactccacacagtacggtggtggaagcggtggagacagtaatgatagacgatgaaataagagaagttgaaatctgtgtggatagatacagaaacagctcgggtgtttactttttatacttgactctttatgaaccatttaagagaccagctgcaaaatgtatcctgatgcgtttccgttttttcggttgctcgtattaaatttaaatctaaaaaaactagcaatttctgtttgattaaattcggttctagaaattaattagtgtcgtttgattaacttcggttccaatcataacaaaaatattagagttaaatggttgcttaaatataagaatctgtatattcttttctatgcaagtgaagacttcattgaactgtgaaaaggcgttcactgacagcttcttgttctcctagcggtttcccttgtgctcatcctcacaccttccaaaatattatcaactcggataacaaaacatatatatgtgatcaaccagacaattttttaatatatatttctatagtcaacgatgagtacgcattttaataatccggtgaaagattagtcggactaactaaataatttttttgacatataataaacacttggaccccccaaattgagccttaagaaaagactaaaccagttctattagttgcgtacaactaacgatgatcaacttgagtgatttatatcggagatcgtgggtagtgatacgggtcaacaatataaggatttagagatcaattaggaattgaagttaaaccttttcaattttcttaaagttccctgatccttattcattcatcgtatccacaaccattcttaacattgcccatggctaagacgctggacctcttttggcacgaacatcctttatatgaaaaatatcgtatgttcacttgccaagagtgccataggagtgctatacccttctttgaagttttttatggatgcttcagatgcaatataaaatggcatccctattgcgtgccaaggtcaacgaagaatattaaccacccttgtcacccgaaccatcccctagaggttctcctccaagggccacctagttactctgacgagaagtgcagcctctgtcaacggaaactctccaacttcgtttaccattgtaagttatgcaatttcagcatagat

SEQ ID NO: 11925 - DNA, 3000 bp, Unknown
  misc_feature (1)..( 3000): cDNA_ID_1032702_gDNA_ID_2214522_Annot_ID_184660 3000 nt of promoter + ATG
atggacccaacattttaatatatttcttaatcttgaattttgtatgaatcctctgtaaatatactactgtgttattgttaatactaatttttattattagaaaatgagtgcttatatctcagaaatccatctggggccactaataaagacaagtacagttgaagattccaaggtgagtctgacttaactaaagtaataatatttcacatcactgtcctctctctctctctgcagctctaaactgttttgaaacctaattgcagaagaagtccagacaaaaaaaagaggatgaatccatcacaacaacacttaccaaagctatgtcctaagcgcctattcctcttcttcactccattcttattgttctctctctattacatcctcaccactatcaaaaccatcaccatctcttcccaagatcgtcaccatcctccacagcttcatgtaccttccatttcccattactactcccttccagaaacttcagaaaaccgatcgtcaccacctccactactactaccaccaccaccatcatcctcatcatcgttatcttcttactttccactctgtcccaagaacttcaccaactacttgccttgccacgatccatcaacagcacgacagtacagcattgagagacactatcggagagagaggcactgtcctgacatagcccaagagaagttcaggtgtttggtcccaaagcccactggctacaaaacgccttttccatggcctgagagtagaaaatatgcttggtttaggaacgtaccattcaagaggctagctgagttgaaaaagactcagaattgggttagacttgaaggagaccgttttgttttcccaggaggcgggacttctttccccggtggtgtgaaggactatgttgatgtgattctgagtgttttgcctttggcttctgggagtatcaggactgttctcgatattggatgtggagtgagttcagttacatgaatagacaccagaacttgattcatcttgatattttacagcagtattactactttcgattatgatggattccatgtgttttgttggacccaaaatgtcaggtagcgagttttggagcctttttgctgaactataagattttgacaatgtccattgcaccgagggatatacatgaggctcaagttcagttcgcattagaacgtggactccctgctatgctcggtgttttaagcacttataagctgccttacccgtcgaggtcttttgacatggtccattgttctagatgccttgtcaattggacttcctatggtaatgtgtgtatttaaatagacctgtttatatgatttagttcactgtgttttgaactgcttgcttcatccactctgcttctgatactgaaagagagaacattttatccagatgggctttacttgatggaggtggatcgtgttttacgtcctgagggatactgggtgttgtctggaccccctgtagcatcaagggttaaatttaagaaccagaagagagattccaaggagttgcagaaccagatggagaaactaaatgatgtttttagaagactttgttgggagaagattgctgaaagttacccggttgtcatctggagaaagccttctaatcatttgcagtgtaggaaaagactaaaagctcttaagtttcctggattatgctcttctagtgaccctgacgctgcgtggtgacttcactttcccaaaatctaatttgctctgcatcttcaaaagcttaagcttgattcggttggatctttttattaataggtataaagagatggagccgtgcatcactcctcttccagatgttaacgacacaaacaagaccgttctcaaaaactggcctgagagactaaaccatgtgcctcgaatgaaaaccgggtcgatacagggaacaactattgccggcttcaaagctgacacgaacctgtggcaaagaagagttttgtactatgacaccaagtttaagtttctcagcaatggaaaatacagaaacgtcattgatatgaacgcaggattaggtggttttgctgcagctttgatcaaatatccaatgtgggttatgaatgtggttccatttgatcttaaaccgaacacactcggtgttgtgtatgatcgcggtctcattggaacttacatgaactggtaaatcactcaaaacgtctctgatatcatctaatttgacatctcttataccatattttccggtttttgtaggtgtgaagctttatctacataccctcgaacctatgacctgattcatgccaatggtgtattcagtttgtacttggacaagtaagatccgtccctaacttgaaaactttgatttacattcatttggtgatcaaagtgtaatggtttctttttctttgtttcttatgatagatgtgacattgttgatatactcttggagatgcagaggattcttagaccagaaggagcagttataatacgagaccgttttgatgttcttgtcaaagtgaaagccataaccaatcaaatgagatggaatgggacaatgtatccagaagataatagtgttttcgatcatggaacaatactaatcgtagataactcaattaaataaaactctttttggtatcacacactactacaaaaaatttggaaacttttgagagagttgttggtttgggtttaaattggacaattacaaaaattaagaggtgcatttagatattttgaaaactttaatggacctcataaatatttaataacaaacatgtaacgacgttattgtgacggtggcgttaagtcgttaactgcgtctgatctactcgtagcttcttcgttcttcagcatttgatcggagtaggtaaagttgtggatctctttgtttcttgctaattcaaattgattaaggttcctgggtttgatcggctctagctaggggtttatggtactcgttatataattcactgaatttagggttcaagggttctgattgatctgcagtgacctttttgattgacag

SEQ ID NO: 11926 - DNA, 3000 bp, Unknown; identical to SEQ ID NO: 11920
  misc_feature (1)..( 3000): cDNA_ID_2707848_gDNA_ID_2214522_Annot_ID_184659 3000 nt of promoter + ATG

SEQ ID NO: 11927 - DNA, 3000 bp, Unknown
  misc_feature (1)..( 3000): cDNA_ID_1388384_gDNA_ID_2214522_Annot_ID_184658 3000 nt of promoter + ATG
caaggtggttacaaccctcaacaatcctatggtggtggataccggtaagatcaagccaaacatgatgcacttgacttcattcgtgtaatcaagaatacgctcgcctgtgctttttctttactctgggatatgtaatatcagtcgataaaagtactcaggttacattattcatccaggcaacacggctccacgaattttcttctctgtttgttcttgccttactcgtcactcatcattcatttttatttttttctggtttggaccaaattgagagcttgttgtgaaatttgtaccagtgtgagagtggcaaaccttgctcgggtctgccctttttttgttatatgcatataatttgatatatacacattcacttctatttctttattttgaagatgtgtaatacatttctcattcacggaacaaataaaatctttacatttttgtattctctttttaaatgtttcccggctgtatttactttttcttcactaggtgtgtgtcattctagaaagacttggattctgtcacctgcagtgtctttaaaatctaacaaaattttccctccgacctcatctgctgcatcgtccatcaattgcttcaagttcacgcctcctaaagctgcgaattttttgaggatctgtcaataactatgcctaagaaaactgaaacagaataagagagacttaggagtttttgaatacctggaacaatgtttgtgacaccttccaagaatccggcctgttccaaccataagacaagttttgcatcagctcagataaaacacgaaaaatggccctcgaaagtggacttaccggaattctgacatcgagtttctcaaacccatcgcgtccgatgattttgatcctcaaagatcgtgaccagatccgcgaaaaggggtttcttggttcattataaacctcaggtgttatgacttcaacaatcaggtcctctctctgttctggatcatctttagccacccgttgattacgatagacgctactgctgctcacttcttgaaaaggataaaacatatatttagttattgatttgacatttcccaaagatgttacaactgaaaacttccatgtctcacctctatctgatgacgaggtagcgtaccgcttctcttcttcctcgtaagtgtcaaaaccaagaatctctccaatttcttctaaagacgccatgcttcctggtggaggaattcgcccacccttgattgccaatagagcgtcctgcaagtgttccacatagttcttaagtctctttgccaccacagtgaagtcaacacattattggcagaaacagaaagattgtgacctgcattgcttgaatagatactccaatcaatgaaattggatacgccactagcttatatccaatctcttctagctccagcgggtttagaattggaatttttcctccgctttcaagcatattagcctacacagaccacaaaaatgtatcttcgtatctccagggaatatatcaagatacagaaagagtagtttccggcgcaaagtgaagttaccaatttaggaactagtggatagacattgcagaatgctttcatctcttctctagaaacaagagaatcaacggagagaacatcagctccagcatctgtaaaagctcttgccctaatgagtgattcctccagagatatcgcttcacgggaatcagtttgagctacaattacaatgtccgaatcacactctctacgtgcatcaaccgcagctttaacacgcatcactgcttcctctctagaaaccactcttctctcactcttagtattttcacaacaaacttcatcattgatgataattcctgcaaagccagctttaatatatcctttgacggttctcttaacattcatggcattaccgtatccattgccaccgtctccaatcaccggaattgatacagattgagtaatttgttgaccttgatcaaccatttctccataagaaattagacccttatccggtaaaccaagccgagacgctgaaatcgagaaccctatttgcataaacagattcgagtaagtaatcatagcaaaacatactccttatcagattcagtgaagctaaaaaactgtaaagtcttcaactttatggagaacacaatcaacaacagtagacgatcaaattcacaataaccagatacaaattgtgaagaattggtttagcaaaaattaatcagtgatggatttataaatcattaccagaggtgatacagtaaggaaacccagctcgttcgatgagtttggcactaagagcatcgaagcaacatggaccctgaagaacaccaggggattgcataatattccttagcttcttcgccggagaagatggaagtttcgcgtttcccgattcatcggaaactacggtggagttaacggcgccacgaaatcgtcttgagacagagaaggggttcgcaaataattctccgacggtttgtgtgaaagaagaagaggcagaagaagggaaaaaactcgatttggattgtttatgaagaattcgaggaggagaagagctgcaaaagctaagtgccgccattgaagccttgaaggattcacttctgttcggtaaaagaaagaaacagaaattgatcaaaagaaagaagttggacaaaccgaaacaacaagaaccagaccgaaccagatttaataattaaaaaaaaaaaaaaccatgtcacgtgagcttttttagggttcacgtgatcatctctatcgtcgaaatacaagcggcggacttcaaaatcataacttttttcttcgctcctctcttagcatcgccgtgaatcgttggtctcagtttctccgtccatctttgattcgtcgatccgtaagcatctattcagtttcatgtcttttgttctaaactttttggtttgattggggttttacctttggttaattaaagctttctagattcttagtgtttggattgaattctgtaaggtttggtaaaactataccaggttagttgctatctagctgca

SEQ ID NO: 11928 - DNA, 3000 bp, Unknown
  misc_feature (1)..( 3000): cDNA_ID_3023363_gDNA_ID_2214522_Annot_ID_184656 3000 nt of promoter + ATG
cggtgaagaatggcgactccggcatggagtcatgccaaggctcaatgggtagtcgccatgttggcgttactcgttggctcggctatggctaccgaaccttattactatagctctcctccaccaccgtatgagtataaatctccacctcctccggttaaatctcctccaccgccttatgaatataaatcaccaccacctccggttaagtctcctccaccaccgtattactatcattcaccgccgccgccagtgaaatcccctccccctccttatgtttacagctctcctcctcctccggtgaagtcccctcctcccccatactactaccattcaccgcctcctccggtgaagtctcctcctcctccatactactaccattcaccacctcctccggtgaaatccccaccaccaccatattactaccattcaccacctcctccggtgaaatccccaccaccaccatactactaccattcacctcctcctcctgtgaaatctcctcctcctccatattattaccactccccacctcctccggtgaaatccccaccaccaccatacctttacagctctccaccaccaccggtaaaatctcccccacctcctgtctacatctacgcttctcccccacctcccacacattactaggctcatcaaattcaacaaaatttccccattattcaagtaagtcctatacttatacctttacctcataatccgttttaataattgtgccctaaataaaatcggaatttcttctttcacaggttttcttttaaaaaatgaaataaaggaagggtcaaagtcaaagagaagaagaagtgaaccaaataaggatcgtggcgtggaaatcagaaacaaaacatctctaacaacgatccacatcacttcctcttcttcaatgtcgctcatcttccacttgtgcatcattatctttgcgtcttcgtcaagtcaaattgtttccaagacccttttagatcgtatcatactcctctttgttcccttttgttgttaagtgaaaaaatgggttttggtaatttaattgttgtgcatacattttctattttgttattcttccgttaatgtaatgaaagagttgttagcatataaaacaaagttcagtttcttctttctttggattatgcgatatacagtcataacattttctatcttaaaacatagttccaacgacaaaagtagttccaatgacaaagttaaaagacatattcttttaggttgggcacgacattgtttcgatctgttcgtccagagaaagttatcattgcttcaaaaggtgggaaagtggaagtaacacatcactttgatctcattggatcattaataattgtgtttatgtaatacgtcagagactcactttcattcaactaatttccacctactctttttgtttcaaccttaaaaaaaaaaaatattgagcaatactatatgcttaatacaaaaccattgactaaaattaaagaatgttgaaatgaattaatatcaaagttatagtttatattcttctatttaatcgaaacatggaaccaaacaaaagcaaatgaaaagcagcaagtgctgaagaattggttcgaaataagtggagtggttgtactttgggctttgggatagcattagctgattttgaggcccattggctaaacgtatttggtaatttgcctccaatttttttgtcaccgtcattttgtttgttgtttggcaacgacaccttccaaactttatcgttatgcttaagttgattttgataaattaatttgataatgatgaagtgaaattcaatgaagctaataaacacaattttgataaattaatttgatttcaacagtactgaaatatatagtattaggtctagtagcttccaactccactagacataaagcaattttgtcccaacaaaagttttggaataaagcatattgtatcttctcatttccaaactgtatatgagaatagaaactttataaaactggttagaccaaagtaataattatgttgttctcaattaaacagctgtgatttttcaaatccaaacattatattgatttggagcgccttaataatattctccgtgtttagttgcgctgtcttatttgtattattctttttttttttcactatttcatttttatttatttattttatctgttgaattttctcttctggctgctgttttcctctctctctctctctaaactcgagaatttttgtagagagaggaggcaaagtgcgaaagctaaacgcagatccacgatcaatctcctccaccttcaaaagccttcaaaagtgtttcttcttcgtcttcttccttttattatctgtgccttgacagatccacgatccgattctggtcaaattttacatttctgcaggtacgatcttagctctttttgttctttcatgttcattattctttttctggatctattgtttccatttttaaatttccggttgatttttttatcttgttcgatgtgattctattttgtggagggatgttattagctttaagatctgtgtgagctgcgtttttgaatgtgaatcttcctttttattcgattttgattgttaccgtttgaatttttagtctgcttaggagtcggattttgttgattttgacttcttctttatatcctttaattgttgcaaaattcggaaattttgttacgagctggggattttttccacttccttgagattgttttagggtgaatctgaacaaagacaaattcgatcattgctgattgctttgttgccgttcctcaattccatgtatctggctcttacgattgtgtaattgaaatgagattatgatgaagaatgattcgtttgtttctttttgttctatctatacatttgtggtgatatatatatatatctttgtttgaaacgttaatagataagctgctcatactagttatacaacagactccatagaaggtgacatttgtttaagatactcttgttcctggaacacatacgaag

SEQ ID NO: 11929 - DNA, 3000 bp, Unknown; identical to SEQ ID NO: 11918
  misc_feature (1)..( 3000): cDNA_ID_3023371_gDNA_ID_2214522_Annot_ID_184654 3000 nt of promoter + ATG

SEQ ID NO: 11930 - DNA, 3000 bp, Unknown; identical to SEQ ID NO: 11917
  misc_feature (1)..( 3000): cDNA_ID_3023374_gDNA_ID_2214522_Annot_ID_184653 3000 nt of promoter + ATG

SEQ ID NO: 11931 - DNA, 3000 bp, Unknown; identical to SEQ ID NO: 11916
  misc_feature (1)..( 3000): cDNA_ID_2707872_gDNA_ID_2214522_Annot_ID_184651 3000 nt of promoter + ATG

SEQ ID NO: 11932 - DNA, 3000 bp, Unknown; identical to SEQ ID NO: 11914
  misc_feature (1)..( 3000): cDNA_ID_1807585_gDNA_ID_2214522_Annot_ID_184648 3000 nt of promoter + ATG

SEQ ID NO: 11933 - DNA, 630 bp, Unknown
  misc_feature (1)..( 630): cDNA_ID_2702086_gDNA_ID_2214523_Annot_ID_134102 3000 nt of promoter + ATG
gtcatcttcacggcacagaaatatacacaaaaccaaaagcttactcaatcttttgtttctctctctttcacatgcctttgttcttactcttcctcaagactcaagtctcgtccttttctctaggccctctcactcagactcatcacactctctctcggtgcagataacgaacttacacaactccgaagctcctccctccacatctctccggttagtagatttcacaattcaatcatgcaatgctccacttagtttctacattgcttcaatgatctctttccattactccccataaatccttttccaatgatttgaatcacgggtttgaaagtttagcggcgcaactatatatttgaattaaatgaaagtttcttgtaaagttcttaacgtttttgtacgttttccatcttcttcagatttgtcgttgggttcatgtgtgtcagtatgtataattaattacttaaattagtcaactactatggaatctaggtagctccgacttatttatttatgttttggttttccagatctgttttggagaactgtgtaacatcattaagtttggcagagaaaaataagttggtgtcagtccatctctgatcttctctaacggctttggttggttctatg

SEQ ID NO: 11934 - DNA, 3000 bp, Unknown
  misc_feature (1)..( 3000): cDNA_ID_2707942_gDNA_ID_2214523_Annot_ID_134104 3000 nt of promoter + ATG
gttgttgaattatttcttacaatgtgtgatgatagctgatatcagaaaaaaaagatggaagatgttgatccaataatggttttgacccggtcacctaacttaccatggataaattatcactaaattgcatatctaacaagaaaatattacagtttgattccttattgttgagttaataacgcaccatgttcatattaatcattcaccatgcatgcatgcatgcaccacatgttgtaaacaaaatgccaaaaagactaatcacaagtctaatgggcttgggctcacaaacatttttaatcaaatcgtcgaaaatttaaattagcactggacgaaagagatggaggcgaagacagagagacactttctggtttcgaattttgggaccgccggtggtgaagtttcgagtgcgacggagaataagcgagacctgttcggcgattcggcatctggggaatgtactgagagagagaagtttctgggaggagctcaaagttagtcctcttttgctttccgtgtttcaaaatcgctaatctagaatgattatagattgctgttttcgggttttgaggtcattatgatctagattggattctattgaaattgtcttaagttatccagctaggggttttactgttagttccttcattttccctcactgctttgtctttgcaattttctctattgttgtggttctttggattttctgttttttctaggatcatgtgattgaagaggggaaaattgataaggtcctttagtttgaaaaagattgacagatgtgaaatgtgaagttattatatagaagtctagatttcttgttgcatgaagtgaggttccaagataattcgatcagattcggtcttgattcagtaaacatgtatttagaccctcttgagtataatctaagtggcttctgcacatcgctctgcatgttgttgaggaattcatctttgttggtgtataaattgcagagaatgacaaggaaaggagggagcaagaatgcaggacaaaccatcaagctccactttttctatgctggttgctcaacttgggactgttatcaccattcaaagcccattccaggtgtgcactagttacttcctagataaaagaatgtacccttttttgaaaaatttgatagattttgggaatgtgacaatttttacaggatatctaggtttaatcaatggtgggattttcctctataccaatatatactgtggcttgctatgcaatagcaaacaagaaatcgaagtaggataaggttggttatcacagtttaagttttgagtgtgtacaatgagattatgagatggatttttgcataattaagttgtttctttttgtggtgtttgccttcaggtacatgaagaaatcatctcccagctagtactcaagattttctatcttcgttatggtctaatgcagctattcaatcagatgtcattgcttctgcgtaagtctcaatttagtcgttcagttgacaatctcaaagctgctgctagtccgtgccaattaataatagcatccactatttgttttaggagatatctgaacagatagccgagtatttctctaatccatatataatcctttaaaagtcagcttgtgaacttagaagccatttactattccttcccctttagaatgtgagagttatttagtaatagtttagtcactttgtgatatttagacattttacatccaatgtgggatcttataacaagcatgtgttattttgaatcacagatgaaagaggcaggacatgagcaaatcaaaacctttttactcaatcgaccacagccatgacacggcaccgtttttggttcttgtagcagtcaacaggtgaaagagaccagagaggtatgtctgttaacaaaagcattgtgaattttttttgtattgtttatgtcttaaatccaaatatgtgaccccattttggtccatcttgggtcgcacgtgggtgtcccagttagctactctttttacatctgcactgttttggacccatgtcttggctccatgttatttattacttttatttttttgcgccaatgtcattattattcaacccaagataatttttttaataaaataaaaagttcaaagtgaaaaatgaagaaagtaaagcaaaagagatgttaagctattgattcatttttcttttacaaaaacacgtcattttcacacaatcataacgttttcttttacctttttacttaggtttgctttcattatggtctagtcttcataatcgatcatcaagtatattatactaacttttttttcttgacttttgtataaccaatgtatgagaatgtactaggtagaaaacacctttgcaattataaaaatggataatggacgtgaaaactgaaaagaataagaattgggaacactaaatacaaatcaaagacttggctgctatacgattccttcctctatttttctgtgccctttaattaaagactaactaaattcaagaagcttgaaagaagagaagacatgcactgcagaaaacgtaactaatgcattaaagaatctgtgactctctgatgtgtaaagttgagaaaagcattatttaccaacaaaacagtgtaacggtagtattcggttttttggcagttctttaaggggcatttctggtacctaactaaaacttctaacggtcctttttcctaacctttcactatcccattcatatataaatcaataaaaattccttagccatcaccatctccaccactaccaaaaagctttcttctaactcagctgcaacttcgaaaaagagaagctttttcgctttgccttgtcctcatttctctttcacacaacttttctatcttatttaaaaccactctgttcttgttttctcagtcattcctctgattcaatcagattcttttagttttcctgattctttagcagattcatgagctcataagaagaagatttgttgttgagtgttaacccagaaagaaaaaggaagactttagaatc

SEQ ID NO: 11935 - DNA, 3000 bp, Unknown
  misc_feature (1)..( 3000): cDNA_ID_2707938_gDNA_ID_2214523_Annot_ID_134106 3000 nt of promoter + ATG
ttgcctagagactataaagaaagatatattgttttgcatgggatgaattgcggggcaaatctcctttggcagagaagcattttacttgcatatctagccaatgcgatctgccataggagtattcgcccagtaatccaaccatacattatctctctgtcttcataaacatgcatcttcactactatttaatatattcttcatatttcacattgcattttgagttattggaagttggactagcaaagtatgtatatatagttgatgaaagtgtttctatatagtgaatgaatgcgtatagaaagcatattctctggcacatcccatgtttcatagagcatatgtgtctagtataatcctaaagaccccttcatgcggtcctcatgcttctgctttcagaagttaccaggctagtaaatggtatattaagttttgtgattcatgttttgataggaaattgttccatagcatatgctctttatatcaaggtttacatatacattacatagtttgagtttatcctttgaagcaataaagtgagagaggaaaactgagattatttcttggtagaaagcattacagggcgaatcctctattggcagtggaagttgatgacccttatatgttattttctcatcattttcctctgccaaaggagatttgcctcgcaatgcttcactaacgttatggggttattcatttctccaatatccaaatctagtagctaatattttcatttaatagtgttatttgaggcagctcatatacttttgtaatttgataattgtaaaagattttactagagcctcttcaaattaactcctttcttttgatttggacgttatctcttcgttagaggctttcacacacatagtcaaagaatgctaaactaatgagaatccgaaaacccaagttccacaatcaagttaaaacgatataacggtttacaaatttttatcataaaatactaagaaatgtaacatgattcattttacaaaataattatcgtaacaaaatggttttaaggatctttaggtttgatctatatcttgtgaaaaccgagaattgattgctaataactatgcatttggacattgatcctcgttggctggtgacatctctcatgattagtatagatcttgctaagtaaaaaacttaaaacggttatctataatctaaagccagtatatattatcttatgtgatttgtcaaatagctaatgatcagttacaatagcatgcaagttttgttttagttggatatacttactgaatatgctgccagtacctgacgcatctaactttgatatttggccttttcaaacctaaatcataaaatctccaaaggtgctacaagaataggatatatacaagcatttttattatttttaaataagtatttgtctatttgaatttatattctacctatggactaattaaaaaataagactttataccacaatggtaaagttgacttaattgtataactgattttatataataacaatattcgtacttaagttttcataaaagtttgaactattttttatgaacaagagaaaaatgtgcacttgccaaaactatacaataaacaatttatgtcttaggttgattggttcataatcatttgtagttgctcgcaaaggctatgtttctgctatgattgggtgctacaatgtttttcttgttaaactcattattttactactatctagcaaaattcaaagtaaataaacttaacattgcaaaaagagaaagttaagaagcaaaagtttgcgagtttttccaaaataaaactctggagaggacaataccatggatcattccatttttagagtataaacctttacaagttgtctttgtcaaactttttggcaagtcaaaagtttaattctcgaatattaatcatcttaaattataaaattatacaaacgtacgtatagagagattttattctagattggaaggatagtgccattgaatatgcttattgcaatgttatatataaacacaacacatataattattgcagtagagagatgaaaaatacatagagaaggtgaatatgcattacagggcaagatcaccattggcagagatctattacttcattcttgcatcatatgcataaatgtttgtggtgagctctctgccaaaggagatttgcccggtaattctcttgcgccaatgttttatattaatttgttggtttttggttagtaagattttaatttttgagtccaagtggacactagttcccttggatcaaactcgtcgaaatcgacgattctaagttctaactttcaagaaaatcattgaacgatatctatcaatgtgtctttgttatgtttcaaagatgttgtattaaaaaagatcgatggtcacaaactctttcctcgtggcgatcagtagatgcatgaaggtaatgaattcttctatatatgcatcaagcgggtcagtgaaacattggttatgtaactaaactttaaaacttaaaaaaaaaaaaacttagctttgtcgactttagcttagtatgtttatgttggatcagaattatgatttgtatgcggcaaagtttatggttggtccattgtttgatcaaaagaccgattccatggccgtggcagaaaccacgcatatgagaattggcttgtcttgatcatggttgtttatttattggaggatttagaatttatggttagaaactggtaaaccgaaatcaatgcttagtgaaccatgactgggttaaattaaagaaagggcaaaatgggaatataaaatataccacatcctatataagtacactgagtaagcggcaattcacaatttgataaaatttcatgcgttagaatttgcaatttagcgagaagcgaaaaagtctgctcctttcgattcttcaggggttttagggtttttctcgactcgagtaagagcgaggatatttcgcgatgttctagattttgggtatttttaatcggaaccctagtttctctgtaatcgaacc

SEQ ID NO: 11936 - DNA, 3000 bp, Unknown
  misc_feature (1)..( 3000): cDNA_ID_2707934_gDNA_ID_2214523_Annot_ID_134107 3000 nt of promoter + ATG
ctctaattgatatcatttctatcggtatgatagctttatattacacgatgcagtgactttagctttggagtaatcctaaaacttgatagtgaagctatccaggtaacttaccaatcatacaaatgcctcttatcatgtcaatgctataatgttattatttatttcaagatttgctgtaactccattttatttcagattcttaaaggggttcctgacagctcagaggtctctattgtcaaagccagcgaaataaaatacaaaatttggaagaaaatcaatgtgcaagaccgttacaaaaatgtcgtcgcggtgaaagatgttgtcagggtcattgagggtcctagcaaagtgagttcctttgcagtctggtcgtttttttgttagcaaactctttaaatatcatttgataagtcttataccgatttatatatttgtgatagggtaaacaaggtccagtggtgcaaatctacaaaggagtgttgtttatacatgaccggcataaccttgaacacactggatttatctgcactagatgctcatcttgtgttcttgctggtggcaatttcaagacaccagccctggttcctccatctccaaggagattccaacgggcagacatgggatataaccgtatgtcagatttcttcgtattattttggttctttattcttgactcgtccagtgcatgttaaagaggggcccccctacgtatgacttgtaaataggtttagtctgaaactgttatgcgtaacttagaatgcattcgtttactgcagctggagctggagggagacatcagggtggacgagggagaaggggtgacgatcatttggtaggtacttatgtcaaaattcgtctggggcctttcaagggatatagtgggcgtttagttgaagtcaaagataagctagtgcgtgtggaacttgaggccaagattgtgacaggcaagctccactgtaatttcacttctattcacagctggttgctgaatgttgaatgaattctaactctttttgtatgaacagttgagcggaaggcgatatcagatatgactgataatgtagtcgcaaccccgcagtataatatgggaagccaaactcctatgcatccttcccggactccacttcatccctgtatgactccaatgcggcattctggaggtttgtcaccttaatttcgcagtttcaagatccaatcatttgtttgtgtttttgtttctcatttgacaacatgtttgatatgtttatgtaaaaaattcagctacacctatccatgatggaatgaggacacctatgcgtggtagagcttggaatccttacatgcctatgagtcctcctaggtactttaacatggccactcttcatttattcccataaatatttcacattctgagcaagtgtctcaaaccaaaatatggttgttgtgtctcagggataactgggaagatgggaacccgggatcatggggaacaagtccatatgaagcagctacgcctggatcagattggggtagtagtactcctggtcgtagtagttacagagatgccggaacaccaataaacaatggttttgtctactaccttttatgccttaacggtttcttgctttgacgaatcttattctcacacacttttctcatgcagctaatgccccaagtcctatgacaccaagctcaacttcctacttacctaccacacccggaggacaagcaatgactcctggaaccgatctcgatgtcatgtctcttgatataggtgcctgcctatctcttagttttataccattggtgtttttgattctcatattcttaactctaccaggtggagatgcagaaaccaggttcatacccggtatattggtcaatgtacacaaagctggagaggatagaaatcccggtgttattcgagatgttcttccggtttgtcctctttaaactacacagaagaatgttgtattggagtaaacattttccagtttactgattatgtaagcctctttttcctttgtggtcatcatcaggatggctcctgtgtagtcgcacttggacacagaggtgaaggcgagacgataagagcgacacagaacaaagtgagcctagtttgtccgaagaagaacgaacgtgtgaagattcttggaggcaagtattgtggttcaacagctaaggtcattggtgaggacggtcaggacggtatagttaagctagatgaaagtctcgatatcaagatattgaagctgactatattagccaagttagttcatgagtgaccccattaggatcgtttatattttgctaattaattactctttacataacattcttgagatttatttaattctttgtgactttgcaactttattaacatatatggtttgacgtaatctttcataaacgactcttcttctttctccattttctctcgtctatctacatataaatcttccaaagaagatcacgatcacacaatatttctattgttgtacattactatataaacataggatacatagatgaagtgagctctagaaatgaaatccatggtctcttctcctaaacgaaggtctttataagaaaaacgtcaacataatttcttctcaattcgttcaatgtaaaaccttatcattgtttgtacattctactatgtgtgtttgcagcaagagaatggtgagagtagcgatcaaagtcagaccaatctacgaaccctggagtgcacactaggtgctcgacgaaatgtcccagtgagacttcacttctaaaaataaaaagtgaaattattatttccccaatgaagaagatcacgtgccatgcacctgaccgtttctttatctcttccttctggctcaagttacataaaacgtctctactctgttttcttctcgtaaacagaacagtactctcccaagaaaagctgatactttttttctcttttctttctcagtctctcatgaaagacaaagaaaccaccaccattttctcgagaaaattctgactcccttggatacg

SEQ ID NO: 11937 - DNA, 3000 bp, Unknown
  misc_feature (1)..( 3000): cDNA_ID_2707930_gDNA_ID_2214523_Annot_ID_134108 3000 nt of promoter + ATG
caaagcaaagctgggaatgtccataacgtcacctcaaggaaagtctacggatggtggctattttaccaagataaagacagaacttcagaattggatagatcttgcaacaacgaagatgcaggcgactgtggctgtttctgatataggtactatggataatcagaaagaacctggggaagaagatacttcttttgatagattgaagaagatttgggttaaattggatgacaagaccaaaataaactttttggtagtagactttgaaaagcttataggctatatacaagataagcatgggacggaagtaaaagagcactttcagaaatgtatacccatcgccaataatcttcgatggagatgttggaagtgccacatttgttctcaggttaactactgttttacggattgcaagatgcacatcttagataatcatgtgcacaactctgaacctgactttagtgctcgtcctaagtgtgtggatgagattttggctgacatgatatgctgtggggattggaagcctgtggatacagcggaggcagaaaatcttatcaaggatagagctaagcgcggggaagagtttgtttatgttaatgggtggtgtagtgattggcctgaagcgaaagatcgcgagcgggaaaacgtactcaaacagtttgccgaggttctaaaatcttcttgtgccaaggagaattgtactctttcatgtaccctttgggactggttgagagattacacagaagagaatctggaactacctggagttcctgggatctatcttgatcaatgttgcttctttaagaaccctcaatgcatctgcttcttagatcttaagcaccttgaacacatcctcaagtattttagacagctcaccacagatgttcgcgcgagtttagttccaaaagtagtgaatcagttttgggaaaattcccaggtcaaggaaagaatcgaccttgagggagtagctacttataatctgcttctggacaagagactgctgtatgaagaagagcttgaatcggataagatagggacagtagagcattataaatctacagggatttttgaggatgtaatgcctaagggtgataaaatcgtctcttggattcttgactgcccagaaatcgatcgggaatttgtgtctcaaatggcaaacggcgtacacaatagtaagctatggttagcagctttgagaatagtacggtgtgtgattaggaaaaaggaaagctactatgataagagacggaagatgctaacctatgagaagatgttgggtgaggctgagacgatttgtgacagagaagacactaggaagaatgttaatcagcggagcacatatgagtctgcacttcgaatgaaatgtgaggatcttgtaggtaagcaagatgatgatacaaaatgtttcttgagtgttgtaagagatgtttttgaaagacaaagctctccgagctttgaagtattcgaagataagaagtgtatatccgaactctcttctactgtcccgaatgatgatgtgaaaaaaagtctgttaacgctaaggaaatcactgaaagagaaggtattcttcttcctcttctttcttgttattcatatgaacaagatttgatctgtgatggctgatatgaggtgtttctttttcgcagttccctttgattgattcaaagattttgcagaacaaatctacgtacgaaaagctaatagatgtattcccgaagctatcagcagttgagtatcgcttggtggtccttccattcgtgaagaagttcttacaggtttgtcgacttgtggattttattaatcaaagatcattcacttaattccaatttaacacatttgttttctggcaggataaactgaagaaaatgatgaaaacaaacagcagttcagttgctgcaggagattctgctgaacggaaacctaagaagagacatctttgaaatctgttgttgttttgctgttgttttttgagttaaagtgagttgactatctgatgcagggatttttttttggaggatcattcttgcagatggagacaaactttttgagtattagttgtctagaaacagtcttttatgttctcggaaaatcttttggatccgagagaaacatggtgtgagaatttgtagtttgttttaggatcagatgcatatatgtttgtgtgtctggagagattgagaaaaactgggacatagatacaatggaaagctcttgttgatattcacaggctttgtcaaatttatcaggaaagtggtgaaaacacattttttacaaattgttaggaagtcaatttctctctaatccaaaagaaaaccctcttacttcactaatccaagattagttgtctcactttatcaacgaaaaaacattccaaaattgcacacacagagacattcaatgaactattttctctcatagttcaacacaaatttttacatcaaagatcaaaacttcaaacgctatttgagcaatggctccgcctctttctaggcctcacctccgcttccgtcttctcgacttcttcgtcggtgatcacatcaagaaagctttcagagacaaagaaatatgaaatgttggtaacggtgagagaggatgagaaaaaccttacttggaaaatgatcatggtatacttctactatgtgtttgtcttgcagcgagagatacatagagaagagagtagtgagaggtacgattcaaagttcggaggttaatctacgaagcctggagcgcacgctaggtgctcgacgaaatgtcacactgagagtttggtcttttgaaaaacttattacgcaatgaagatcacgtgccttgcacatgaccgtctctttatctccctcaacagctgtatatcaacgcctcgactctgttttttcctcgtaaacagaaacagaaccaatacacttccaagaaaaagctttctcttttctttctcactctcccatttccttggaccttaaagaaacccatcattttctcgagaaaactttgactacctgcgttcga

SEQ ID NO: 11938 - DNA, 3000 bp, Unknown
  misc_feature (1)..( 3000): cDNA_ID_2707926_gDNA_ID_2214523_Annot_ID_134109 3000 nt of promoter + ATG
atgtctcaaatggcaaaggtggcaaagggcttacacaatcgtgagatatggttagcagttttgagaatcgtacagggcctggttaggaaaaaggaaagctactatgataagcgacggaagatgctaagctatgagaagatgttgtgtgaggttgagaccatttgtgacagagaagacactaggaagaatgttaatcagcggagcacatatgagtttgcgcttcgaacggaatgtgagaagcttgtaggtaagcaagatgataatagaaaatatttctggactgttgtaaaagatgtttttgtaaaactatgccctccagtatttggcgtattagaagatatggagtgtatatccaaactctctgctactgtctcaaatgatgaagttaagaaaagtatgttgaggttaaggaaatcgttgaaagagatggtattcttcttcctcttctttctttttatatattcatttcaacaggatttgatctgtgacggctgatatgaggtgttttttttttgttttggagttccttttgattgattcaaagattttgcggaacgaatgcacatacaaaaagctaatagatgtattcccaaagctatcagttgttgagtatcgcttggtggtccttccgcttgtgaagaagttcttacaggtttgtcaacttcaaagaccagtcactgactcactggtgttggattaaatcttattgccagtttaacttaatttgttttctggcaggataaactgaaaaagatgatggaaacaaatagcaattcagttgctgcaggagattctgtcaacatgcagggctaagatttttggaggatcattcttccagatggagaaaaactttagagtactacttgtttagaaaacagtcttttaatgttctcggaaaaacttttggattggagagaaaaactgtatatgaaaatttgtagtttgttttaggatcagatgcatatatgtttgtattgtatgtgacaatagacacaatacaatgcattgttgatcttcataaactttggtctataacttcttgagacatggtcatagcagataaatttagtaggttggtcacacttttacttcactaacccaaagattatagtaatttcaacagattgattgtcatataaccaacattccaaaattgtacctaaactcgtcttccctttataaagggtttattggcaaagtagacactttttcaaaaataatttgcaaagtaggtagtttttttagaaattagagatatagacattttttttgctttttgtgagatagaggatatgtctaatagactaaaaaacaaaatacatatcaaatactataataccttttatcttgagagagaataaaaataatatgagagaccatgtttactttattttatttgtctttatctttttaatttttattttagttttcttaaataatttttaaaaaaaattacgttgacttttagagtatttatatgtcatcaatttaatacacaaacatttcaaagatcgttttgtacactaaacattattcattggtgtacaaatgtgtataccgatattcataaatagaagtaatattgtttttaatattttacaaatataatgattgcataaaccaaatattattacttaatataatggtgtacatgatggtgtacatgattaagttaatcttgatggtgtacaaaatgaatgaaactattatgacgattgaatagaatgtgtatataacttttaaatgatagcatacaatattggtaaacaaagtgtacaaaacttggtgtacacttacagggaatgtataaattattatttcagttagtggtgtacgtcatctcgtacaccaattttagtacactgtctcatagatctttagaggtgtacgatcatgtacaccatattttcaatcatctatgtacatcattttgtatactattatactcactctatcacttcttacaataatattatatattgatttttacattattgtcgtacactaatatttgtacaccagtattaataatatcacgtacactgtcggctgggattaaataaaaaaatgctacatatttttgaaatatagcaaaattagtctttttagattcacataaaaaatttaaaagtcaatatgattatatggtaattttttatgaagaattattatcaaacaaagtaaaaatattaagtaaaaagaaaaataagaaaaagtaaaatttgacttgaattttgtctttatcttactacataacaaaataacaaaaggttatataagtcatttctaaaatctctattagacaaaaagttgtattagagagaaaagagaaaattgtttatttcttttatttctataaaaactacctactttgcaaattatttgttgaaaaagtgtctactttccgacttatctcttctataaataaacagacaacacacagagagacattcaacttcaagggacgattttcctctcatagcaacaaaacaaatcacctcaaagataaaaacttggaacataaaccaacgaaatggctccgtctaatgatcatttgcctttttctagtcctcacctccgcttcattcttctagaattcttcacctaagaaagctttcagagacgaggaaatatgaaatgtaccattttataccgtcctactaaatgtgtctgtctcttacagcaagagatccgttccgtagagaaaagactggtgagaggtggtacagttcaaaggctgagattaatctacgaagcctggagcgcacgctaggtgctcgacgaaatgccacactgagaggtcatcacgtgccatgcacatgaccatttctttatctccctcttgctcagccaacagttgtatataaacgcatctactctgttttcttctcgtgaacagaacaattctctcccaagaaaagctaacaactttttctttctcagtcaaagccaaagaaaccaaccattttctcgagaaaattctgactcccctggggtacg

SEQ ID NO: 11939 - DNA, 3000 bp, Unknown
  misc_feature (1)..( 3000): cDNA_ID_3436094_gDNA_ID_2214523_Annot_ID_134110 3000 nt of promoter + ATG
tcatagatcttgcaacaaagaagatgcatgcggctgtgactgtttccgatacaggtactttggctaatcggatggtaacgataaagaaagatccttcttttgatctattgaagaccttttgggttaatctggatgacaagaccaaaagagaacttttggtggtagattctagaaagcttatagactatgtagagaataagtatgttgacaaagtgaaagaagattttgggaaatgtgtatccgttgccaataatcttcgatggagatactggaagtgccacatttgttctcaggtatactactgttttacagattgccagaggcacatcttagataaccatgtgcaaaaatttgtacccgatcccagtgctcgtcctaagtgtgtggataaggtattagctgacatgatatgttgtgggaaatgggagcctgtgaatacagtagcggcagcaaatctgatcaaggatagagctaagcgcggggaagagtttgtttatgttaatggatggtgtagtgattggcctgaagctaaggatgaagagcggagtaaaatactcaaacagtttgctcaggttcttaaatcttcttgtaatgaaaatgatactctttcatgtaccctttgggactcgttgatatattacacagaaaggaatctgcaactacttgaagttcctgggagctatcttgataaatgtagcttctttaagaaccctcagtgcatctgcttcttagatcttaagcaccttgaacacatcctcaactattttagacagctcaccacagatgtccgcgcgagtttagttccaaaagtagtgaataggttctgggaaaattcccgggtcaaggaaacaatcggtattgagcgacttacatctaatctgcttcttgatgggagactgctgtgtgaagaagagcatcattttgatgacacagggagtgtagagacttttaagtccagtggaatttatgagcatgtgatacctgagggggacaagatggtctcctgggttctcgactgcccagaaatggatgagaaacttgtgtctcaaatgggagagggcgtacacaattttgagatatgttagcagctctgagaatagtaaggggcatggttaggaaaaaggaaagctactatgataagagacatagaatggtaacctatgataagatgttgggtgaggctgaaaccatttgtaacagagaagacaataggaagaatgttaatcagcggagcacatatgcgtcagcgctgcgaatgaagtgtgaggagcttgtagtgatacaagatgatgataccaaatgtttcttgaatgttgtaagagatgttcttgaaagagcaccttctccaaaatatgaagtattaaccgacaaagagtatatggagagtatatctgggctatctactgctgttcaaaatgacattgttataaaaagtctgtggaagctacgaaaatttctgacaaagaaggtatgtattcttcgtcttcgtttctttctactcattataacatgttttgacctgtggctactgataaaaataagaaatcttgggtattttttgcagttccatttgattgattcaaagatattgctgaacgaatttacacaaggagagctacatgaattcccaaagctatcagcaattgagtatcgcatggtggtccttccgtttgtgaaaaagtttttacaggtttatcaacttacggaaattatcaatcacagggaactcacttggtgtttgttacttaattccaacacaacataatttgttcttctcgcagggtaaactgaagaaaatgatcatgaaaactaaagaagatgacttcagttactgaactagaagctaagaagagagctctgtaaaagaggtaaaaatctaatgaatcctatcaacagttgttgttttggtgttgttctttgggttaaatttagttgtgttttttatgcagggctacaatttttgaggatcattcttgcagatgaagaagataaacttcgagtaggagttgtttagaaaacagtcttttatgttctcgggaaaactttgtacccgagagaaaactagtctgaaaagttctagtttgttttaggatctgatgcatatacgtttgtgtgtctcaagagagattgagaaacacattgagaagtggtgagaacacatttttatcaaagtgaaaattgtaaaatgcctcttaaaattgttgccgtccaaaaaacagacgttaggtggtcgtttagatttgactaattgtttatgtcgacaccaaatccaaagcccatttgacccgccttacaaaacaaaacatcggcccaatctgtgtccccaaaaaaaaaaaacttaaagcagacgtggcagaccctgattcgttacactatcgtgtcgagcatatttttctcgcgtcgccacgatttggcaataccctgagaaataaataaaaatcgaaaatggattataaggtgaccttcgtctttggttgaccatcaaaaactacaacgctctttctccgtaggaaaggggaagcaaataaattatcgaagcccactggtttcggagctgatcggtctctatttctctcttcatacatatctcgtaagcttctcctccctcttttatcttcttccaatctcctcaattgctttctcctttaatgttttcgtttctccaatcgttatttgtgagtcttttctattcagatctgtgtgattgttgatctctgttcttagatctgtttcgcgttttctagatatcgaatttctatgtatgtaatacgatgtagatcggatgcgttattgtagatctggtttttttggatcgactgagtcaaaaatgattgactcagtttacgaaattgttcagttacttagctgcgaaaactgtgattcgtgaattttgtagctagattatgaatgtggttgcatgcgtttggatttattgagcttacttggaagtgatttgtgatttattattacagaagcagataaagttgatcggatactaga

SEQ ID NO: 11940 - DNA, 3000 bp, Unknown
  misc_feature (1)..( 3000): cDNA_ID_2711353_gDNA_ID_2214523_Annot_ID_134115 3000 nt of promoter + ATG
cgcctggtgccaaaaagagaaaggctttgaagaagaagcagcaggagcaggaagccactggagtcgctaccaacaacaaaggcttcaatggtcatggtactgtctttgttactgtttttggttttcgcttagaatttgtagttgctggatcgatatggattttggtgattctagttgctgtttacaggattttatgtctcaaatgggtttctggtgttaggtaaagtttcttcttttggtattatacaaaacgaagtgaatgatgctttggtcctactttatagggaatttttggtgggtggggatgaatctgatggggtattgagatttagccaatctctgtttaattattgttccaaagtttgtgactttactctaatcacatcatgtctgagttgtctctgtgttgcttctggatacttgcaagttgcaacaagtgctggatgttttttcctatcttttttagtaatcctctttgaatctgaagagtaagtcttttattgccctggatctataagtttactgaatatctcaggacatgatgaacatggaagccaagatgagagagacagtgatggcaatttgagttcccctggatctcaaggaaatgaagaatttgggactagagatccatcacctcctccattatctagtttagggaaagacattgttaaagagaaagcagaagatgcagactttactgggggacaagtagcgaaaggtgaagacgttattgaagttggaagaggaagaacggatcacgaggagaatggtgtaaacaaacaactcaattcctgtcctgaaaattttactcaaacttctagagaggctgatagtacttcaagtttggaaatttcacctgctcttgattctgtcaagcctatgggttcttctgtctcaaaagttgtgatgtctgacaaaagtaagcaagttgagagttcgacggactcggattctctccaacagaagtctgatgaaaaggaagagatccttagtccaagatctgctgaggaaactaacaaagaaatcaagaatgtgaaagaatatgaagtgccagaatgttctaaagaaaaggtataatttccttctttttttcttgcatcctctacttgaggttatttttcagttttctgaatcttctggacatatgtgcagagtcttttgccttctggtccaccagtttttcgaacgtcgtggttgagttgctgcggtttgtttgatgtaatggcaggatctgaaagataaatacgggttagtaattcttttataaataagttcagtaaaactttttcacttgactctgagcatcctaacattctagtaagctaagtaagagggttcatgggcttgagcaagaatttcggatagtggatgggctcctaggtatagtactgcttagctcaagagtttcaatcagtttctctatcctcattcaaacccttctcagaagtaatttcctactatatcttggtcatgtttgttcttgctttcaagtgtttgaaattggtttgaaccaatgataaattccaagtcatataataacatcacctatttggctaccgttgaaacctagcactgtaggattctagtctctgaaactttgattcctttactcgaaagctacctccatgttgtttacatgggtaatcagttaacttttacccaccgttcaaaggatcagagttttctagtattctctccactcttctcgaaggacctagttctgatctttcttgatattatgattcataaagtgtagttcatgaatatttggatatgtatcattttgtctcatcagtgtctatgtgtgatgtgaagaacaggaggaggataaaattgcaaacagtgaacagcagaagctcaaagaacagccgacaatacatgattcatggtctgtagattcttctctgtacaattctcaaccatttatatctgttagaacaataatgtgagtgttattaagcaaacatacggaaaaaaacataaacttgtcacgttttggaaatgtatattcgagatctgaacacagttatgtttttcgtttatacatcatatttgtctctctatcaatttggggggagatcgaacagtccaacgctgtgcttatgttcgacagctcttataagttgttaagctgtatcaccttatgatcaatttgctttcaaaattctgtttttttgttcagaaatttcatttcgtaaagtgaacataataatcaaaccgtgaggttttctatcagatttcgcatctgttttgttcttcagtcagactcgagtcttgagagatctgtgtcggtgattaacgcggcataggagaataaacaaaacacgaaaataaatgttttttaatatttaaaaagcgtaacttttgacgttttaaggccgtaacccacttagcttgcttcactggaatcaacccgctaagctcgttctctactagatcccatccgaaaaatcctacttgcttcccaaagttgcaatctttgaggatctttgacataaccataaatatcctctggtaaatcttttgcctcaatattttttattcttccagcaagcctctttcgatctcattgcttaattctgggtattgcttttgatgtattactagtttgtgattttgttttggtggaacaaagttatttgattggatccatttttaacatttttaacattttgaactcttcttcgagtagtaagatccgagtgtttttgtatatgcttcagaggtaactcttgtttagtttggtccatatctagatctgtaactacgtgttggttcttgctctgctcaagtttagaaaattgtgtatataagctaacgaatttaatctcttgtgttgaccaaacaaaaaaatctcttgtgcctgaaaaatttgactgatttgtttttagtttatacttaacatttctactggttgtattgcgccagtttcatgtcttctttgtgattggtattttaggtggatgtgagtaaggttgcattgattccaaggacatg

SEQ ID NO: 11941 - DNA, 3000 bp, Unknown
  misc_feature (1)..( 3000): cDNA_ID_3023398_gDNA_ID_2214523_Annot_ID_184687 3000 nt of promoter + ATG
ttgtgaatgaaaactagtatgtaatctagtaacatttgctctttcagatttttaattatcaacggagtatgtgataagttcgaatcttctacacaattaaaaatatgataacttcgttaaatagtttaagaaagctaagatgaattaacttatgggaagttggaaacaacactttttgtgtgttttactgggaaaggaatctaaacgtctgcgggtacagacacatcagggcattgctttcggcccacgcgtactattttctatatatatggtgctgtgttttaacgttagcggccggtagcagagtacaaaataaattcattttattaaacatagaaacaaaaaaaataattagtagttctaacttttagtaatatttgaaaaaggtgctttttagttattttcaactcattttgataattagattttcgttctttttaattatagaggttcaattatgaaattttacaatgtttaagactttacaatgtttaaattttagtactttttatacgaaatagtattttgagatcaaactacaagataacaccacaattattttgcaaaaccaagtgcttaagacagtttaataaagacaaaaataattagtaattaagaacacctaatgatgaaagaaccatgaaagattgattcaccataaacacaaaaattcatctaaacaaggttaacaattgtctccttatagcgcttagatttcacaatttatgatgattgatgactcaattactaaaatttctattttgttttcctaagcttatttttcaaccgatatataaggaagaaaaaaacacttgaaactacagacgctaataagtactaaagtgaatgacatctcttttatttgtttctcctttttttcgttgattaacaagaaatcaacaaaataatctttggctcggcatttagacttttaggatctgaaaaatgaaaattggcggagtctacgcaggccctacttttcagatctatcttgaaatgcgaatattatatactctggaagatttaaattatctggtggagtaatcatttcagtgagaaatagtaataaattaatactactatagtacattagtagtactatacctgaatatgcattggaatttgtggtagaagactagaagtagtaagcttcttttgtttttaatcaaacaggtagtaagcctcataaattatgtgataaaaactgataagaattttcttttgcaccaaaaaataaaattaaaaaaatgagaaaaaaaaaactgataagggttccgattttgggaatagcaatagatgagagctaaactgaaattgttataggagtttagatattgtttagttatacttatatttgtatgtcgataaaatataaactgtgaagtcatggtgttgtgctggctacggaacaaaccacgtaaacgggtttatcctgattattcgttgcttacagttttggtttaattcaacacgtacgcaaataccacatgcaaatctaattaagtaacacaaaaatctggatttagtttggcaagtaaatggccttcgccaatggataatgttttccttaagattcttaaaccttgtctttttaacttttaagcaacgtatgcttggataatatccaataggcatctcttgcaaatatgataattaagaactcgtacaatttatatcgattgtcttctaatgtacgtaatttcattagtttactccttgtttatattcgtgtttatgagtttgagtttatattttagtacattaccgtaaacaatcctttatacgtgatatactgtttttgtttgttaacagggaaatatataccattttcgaactaccctacatatatatggtagcctaatgatatcgtcgattgtataactatgtttggataactaacaaaatgcttaatccaatattataattttatagtcattttgagaagatttgttctaagacaaaatatatatagataagaaacataattgcatttaattttaatagaaattgaatgtaatttttttgaaattaaaagttagagaggtattcaccatttcacctagtgatttgaaatttagcaacaaaaaggaataaatcttatgttattcaccattttacctagtgatttgaaatgctactttaaaattcactgctattggaaactttttaaatattggatttttagtgacatcaagggtttatagaggattttttagttaaaaatacaaaatctaaatctcctagtttcaactttttaagtgaaatttgaggagattttacaacaaatcataataacttcccaaaattcacctaaaatcatctaaaacttaaaatcatttaataggattgaataaggttcattttactacttggcagttggcacataatataaaaagatggttagttaagttattgtcttaagttatatgattgtgcattgctgttgaaagatttgctgatctacgttgttgtcatcgattcgtcaagattatacgaaccagctacatcctacatgtctggtttttataatcacattgaataaaatgaataaatatattttattgaaaacgtcacgtttaaattcatatacatttgattgattatataatgtagtccaattaattaatctctcctctatacagctgtttctatagattattaattaatggacttcctcgtttcacatggtagacatttcagatttagctttgtgtttacccagatctggattcaggtatctcggtttaggaattgtaaagtttcgtgtagttttatggggttgtgttatcggttaaatttggtttagtctagttggaactcggtttgcttgtcccgtttgttttaattatccggttatatttggtctaacgaggccaattaatgcccacgattatacaaacttttcaatttaaagttgacttttactttcattttaagacaatggatactcattttgatcgatgtagatagacatagagaacaagagaaaaagagagaaag

SEQ ID NO: 11942 - DNA, 3000 bp, Unknown
  misc_feature (1)..( 3000): cDNA_ID_1028949_gDNA_ID_2214523_Annot_ID_184683 3000 nt of promoter + ATG
acaacaaataaacaaacaaacaaacaaacaaacaaagtagcatgtttcttatatgttcacgttgtcatgccagactattttttaggaatggctattgttaatagatttttaaatattgccattcatcgatttctcaggaaggaaataatatgccgggagaaaaagaaaagaagatcgaacctaagaaccttacagaagcagagttaataacgatggaagaaaagtcccggatggagcatgagcataccatgaatataatggaacacaaagtaaaactgtatttaaaacttcgtataggtttaaacatgttcttgacaatacgtgattgattttaatattctctcgttatctatctttcaggtggagcatgcgctaaaacaaaatgaggaaacatatgacaaagagatgcagcattgtgtgattgatgtatccaactctactgataaagtactaataaaagatcgaccacataaattcggtgtgatacttgcacaactttcaaattatcatctacttttattctgcatgttttattgtttttgtttcttctacttttgcatttttccaactctattgtaatgttcgtgcgtcaatgatgcctccatacatgcatgttaaaccttgtttgttaataaaatgtgtttactaaaacatacaataaatctgaacaaacgccaaattacaaatttacaagtgatcaagatgtggattttcaaactaatatttacgctttgtataaaatcttgattaaaatcagtaaaaaaaaacgagtaacggtcaagaaaataaatgttgatagagatcaacataaagaaatgtaagaaagaaaaaccacgaagcagattattttaactttcaggaagtttttaagtgatccagtggataggtggtccatatatagtccatacgttacatgttcaagcattgacttctaactttcaatagataaaggacccatacgttacatgttcaacaatgaatttataatatagtacgtacgtggtgtttagtcccaactttgctcctctcatatatacgtgttgtttagtcccaattttcctcccctttcacgcctcagtctcatcctggctctcatatagacattacaaagtttgagtttatcggactgtttcttttttctcattttattttataattgcaaaatcaattacgtggtgtttaagcctaactttgctcctttcatcatggctcacatgcatagacgttataaaatttgtcttattatactgttatttttatcatctacttttatagtttttacaaaattagttgaatttgttttttaataatgtaattaaaaagaataatatttttactattaagaaaaatatcaagtggtccattaatgaaaattaaaccttactttttatatatgatttaacttatccattcatttttcttttgttattcactcatttatatatatatgattatttcgtggattaactaaagttgcctatatcttttgctcttcactgacaaagggataagaagcttgtaagttttacttggtatatatagtctgcctattcttcctctcttcattctccttttcaaaagatattatttcatgatgttttattatcagaatatggctgatcaggaactgccaccctccgttacaagcatagttctagtagggcgtaataatggcaatggaaaaagcttcactggaaacaccctcctcggtgaaaaactcttcatatccaaagcagatgcaggaggtgttaccatggtaattaagtaaaatgtaaatatagagctttgagataacagtaaggtaaaaaacagtgtgttttgctgtgcatataaatgtgaagtgattcctaccaaacaaaaaaaaatgtgaagtgattactgtatgcttcgcttttagataaaactaagacttaattaaccacggagaacatttttaatgtattttatatatttgttttctaaaatgtttttacacttttagacatatcataagagtattcatctactgatacacaataaccactagatgattgactaccaaaccaatatttaggaattactattgcatatagattttaaaaatcctgcaaatcatcggtttctcaggaagaagacgataagctcaaggaaaaagaaagggagatcgaatctaagagccttgcggaagcagaggtaattgcaatgaaagagaggtcacggaaggagcatgaccatactatgaatatggcacacgaagaagtaaattagtatccaaaaaaacattgtataggtgaatacttgttcttcacaaacatgtgattgattttaatattctctgtttaatctatctttcaggtggagcatgcgctaaaacaaaatacggaaacacatgaaaaagagacgcagcatcatgtgattgatgtctccgacagtactgccgatgaagtagtaataaaagatcgaccacataggtttggtgtgattgtttcacaacttttaaatcatcatctactactgttttgtgtgttttattgcttttgcttcttctacttttgcattttcccaactctactgtaatgttaaggatatctccataccgtctttgccaacaatatgtgtctactaaaacatacaataaatctgaaaaagatgaattaagtgatcaaaatgggaattttcaatctaatattagaagcctataaatctagtgatgaacaaaaaaaagttgtaatgaaaaaaaaaacaatagtgatgaacagtggatttttggaggcagaccgacacgtttaataaatgggctcagccttatctctaggcttttgtgactgttagtgtgacatttgattttccccaaaacataaagacaaaaaggagagaaacaactccacccacatcacacaaaccaacaaacccacaagctccataaatctttcaagtgaacgactaaccaatacggcaatacaataccgaacctatcttcgatatctctagtctgtttttgtcgtaaatccattgatcatg

SEQ ID NO: 11943 - DNA, 3000 bp, Unknown; identical to SEQ ID NO: 11940
  misc_feature (1)..( 3000): cDNA_ID_2711353_gDNA_ID_2214523_Annot_ID_184682 3000 nt of promoter + ATG

SEQ ID NO: 11944 - DNA, 3000 bp, Unknown
  misc_feature (1)..( 3000): cDNA_ID_1015460_gDNA_ID_2214523_Annot_ID_184678 3000 nt of promoter + ATG
tctggacttgtgatgcaactcttggctggttccaagattattgaggttgacaacaatgttcgtgaggatcgtgccctcttgtaagtgttttcgtttcccattatgaagtattggcattacaatacgtgtttggttgaactgtttcaatgtctggtttgaattgattgagctgtttttggaaaaccctaaggttgtggtcgtgtgagttcttattctgtgtttgtacttattttgtaggaatggtgctcagaagcttctaggtattctgattgccattggtgaggctgttgcatatgttctttctggaatgtatggtcccgttggacagcttggtgttggaaatgccattctgatcatccttcagcttttctttgctggaatcattgttatctgccttgatgaactccttcagaagggatatggtctcggatcaggaatctcccttttcattgccaccaacatttggtaggtcaacttcttcctcactttaaaaaatccaaaatccttttcggtatattgaactcataagagtttatattgatgttctgcagtgaaagcattatctggaaggcatttagcccaactaccatcaacaccgggcgtggagctgagtttgaaggtgctgttattgcactgttccatatgctgataaccaagtccaacaaggttgcggctctccgccaagctttctaccggcaaaaccttccaaatgttaccaacttgcttgccacagtcttgatcttcctgattgtgatctacttccaaggtttccgtgtggttttgcctgtgagatcaaagaatgcccgtggacaacagggttcttacccaatcaagctgttctacacctctaacatgcccatcatcctccaatccgccctcgtctcaaatctttacttcatttctcaggtacagccattctttccacttcactgtatgggacgtatctccacaataacatattgttgacattgaattttcctcgtggtcaacagcttctctaccggaagttcagcggaaatttctttgtaaaccttttgggacaatggaaagaatctgagtacagtggacaatctattccagttagtggtctggcttacctcatcacagctccagcaaggtaatgcagcagtgtctttcattattcgttttaatcaattcaaagttggcatgcatcaactgagcttgatgaatatatgttactatgtggttgcagtttctctgacatggcagctcacccgttccatgcactgttctacatcgtcttcatgctcactgcttgtgctcttttctcaaagacatggattgaagtctctggatcttctgctagggatgtagctaagcagctaaaggtaataaaatcataacagcttgatgtatataacctgaatgttaacatggtgttggatctctgactctgaaaattaaatgtcacaggaacaacaaatggtgatgccaggacacagagaatcaaacttacagaaggaactgaacagatacatcccaacagcagcagcttttggaggagtttgtatcggtgcacttaccgttttggctgatttcatgggagccatcgggtcgggaaccggaattctgttggcggtcacgatcatataccagtatttcgagacctttgagaaggaaaaagccagtgaactcggcttcttcgggttctaagttagcttaaagaaggtgtaaactttgcctgaggcaaaaaagcagagcagaagaggctttagcttctgtgcccacctcaaacacagacaatttgtggtggcacttgggttagactacttttttttgttgttgttgaaacgaaattttctctttagtcatttatgtttttttgttactttttacaagttaaaaaacttatgtgatagacgcttttctaatgtatgtttctaggaatttcactctttgacccaaataaacaaatttacagttttgaatacaaagcaatttattatcttcttggttccagccaatgtgaaatgtttttcgtagcatactttgcattacatgcaagcccaaatggtgaaactagagaaacctccaacagtatggtgaaagtatacaaccctcaatgtggaacgatatggttatgagtaattgatctcaactactagctaatgcagagattggtaagtgtgactaattatgatccgttacagtgttacatactgctctttaatttcggcattcataacaacaaagattttttttgagatttttgccaaacgcgttttacaaatctttttgctcataaacttcttctttgttcttcacactcgcaaataaatttggtgtcgctgttctacacagtccaactctaaacacagatatgatatcttaggggtctttgatttgacgagccacactaattttgtagccatccatcgtcaagccacggaggcaatattcgcatccttacgacggaggagctcgcagtcactggaggcatttttgacaacaaccgttaatctctccggcgtcccgctaattcaaaccctagcttcaatttcaacagagctcgtctcgtgctttatctcttcctccaccgttccaaatttcaaagagactccaaacttgacctacctcaaattcatttgcaactcttgatatttcttgagaacgagagatggtattagttcttttgccaccgacgagaagagaataaagctttgagctcgtagcgttctctaggctaaacttttaaaaacactctccataaaaacttaacaagagaagaatggtgaagtaacgtggatatcagaataggcaagaaaaaaccaattataacttaataagaaaaagggtcctaatagcaaaattagaaaatagaggagcccaaaaccctagtcaaaatagatccgagggtcttaattgcaaaattaaaaaacagaggatctctcgaaaaaccttaaaccctactctcaagtctcaattcggcgcgacggactctttgttcacttttgtaattaagattctcttgtagtgtat

SEQ ID NO: 11945 - DNA, 3000 bp, Unknown; identical to SEQ ID NO: 11939
  misc_feature (1)..( 3000): cDNA_ID_3436094_gDNA_ID_2214523_Annot_ID_184677 3000 nt of promoter + ATG

SEQ ID NO: 11946 - DNA, 3000 bp, Unknown
  misc_feature (1)..( 3000): cDNA_ID_3023413_gDNA_ID_2214523_Annot_ID_184676 3000 nt of promoter + ATG
tctcaaatggcaaaggtggcaaagggcttacacaatcgtgagatatggttagcagttttgagaatcgtacagggcctggttaggaaaaaggaaagctactatgataagcgacggaagatgctaagctatgagaagatgttgtgtgaggttgagaccatttgtgacagagaagacactaggaagaatgttaatcagcggagcacatatgagtttgcgcttcgaacggaatgtgagaagcttgtaggtaagcaagatgataatagaaaatatttctggactgttgtaaaagatgtttttgtaaaactatgccctccagtatttggcgtattagaagatatggagtgtatatccaaactctctgctactgtctcaaatgatgaagttaagaaaagtatgttgaggttaaggaaatcgttgaaagagatggtattcttcttcctcttctttctttttatatattcatttcaacaggatttgatctgtgacggctgatatgaggtgttttttttttgttttggagttccttttgattgattcaaagattttgcggaacgaatgcacatacaaaaagctaatagatgtattcccaaagctatcagttgttgagtatcgcttggtggtccttccgcttgtgaagaagttcttacaggtttgtcaacttcaaagaccagtcactgactcactggtgttggattaaatcttattgccagtttaacttaatttgttttctggcaggataaactgaaaaagatgatggaaacaaatagcaattcagttgctgcaggagattctgtcaacatgcagggctaagatttttggaggatcattcttccagatggagaaaaactttagagtactacttgtttagaaaacagtcttttaatgttctcggaaaaacttttggattggagagaaaaactgtatatgaaaatttgtagtttgttttaggatcagatgcatatatgtttgtattgtatgtgacaatagacacaatacaatgcattgttgatcttcataaactttggtctataacttcttgagacatggtcatagcagataaatttagtaggttggtcacacttttacttcactaacccaaagattatagtaatttcaacagattgattgtcatataaccaacattccaaaattgtacctaaactcgtcttccctttataaagggtttattggcaaagtagacactttttcaaaaataatttgcaaagtaggtagtttttttagaaattagagatatagacattttttttgctttttgtgagatagaggatatgtctaatagactaaaaaacaaaatacatatcaaatactataataccttttatcttgagagagaataaaaataatatgagagaccatgtttactttattttatttgtctttatctttttaatttttattttagttttcttaaataatttttaaaaaaaattacgttgacttttagagtatttatatgtcatcaatttaatacacaaacatttcaaagatcgttttgtacactaaacattattcattggtgtacaaatgtgtataccgatattcataaatagaagtaatattgtttttaatattttacaaatataatgattgcataaaccaaatattattacttaatataatggtgtacatgatggtgtacatgattaagttaatcttgatggtgtacaaaatgaatgaaactattatgacgattgaatagaatgtgtatataacttttaaatgatagcatacaatattggtaaacaaagtgtacaaaacttggtgtacacttacagggaatgtataaattattatttcagttagtggtgtacgtcatctcgtacaccaattttagtacactgtctcatagatctttagaggtgtacgatcatgtacaccatattttcaatcatctatgtacatcattttgtatactattatactcactctatcacttcttacaataatattatatattgatttttacattattgtcgtacactaatatttgtacaccagtattaataatatcacgtacactgtcggctgggattaaataaaaaaatgctacatatttttgaaatatagcaaaattagtctttttagattcacataaaaaatttaaaagtcaatatgattatatggtaattttttatgaagaattattatcaaacaaagtaaaaatattaagtaaaaagaaaaataagaaaaagtaaaatttgacttgaattttgtctttatcttactacataacaaaataacaaaaggttatataagtcatttctaaaatctctattagacaaaaagttgtattagagagaaaagagaaaattgtttatttcttttatttctataaaaactacctactttgcaaattatttgttgaaaaagtgtctactttccgacttatctcttctataaataaacagacaacacacagagagacattcaacttcaagggacgattttcctctcatagcaacaaaacaaatcacctcaaagataaaaacttggaacataaaccaacgaaatggctccgtctaatgatcatttgcctttttctagtcctcacctccgcttcattcttctagaattcttcacctaagaaagctttcagagacgaggaaatatgaaatgtaccattttataccgtcctactaaatgtgtctgtctcttacagcaagagatccgttccgtagagaaaagactggtgagaggtggtacagttcaaaggctgagattaatctacgaagcctggagcgcacgctaggtgctcgacgaaatgccacactgagaggtcatcacgtgccatgcacatgaccatttctttatctccctcttgctcagccaacagttgtatataaacgcatctactctgttttcttctcgtgaacagaacaattctctcccaagaaaagctaacaactttttctttctcagtcaaagccaaagaaaccaaccattttctcgagaaaattctgactcccctggggtacgatg

SEQ ID NO: 11947 - DNA, 3000 bp, Unknown; identical to SEQ ID NO: 11935
  misc_feature (1)..( 3000): cDNA_ID_3023417_gDNA_ID_2214523_Annot_ID_184675 3000 nt of promoter + ATG

SEQ ID NO: 11948 - DNA, 3000 bp, Unknown; identical to SEQ ID NO: 11934
  misc_feature (1)..( 3000): cDNA_ID_2707942_gDNA_ID_2214523_Annot_ID_184673 3000 nt of promoter + ATG

SEQ ID NO: 11949 - DNA, 3000 bp, Unknown
  misc_feature (1)..( 3000): cDNA_ID_3023424_gDNA_ID_2214523_Annot_ID_184672 3000 nt of promoter + ATG
gggtcacaagccttgcaagctcaggagaaaaccatttaggacacttaaactgccctttatatatctttgtatacataaccaatatgttcttgtcatcaaatggaagataaccagccatcaatacaaacaagatcactccacaagaccaaatatcggcttttgcaccttcataacctttccttgtcaaaacctcaggcgccaaataagctggtgtcccgcaaaacgtttgacagattccttcttgcttgagctgctccgagacaacgctgagcccaaagtcagagactttcacgttccccttgtcgtccaaaagcagattctcaagcttgagatcgcggtggtaaacaccgcggctgtggcagaaagcaacggatgagatcaactgctggaaatatctcctcgcggttccttctcgaagccgtcctctagccaccgtattataaagctctccgcctcgaacgtactccatcacaatgtaaatctttgtcttcgtagccataacctcgagtaggtgtacaatgtaagggtggcggacacggcggaggattgaaatctcccgtttaatatgaccggccaatccactcttcactatcttctccttgtcaatgactttgatggcaacatcctcgccagaatgaatgttccgtgctaaatagaccttagcgaagcttccgtggccaagaagctttcctatttcgtacttgtccatgagaatagagccttgtggagtccgcggactcctcgggctctctggagtactggtctctttgttcgtattttttgtaacgattcgagcaagaagacccgccatgaattgtattggcgttgggccggggatggccaacggtgtagatagtacttgagccatccgtaggctgagacttttatttagttctggttgctctctaagtgtaaatgtaactgttgtttgttgattccgacacggttttaccgggaaacgaaccaaaacaagaaaatgaaatgaagaaacggacaaaaataagatatggtggggttgttgtttcggttgtgatgttgtcttaacttggcctttttcgtgttcgttttataacagttttcgagttgactttatcttatgtttcgagaagctgaaaagtcatttgattttaaaatattgctatttgatgttgaagttttatcctaatccaaatattttgccaacagaataacacgttggacggattttcaaattataaaaggcaaacttatatgttctatccatacgcaatgtcaactttggaatacatttaagctttcttaaaggacagataataaggttgacttatcaatgaggctgatagataagcagatcatggttcgttaagatgtcatcacacattttatttagcaaatgtataggtttatgtgatacgtgagtattatagtctttaaaaagatactgtatggagtggtatttgtgggcaccacgtgttttgctgagtcggtgcttactgtacattgtggacttcacgttgcagaccaaaaccagtggcttcaaatttaagactccaagtttcactttctccttatttatttttttgataaaaagttttcaattagattatattcatagtttcatacttccaaaatccgttttctgtattttaatttggattacgagactaatcttgagtgcaactttatcatccggaactttattctgaaattggatataatcaattaaattcagcttgtttgtgtacaagcaatagcattcaaatagattcagctaatataccaacacttagactaaattaggagaatatatcatgtcataaattgttcttcagataaaaaatctcaattgatgatagtagtttattcattttaatgcataattacgaatttaaaactctcaagaaaaaaataactacctcagaaagatttccaggaaagcttatgctaaaatatgcaagcacgacggaggtttatcctctttcgtataatttgtgttagtattgtattaagaaatgtataaactaatacaacatctgctgtcaaaaaagaagaagaaagatctaatgcatatataaaaaaaaaaaaaaaaattttaccaaaaaaaaagaaagaataaaagatcgatgtgaagaccactttaagatagtacatttgtttggataaggtgtattacgttaataaataaaatattatctaaaaggaaagattcaaaatttgtaatagttgcaaataaaaaacacaaaatttggtagtaaattaatatgtaagaaactattcagaatatgtagtgtaatgattatggagaaagatacttatcattcatgagaaacaagattaacttatacacacaacacagttcatgaattctaagagacaaccaagaagagatagatacgaagagacaagtgacgagtgaagagtaattagaactctttcctaacaatgatgaattgagttaagttcctatattgttggtcaaaaatgacatccttaagagaaaaggtcaataagttgttagagtcactgcacacaaacacaatgatctgtatccgagtctgattagagatttcaatacattgaacatgacctatgattatgaattgacaattgagtaccagatgagtttacatttacatatgcataaaaagccattgtctaactcatcattatacaaaaagaaaagggttgttgaattatttcttacaatgtgtgatgatagctgatatcagaaaaaaaagatggaagatgttgatccaataatggttttgacccggtcacctaacttaccatggataaattatcactaaattgcatatctaacaagaaaatattacagtttgattccttattgttgagttaataacgcaccatgttcatattaatcattcaccatgcatgcatgcatgcaccacatgttgtaaacaaaatgccaaaaagactaatcacaagtctaatgggcttgggctcacaaacatttttaatcaaatcgtcgaaaatttaaattagcactggacgaaagag

SEQ ID NO: 11950 - DNA, 630 bp, Unknown; identical to SEQ ID NO: 11933
  misc_feature (1)..( 630): cDNA_ID_2702086_gDNA_ID_2214523_Annot_ID_184670 3000 nt of promoter + ATG

SEQ ID NO: 11951 - DNA, 3000 bp, Unknown
  misc_feature (1)..( 3000): cDNA_ID_2707908_gDNA_ID_2214523_Annot_ID_134116 3000 nt of promoter + ATG
cctgctgaaatgtcaatctgggtgcatcctaggttcgcgtcagaccctactcggccaattctagacaaaataggtctcagatcgaagagtttagatctgaataatagattttgggtttcgtaggccggactagtctacacccattttcattttttttttttttttccttggctcaacttcaaatactcattaaccaacgtgtttacaataaccaaattaaatcaaagtgcttctaagccactgtggcacaatagaaaacaatttgggatcataattcgagaacgaaatagattcccgtgctattctatccgccactttgttaccgcctcttggagtgaactcgaacttgacctcttcaaaatgatggagcagctgctgaatgtcttccaaagccggttgaagggttggccaaaagtcatcagaattcagcagattaactagagcttgagcatcagattcaaaaattattcttttatagttaaatctgctcatcgtgagaactgcccaccgcaaagcttccagctctgcttccaacacattcttcgtccttggcagagctcttgctcccatccacaagactcctccactctcgttacggaggatccatccaataccacacctaggattttccaactgccatgtagcgtctgtgttacacttcacccattgataaggaggagctttccattgcaccgaaagatttctctccacttgaggaccagaggctttcccttcaagctcccgtctagtactccattcctcaaagtcttccatcgctcgtctcagaacttccggggcatcatactcctttcctttaaacatcagctcattccgtgatttccacagacgccacaggagccaaggcacaagattgccaatttttcccaactttggaatttccacttccaagttaagaacccaatacaaattggcgtacaaagaatcagtccactctccttcaggatatgctgggatcggtgaaatagcccagacaagtctagcgaagcaacatttgaataataggtggttcactgtttctctactatctggacatctcacacagctcgcctctctaaatagatgtctataggccatatttcctgctaccgagagacaattagataaattgaatgtactatttttcattttcattttttttgaagcatcttttcaaagtatttatagttgaatgtttttcttttctgttaaaggatcttcattagttgaatgcttatactttttaaaataatatattttttgcttgttttagttttaaaaagtatatttagtaatcattctaaaatttaacaaaaatagtttctattaaacctatcccctttattaaggctatatgttaagaatttataaagaactactaagtttgttagatatgcagttatgtgagaaattaataatttcgtgctgttttctttagcattttgtttgaaaatgtttcactatattattgacggatattattttgtttgtatccaaaacagtgagtgatgtgaacaagttgttgttagatgacatttctaactcgaatttaaatataaagttgatattgttcaggttgtttttctctacttgatatgatgaagttacgtattgtagagtataaataattatatgactacttttaattggttttaggtcgacatctaatgactaatagtgtgtttgggtatgactttttgttaaaaacgtgaatgtgtaacatcatgacaatattaatatattgaatcttgtgtattggtcttatagtaaatcatagttttagagggtagaatttctaagaaatacaccaatgtcaccatgtgtaattagttcttataattatcatccatttttaaaattggaggcccaaatttctgagaagcatgcttatcgcaacacatcattatgacatgtttgtaaaattttcaacagatttgtggttattagttcatagtttctcactttatatatcaatgataatatgttactaatggtgtttgtattttatgttccatataaaatcggggattaacaaagtgataattgtgaacatacaatttgatttgatttgaaaagtgattaactaactgatttgatatttagcatcttcgatatatttaaaagagtctcatgcatttccacaatatatcattattctaaattaatggagacgttaaatcgattattccgactgttgtgttgacatatcatgcatacttatccataatcaatttgccccaaaaacaaaacaaaaacatatacataatcaattgatttgtccgaagtaagtataagactatcaaaaacgatagaagaaacaataaacgatatagttcataaatcaaaacaaagacaacactcaacagcaaggaagtaccaaagtcaatatcttcaaaagtcgtctttgcctttctgtttcgtttaccgtttctacttctacattatacgcatactaaattaagtaagcaaattaaactcaagtgtcacttatacaaataccaataattgtattttatttggtccctaattaatttaatagttttatttaaaaattaaatcttgtttcataaaatgttttatttttctttgttcggtttccaaattctaaactactaaactaaattgatatctcttctaaattaacatatttttatttttttacaacattagagataaggtgatacactgatacaatagatggagagagctcattttacgtatatatataataaaagatttttgttttgttagataatctaaaatatgattgttacgtcgatttaacttatccatacactcttcttttgttactcactcgcatatatatgattgtattgtagaatgtagattaccttgtcattcttctttaatttgttcttcattcacaaaaggatcagaaagctcgtgagtttctatttgatatagtactctgccaattaaacttccttttcctatttcttcattcttcttttcaaaaggtattatttttatgtactcaacatg

SEQ ID NO: 11952 - DNA, 3000 bp, Unknown; identical to SEQ ID NO: 11941
  misc_feature (1)..( 3000): cDNA_ID_2711345_gDNA_ID_2214523_Annot_ID_134120 3000 nt of promoter + ATG

SEQ ID NO: 11953 - DNA, 3000 bp, Unknown
  misc_feature (1)..( 3000): cDNA_ID_1807705_gDNA_ID_2214524_Annot_ID_134122 3000 nt of promoter + ATG
tttttcaacaccatgggatataaattacttgacgttttggaaatctccgctatttttatttatattaaatggcaaaactgtcaatatttcgttgacaccttagacacaaaactctatggatcgttttaggcttttagcaatcaagttatacgttaatactagactaaaacccggatgataagtatcttctaaattgaacacaaacatataatttgatgcgttggaatttttatttaaaatttacgatagtttgtcgtaaaaatgttgatataatttgatccttcaattgaaaatgataaatcagcggttatataatattttaaaagaaaagaacgatgatactaatgaatgagagattaaagaaaacatatcaaaacaaaacaaaccacaaaagtaaatgaatagaaccatgaaacagactggccattaaatcataccctactaatgttgatataaaccacatgttgtatttgtatggtggagtcaaatccacctactaaagagatgtagaacgtaggtccccaatctacatttctttggacttttttaaacggacatttattttattttgttaattaaaggaatatttattgcctttatgagtccatttccattctcctaacgaacgatgaaatcatattaccagcaccaaattttgatggcatgagtgaagaatctagggggtgctgctgattatatacaatttcttaccactacagcgaaaggaaaagattagtccacttatatgcaaatccaaaatattttaagacaactttatcttgaaaggtttccagaaaagtacaaccgataatttagtgttacataaaaagtgaatcatataaaagatcttaagatgagtgtgtggcataccatttcagaagttaagggagatgacgagtgataaaaataatggtatggtagaatgtaagcaaattatataatgaaattgggtttaatttaaatgagctatgtgggtagttagttatacagtcaaattaaacagttttgttttattttttttcttctaacatatattaaatcgactatgagataatataattgaaaatgcgttaaacttttattctttatagaaccccaaaataataaatgtcaacattcaaaatgaaaaacatattatgaaaatataaaatttatttgataaattagatgtaacacattaaaaatactgtggtgtagaaaaaaaaacaggaatcatgtaatacttataagatgatatgagtaaaaaaaaccccgtataaaattacagtattctttgtactaatatttgaaatttggttaaaagtagattacgtttcccttaattcgttattgatttatagtatttttcctctttagttttctatcttcgtctcctaatttatatatgttgattagttaatactgcattattagatgacaattaaaaactaagtctagtggttagttggatgaagattaattactaaatctattaattagctgggtgatattgacaattcaaatatatcttagcacttacagctcgattggattttatatactaacaagtcaacttttaggccggtgatatactacatttagcgatcgtatgtataatgtatagttcaacttcaatttaaaaaacaaaagctgataatgaaactgttgcacgatttttttgtatatgtatcaagtatgttcattgtacatgaaagatatactcaattgcttatgctgtcataattatctaaattattaagtataattaagctatagatattgttaattacttaattgtattagtcacggaaactgataataccaagtcaaggggaaaccaaagattaggcgtgagacggttctcattgctgaccttgtcggaccaaagaccttagtcatgttactctgctttaggtttcgatctatttccaccaccgaaaccagttttgatttacaaataataatatttctctcattttatttaatcatataaaactctcagtgtttatttcgacccccgaaaatctttatctcttaccttgaattgtgttagatatatatatatactaatagtggaatcatttttcaaaatgtgaaaacgaaaaaacttgatgaagtttatgcaggtcattgtcatgctattgagtacatgctcatccagagttccatatatagaaccttgaaggtccctaatccttgagtcacatcctaaaggctttccttagcctatccaacctgaagtgatctcccaaccatttaggaatttgatctcgtttgctctctaaagctttaactactcttccgacgtattctccaaaacaaaaccaaggaaatttgaaccaacagttcacaaactccaaaatgtatgcacacgtaaatataagattatatttatggttttatgcaaaaaaaaaactttcaactaattttttttgtaactaaaccttacatctctaaaaaaatgtagatttattttataaagtcaaaaataatacacagtataaacctcacaactatatattataaatatttttctagtcatatacatcagatatataagatattaaaagaagagttgaacttcttatcgtgagaaattcgatttgataaattatttgtcaaatgtttacgaacttgacattagcatgaaagggttagaatgcatattattattgattttgtgtgattaattcgtattttctaaaagtgaaaaaaataaaattgagaaatgttttttgcacaaatcctttatatttaaatgatcgaccagacggtaattcatttgaatacattttgcttaaaagaaaataatacaattggatcggcgacagactgtatatttgttaaattggtcgatgataaacgtttgagttaaataaatattatcgacagacgactattccttcatatagaagcgacaattatttttttccagaacatttacctataaaatctttctacttatatttgtctgcgtgtgacttttaggagagtaagaaaatatcgaaggtcagaagaatg

SEQ ID NO: 11954 - DNA, 3000 bp, Unknown
  misc_feature (1)..( 3000): cDNA_ID_1808418_gDNA_ID_2214524_Annot_ID_134127 3000 nt of promoter + ATG
agcaaaaatttagacaaatatttctttaactccaacacaaaagtacacatagcattaggttattcctaagatttctgggcttctggtcctaaaatcccattcactactgacgtagcgacaagaactccgacgaactcagccgccacgacggctccagcttgtgtcaatccattaaagctaaccgccgtcacgatttccttctctgccgtctctacacctctctccgccgcttctaatcctttctccgccgcatcaacgcctttctccgccgtctcaaagccttctttcacgatctccaccgcttcttcttctgctttcttcagtttctttcttataccaaataacggaatattctccgccattgatgcaggctgaagtcccgtcactaccgtcgctgccgtcaacgaaaataacagattcctgcgagaggcgccggtcagcgagaacgaagaaagcgcgggtttgttagaatgcgccgctcgtgggctaacatgcgcggttcttgcgcaacgcgcctgaagagctccactgccgccgctgagtaaagaaagcgaaacagtcgaagccattttttagatgatctcacaagaaacgaaaaaagctctcagatgtgaaatagaaaatacgaaaagttttgataatatataagataacaaaataatttcattgtcaattgacgtgacacgtcatctccattgagattctttgataaatgggtataaaaaagattataattaaagaataataaaacattttgtacgttaaatccaatttattttatttattttcaatccactttcagccccaaaactcagcaaaatagattttttctgaatgaaaaaaaaataaaaaaaatccatgtacacaaattagacttcggttttgggtcttcttgttctgtctctgcttttatataacttgagttctgctttgcttctgtgtttctttaaatttattataaaaatggaaaagattgagttttctaaatgagctccaagtagctgtagagaagctaatccacagctacggagtcctagttatggtcacgttgttcctaagatggatcgcatccttcgctgcattgtcagtcatatgtttcagatttaaaatattttgatcttatgtataagtcttcttcttattttttaatatatttattgcttatattttgttttgggagtcttttgatgatactggatcaaacgaaatggaagtactcaaacaatatgttaacttcgctattagctccttacctcttctgtagccttcctttagttgttttccaattcttgaggtaacaattcatacacacaaaaaataccttttgttgttgttcttgagtatgtaacaatgatcggattaagtatttgatttgtattttcaggaccgggtttgggacatggatcgctctcctcagtcattctcaggcttttcctcccaaaccgtttttctggttaacaaccttagaatagtaccaatgagatttgaaacaatattagttacgatattaatagtcttcagtgttgatatatagtaatgttagagaacagtttgcgatatgaatatttattctatttaaactagtaaaggtaggcaatccggtttagaggcttcgcacgattactcgttactcgttactcgtctagtacacgttacttgcttcgtaccaccttgagaaaataagtacccgttactcgttttctctttatcattttatatacatacatttcgtattgtattagtttttaaaaacatatttaaaatttagattaaaaaaataaagtaaattttaagcaggttaaaaacatgacaaatcatcaacaagtactcagcaagtaactcgcaagtaatacaacaagacaagtaactcgtatgtaatcattttttagcaagcacttgaaattaggggtacagagcaagtcaagtaacaaagatccctaaaatagcggctactttgccttgtgcccacacttttacagtttaaaactttaaatgttttagtttttggtttctttggggttaaaactgaaatcataaacaaccaactgtaacttgtatatatgtttgctatcggttcagatattgataaaaaagaattaaaactattttaagattacaatcatttaatttgattatatccccttttaaattttaatacgtatatttttgaaataatattttttttcaaaaattgtttgatttgtttgtttgtgtttttttatatgaaattaagtggttttataaacaaactttggttcaatttggttttaactactttgatttgttttcttttttttacttacatttaattattaatgttttgcacaccccaaatcaattggtgtctttttgcagactcgctagagcttccgagtgcaacgattcttcttactgtggttacaccaaatttcttagtggaaatagtcagagacaaactaagagataaaggaagtgtgtgccttttcacgagcatgtactttctcagtagtcacactaaagcttgtggcttctttatggttggtcgtaactcagttttgcatcaaatattggaaactttccgtttaaggaattataaagatgtattattgtttaatttttcggttttgatgattttgtttgcgtttacatttgaagaaaaaacgaaaaaaaaaaaatcattgttaatttttaggggtgggcatttcggtttaacttcaggtttggtttagcattttgcaatgtagttttggaatatcttctcaagactttttcaactatggatggcttaaaaataattttagcagtccatgacaatgacaaaatcatatacaaaatgtcaaatctagatataaagaaagttcctcgtgttgaatccctttttggttatcaaaaaaaaaaaaaaagtaaccataaatacgaagacttcggttttgggtcttcttgttcctttttataacttgagttcttctgctctgcttctgttttttttgtattttggcttcttttagttcatattgaaaa

SEQ ID NO: 11955 - DNA, 3000 bp, Unknown
  misc_feature (1)..( 3000): cDNA_ID_1808967_gDNA_ID_2214524_Annot_ID_134128 3000 nt of promoter + ATG
aaacagccgtcagttcttaataactatacacttcaaaaataagtacatgatatattttggtcaaaaataagtacatgatatatttatctctaactcttttatacttgcctcttctccaacaacttgtcgatttcaggtaggacacgcttattaacgtagacacgtcattgcgttcgtattattataacgtggcagatttagccatgtcatatatcccaatcactctgatttttttttgccaccgtccccgtgaagatcaaccaattctagtttgcccaaaaaaaaaaaaaaaaaaaagtttattttcaacttattttcttaaagaggttttttctaacgtcttactttattactttgttaatttaaattatggattacatatgtaaacattgcttataagtcaatttactataattgtccacacacaaaaaaaaaaaagattacatagttttggttttatcgataggacaactaatacattacaaatgtttaggtataacaatgtaatcagaaaactatgtataacaatgaaattacacttactttctttcataaaatcttacacattaactaataattatcaaatctgttttttctttataagttaaaaaaaaaaaaaaaaaaaaaaaaaaaaaaaaaaacgagtttcactaaatagccccattggtgcagtatcaccccattggtgcagtatcacatgaaatttcttttcttggaaaaaataaataaaaatttgataaatataaatattaacgtagaaaattgtctgtattcagttaattttggtatcacacttatgttctaatagattttaacccgcggtataccgcggagacaattcattttttaaaattaatatatatataatttgtaaattattttatagtttacaattgttactaagtaacgtcctgccaaacccgtcccgccaaacccgttcacaaaaaaaaatatttattttattaatgttgatcttatttataatatgtttatgaatcattgtcaaaagattttattcgttgcgggatgttgaacccacacatttttcgccaattagttaatatatgttcattcttaaaatttcgaatcacaaaatatgaagaattttgtttttagattttttaaactctatatattctataatgatgttaagtttttttgatatattaaactttttataaatttaaatattattaatgttttatgaattttaaatatataaataataataattaaaaaattaatattttttgccttttaggtaatgatataataactctaaaagcaagaatttagaagatttaaatctttaattaaatattttcatacctaaataattaatgtcagtaccatgacattgtaaataagttcaaataaatgatttgtttatttaaaaaaaaaaagtttagtaagaacaatatttatttaaacaaaaaactttgttttaaaatattgttaacaaaatacttttatgctaattttaagggattgatgtgaagtttgtttggattaaatttgattgataatgtgattgacaatttaaattaagaatttaaagtaaaattaattattttgaaaaaaagatttaatgctaatggcattgggttgtaaataagtcaaactcaaagatttatttgttaaaatggctgcaaaaatgtatatatagattattcgtgaaaataaaaatttaaagatattcctctgctttttaaagaattaataactagtattaaagtaaaatataaaaaaaaatacccgtaaagactatccacaaaaaccataatcatgctcgacaatgaaattaaataacattcaatggttaaatctcgtagcttcttggccatcaaaatcatagggcttagtgtatgccaaagctaatcatctcttcatgtacgaaaatgaaagtaatactaataaatgagaaccatatatgaaatgcatggtccttcctttttatgatttattaatattgtaattattatacgttattatcagataataaatttcagatcatgcaacttatacacatccccacatcgatcaccatcagacatatactacgctttagccaaaattaaatgcatcacgaacataacatttgtggttgatgtgaatagaatagaatacagaagtaacaaatctactcgaccaaaagttgaacggtaatataatttactattcaatattttcaattttcaacaaaccttatctaacacttccaactaccatacgttgataaaaattgttagtttattagtcaatttgcactcctctattaaaaaaacattggagaacttgttagtttatagtcaatttgcactagttctctattaaaaactttttaaaaattaacttttagggtttaaacacataaatagctgagaaaaatctagatatatagaattgagatttaaaagaaaaaaaacttcaaaaaatcaaccggaataacatttaaacagtataatcctttttgataaactacgaatttactggtcgaactacatacatttccctaagcaagatacatttcctagtttaacgcttcagcctaaatatcttactatttttcaaactttttatcgactgcgacatacatacttacattctcatatcgactggtccatttatctatatccttaataaactgtctattaacccaaaagaagagccgtcattagtcaaaattgagcaaacgaattcaattcccaaaccacagtccctaaactcgtaattatacaccaaaacaaatggcaaacaaatcacaacacagaagctgtcatcctcccaacttacttaaacagcctgtcattgtccccacttgtcgttcaaacttcaaaataaatattaaaaacacataatcacaaaaagacaaaacaaatccaatgtggcatattctttttatatatataaacacacaaaaacacatctcacttctcatctcctttctactattcccttttggccggaaaccgagtcgactcattgagtcaaaccaaacca

SEQ ID NO: 11956 - DNA, 3000 bp, Unknown
  misc_feature (1)..( 3000): cDNA_ID_2707954_gDNA_ID_2214524_Annot_ID_134129 3000 nt of promoter + ATG
tctatctaattatattaacaatatcacaacactgtcactaataatataagggcttaaaatttaaaacctaattctttagagatgtcacttttggctatttgttaaatatttttatttcccctgggattctttgacaaacgatagtcttcttggtactggaagacaattctggtatccggctaaatataaagtgatataatagattaaaatataaagtgaaataaaagaagtagaaaagaaaagtaacttagccacattgtgaagtttgcgctttacagcattgagcatcctatgtctatttcctttatgtcttggagaaaacaatttttggaggtatttccattactaaagtttttttatatactataaatatttaatttatttttttgaaaaaagtatgtgggaatagattttctaaattttaacgagtttcattgttaaatagaaattgaatctaaaacaattataatgaaaacacttttgcactatgctaaaaattctaaatgttttaaaatatatttctatatttcaaaattttatgattgtatatcaatcatttacattgaatttttaccccaaaaaacttggttagcaagaataattcttagatattgtcatatactgtatttaggtcgttgatgagttttaaaaataacaacgtaattttagattatgaatggtgacatgaatttttttacggtgctaagaagcttgatcatacaatttgcacttgaccaattgcgaattttatttaatttgtggcatgatgtggaataatacaacgttgtttaagtgaaatgcagatatatcttttaagattttcatgttttgtgaactgctcaccaaccacccaaattatgggaagtgtggtttttttttatgctcgtttttatggtcaagaaaaataatacatttaatttttgcattaaaagttgcaaacgttacttagaatgaaacagttttttttaaaagattttcattcaactcttttttttttttttttttttttctgttagactgattatgtttgatacgtttactttgtattagtcacattccgttctgctccatctactgaaataacattaaccaatctgaatcttatattaaagaccttatagtacaatagttgacgacaatagaatatctaattgttacaaaacagtgagaaaatattgtcaaactaagtggatcggcgatgcatttgtcaattgttttgtttatacaaagataatgaaattgagacagggaacattaaaacgtcaaatcatttagaaaaagtagaattgtagttgtttggatagtagttttattgatgtactgataagtggtttagtaatcgatctcatcttaattagttggccaaatgcaccaacaactcgaatgagatgcaaactttataatccttattttataattttaagcaatccaaatatttgttttttctttatttattgccgtttcatttgactacttgattatagtcatatgttgaaataattaattatcaattagcattagtaaacaggaattacatcatctatttataagttgaaatataattagcatgtttttatatataaaaggaaacatatgtatgacaaaattcaaatagactatagttatatgataatgagactctagatcgaccacattggtgtaaagaaagtaaaactttaattttcttagaaaatataaattttgtatgatataaacctaagcagaatatgtatgtgtaagtaaatcaaacattaggatttaggaatgaggacaaaagttaagggaatgtaacaagaaaagaaacaaaaacaaaacaaaacgtaggatcctaataaccctatgagtgtagaagaaacagaacgagacaatgtgcaatgcgatggttcaacaactcccacttacattccaacaagcccatacaatacaatagttttttttttcactttacaagtaacttttaatttgataatttggaagtcgttcaaatattgacaaaagagtatatatataatatatatttttgtctccttttgttttcgtttttctcgtttcaccacaaaaatagtaacggaaggttgttttaccctctggcttgtctttgtagtttgtacatatcaattgttgactttttacttttcgatatcaattatcaaagactctttatctcttgggacggtcttttattacttgttacaatagaaaaatcgtaaataaaaaatgtgttatggcgataaaaatttgggtgtttaaacatataacacactctttttttttttgataaaacacataacacactactttaacatatatttttctttaaaccaaacatgtaattacactgcttttttactgtttatccaccatatacttatcaagaaaataactagtatacacattatttagcaattcgtgagaaaggttttttgttattttaatagtaataattttacgtatatcgataacccacgtaaattgttgtgctttttaatgcaaaagagaaagtccctaaaaaaacaaaaaggttaaagattgctaaaggctaagagaggtgatgatgtgagattcttctctctagggtcaaaaagtaatactcacactctttttgctcttctgtatttctctgtgtactggcgcgtgagatagaacagaaaataaagacatcaaatctttgctacatgtctttggtcgtatccgtatatatgttcttcttctaattattttagcagaaagaaaaaaaactaatcgctttcataaactcagatttgtttttttttttcaatggtagaagaagacaagtgttcttggagtttagtttcttcttatgattcattcataaatccgaggaaatatatcaaatctgtttctttctttctctaagtcaaaacccaactaagagattcttcttcttctttctttgagatcagttacaaagtgagctttgtttttaagttctaattgctaatttgctacacataagttctgtttagcttcttagagatg

SEQ ID NO: 11957 - DNA, 3000 bp, Unknown
  misc_feature (1)..( 3000): cDNA_ID_2707962_gDNA_ID_2214524_Annot_ID_134131 3000 nt of promoter + ATG
gcagtattattctctctcttttttttcaaaataaaatacttttatattaataataaataattatgagaaaaaaattattcggaagaaaaaaagttacttgaaaaaaaaaaaagttacttgacatagtaaaggatcagaagcatttttgaatactgttttggtttcttttaaaagcaaattcaaggttttaacacagtaacaattgtttctatgctagggaatagggataattatttttatgtgtggtttataaattgacttataagataaaaaaaaatataatactataagaaaggaaaattatgtgcaggttatgttagcgatgtgattaaaaaaataaaataaaaaatagttacaatttttaaaaatggatcagtttggcatttttattctttcgtttttttcaaaataaagtacttttatattaagaaaaataattgtgagaaaaaaacaaagtaatttaaatgtcagcgaaaatttgttacgaagaaaaaaaagttacctaacatagtagtaaaggagaagctttttttaacactgttttggtttcttcttaaagcaaattcaaggttacacacagtaacaattatttttaatacttaaaattcattgaaattatatattggttggttaaactttaacttgggttgaatggcaatatatcatttcaccaaaaatatcttaaatatatatatatttttaccaacaaattcagtatagtataaaacatgtcactaaaagaaaacagtctatttccatgtaaaatacagaaaaaaatgtttttccaaatatattacaaaatactttttagaaaaatcctaaaacttttaggagtaaacgcctaattaatggctgaccatatatatttttattggaaatatttgaatcaaacaaatattgaagtattttttttttgttaatagtggttgtcgcattaaagatttaagaaatcttttttattgaatttgttgacaaaaaaattataaaattttaatcagcatcaaaattaaaactaattagatagagttttgagatctatagctttagtaacttggaatttgtgtccaaagtttaaaagttgctgacaatttatgaataacggagttaaaaagaaaacttaaaatttttggtgttttatcattagacttaaaaggactatactgaattttggaaaagttactgggtcaagtgaataaaaaaatgttaaaatgcacaaaccatctttctgctttcacatagagatcttatttctcaacagtcaacactaaaggccacataacacaacaataacttgttaggatacatatggtgagtggtaacaggaatgtcggaatcaaaggctaggtcaccaaagaggaaccaaacgatattggattaaatatatagaagaaatttattaagaaacacatcgttgtttgagacataagagatcgaagcaaaagcaaatgattttaccctaaagattggagtttgggtatggaaggtcataccttatgatatgtgatggatgcaagtgactacaggaggttgaatctacgaatttcagatctatactttgcttttttggatacgattcttctcttctggattgtgataatttataggtctaggggctaaggcatcggtatttggtgaatgtaccatagccacaatgtcaaaaaagggaaaataaatttctatgttaggggtaactgttattgtgtggttataaatgggattataagataaaaagataatatagggaaggcaaaaatgtatacgtttcaatcttctatgtttgtatgtaaatgagtttggttttgctaatgattatgttagctgtcattgacaaaaaaaaaagttaaataatagttacccgtaaaggggaagataaatttgcatttggaaaatgggccagtaaatatttttatattaacaaaacaataattatgagcaaactaaattattatcttttaattagttgtaggggaaatgatttgtttctttcttaaactcaaataaccctataagttggatattactactgaataacaacaatggttggtttctctattaccacactcggtacgaatcatcaaagaataaaacatacttaaaaacttcataaacacctaaagaagttactcaaagaacatcgtcataaattacgcaaatcgtaaatgtttggaagattttttacaacagtggttggatatcgttctgaaaaaactagacgtttaagtttatacaacaatggttctaatgagttgaacgtcggagaaaactatgtagtgactaaattcgaattcattataaggcaattttgtttactataattttattgaagttctttttaaaaaagttacacaatatagtaaatgattaaaactttttgaaatatcggtttgatgtccttccaaaaaaataaaaaacatataacgtttaaatcacagtttattaaaaaaagtgttcaaatgagtagaaaaaatgagaaattttttaaagtgattaaattgtaagtcatagttaaatggcaattttagtttaatataatctttatttagctttaaaaagaaagaaatattgtagtcagaaaatgttaatgcaaaatgacaaatgtaacagcgaaaaaaaaaacggtctagttagagcgcatgaatattgtcgtggaaaatgttcgtcggaaaccccgatgttttttgtcgatatatgatattatgtcaatacttataattcttgagcttttttgtcaacttgataatgttcaaccttataatctagtccagatcgagaagaaatattaatatgtgtatcattaataaatcacattttatatctcgcataaaactcatatgtttcattttcgtatctagttctaaagttagttctctctttttcatgaatatgtatggtgtaagaagtgatgaatggagtttagaaatcttcttgtaaatttaagaggcatgtttcaatttccgattgcaaaaccaaagaaagaaggttggacacaaagaatacatg

SEQ ID NO: 11958 - DNA, 3000 bp, Unknown
  misc_feature (1)..( 3000): cDNA_ID_3023447_gDNA_ID_2214524_Annot_ID_184712 3000 nt of promoter + ATG
ttaagcactacttcttaggcataattgaccacttctatctaattaagtaaattattgttttttcaaaccaatttgctaatgtaataaatttggatttctgttttttgccaaactatttgtcaaatttgtggacattgcttgtcaccttccaataagtttgtaactagtggctgcaatactatgcatgtgtcagtatataacttgtttagtactctaataattttaccaaattgttaattatagctccccaacaatcgggagacttcttaaagcttgacgaacatatgccgaaagtataaacgacaaatagcgatcattcaaataacgttttctttgaaataaacacgttaccgaccatatggtgataaaatcgtatgtaacaaataatgttatacatatttttatgttttgtacaaataacatgagatttcgagtatattataaaattataacaacatgtttgaaatcaattaaaaagtatattttttgcaaaaaaaaaaaaactctaaaaagaaatatcatcataattaacccaagaaacgacaaaaaagaaaaattaacacaaaaaaaatatgtaattttcttctgttaacacaaacgtttatctgatttatataaacctttcaaaggattagtctttccatagcaatgtatcccaaaaagatattcgtttggttcactccgaaaactaaaaccttaattcaaaaatttgatagttttccattatttttttgtctagttgtgagtttgttccatcctaacacgtgaagtgaacacttatctatttgttccacttgcttgttcttctatactatatatttttctcaaccatccaaaaacatgcttctttctttttcacttcatttcacaaatgttttgtgtatgttcaagattcttggtattgttgttctatactatatgtttctcgtacattggaaaccataactccatactcgaatagaaaaaaaaaaaattaatctaattttaagagaaaggtttcttttaaaaaaaaatttttccttttaaaaaagtctttttccttttaaaaaaaaattttggtaaatctttttatgagttatgtgtatgagaatttttgtctctacattttggagttcgattttcgttttagtttaggatggtgaagtatttacaaaaaagaaatctatttgcgaacctaaatatcgaataatcgtatctttagatgtagatggattagtacatatcgtgatatcgatagatccacacatagtttgtaacaaaaattatcaaaatgactactagtaaaagtgtatttatcaaaataatctagtagttagttaaagttgatttaaaaagaaaaggaaaagtatgtggatccacgtcaggttgcgtgcacgtaaaagtcttttcattccctagttcttctgctctgttgccgttgtgaacaaatttaggtttctaaaaacaaaaactaacacttgttttgggaaatcgctataatcgaacggctacgataccaccgcaaagctatcacctctaccaacccgaacacgtgtacgtctctcatcacttccacatttctcgcgagaaaaaccaaaagagtttcgtaaaaaaaacgaatattcctgctgtaatattaatttctcgtgtacgttccgatatacgctgacgtgtacgagtctctttatttttaggtttaaaaaaacaatgttattatttgtaaacagtatataaacccttttagtctctattgtttcattattcagtcgtaaaataaaaccgaatttgatttttatttttctctctcaaagtttttcttgggagagcaacaatggcgatgaggaagcttttatcgaagaaactcttcaatatcacgaatgttgcttcacagagtcttatgaattgtcgcatttcgtcttcttcgttagccgtacgaaccagagttccgaatgattcaacagatacaaccaaaatcgcaccggagcctggagatttggcgatgtcgcgaaggttcatgcataacagtgctatgattaggccggcggagattatgcagatgccggtgggagagagtttgattgagaaactccgtgagattgatggaagcaaggatcggattcgattagacggactttctccgccggagagggagacgagtttgacggtggcggatacgaagaagctgcttagagcggcgcagatcgagattgtgaaatcgaagctaagagaaacgggaagaagctggatgccgtataaggagtttgttagcgtttgtggtgaagcttcttcagatccagatctcggatctaaaatcgcgaagatgcttgatgattcagcaaacgtcatcgttttgggagattccgtttgtattagacctgatcaggtactttcttcgttcttcttctctagccttttagcattttgaaatcgtgctttgtctctgagatctctctgagtattgcagctgattgattgggagagataagagagagatttaaaaactctctgaaaaaaacggattaggttctcaaaagtttttgttcgattttgattttggaagctataccgaaaactgataccatttttattcggttggatctcttttcttttggttccaattcaacaggagaatcaaaaacctctgtgtttttaccagagttccataggaggttcccaagtttgagagagatggtgataaagaggaacagtttctacagagaccacaactctttttttttcccctaaaaaaaaaaccattggttggattagggttataaattgagtcaagaccctttggtgatttgataccaaaacctaaacataaaaaaacttcaaaagagagagttgagagaagcttactaactggttcttgggggttattagaaagtttatagagatgatgatgataatgggttgggtttatgtggagggattagtcaatagtggaagatcttaaccagaaacagggatatggggatggattgattgactttataaactagtcattgattcataaagatg

SEQ ID NO: 11959 - DNA, 3000 bp, Unknown
  misc_feature (1)..( 3000): cDNA_ID_3023459_gDNA_ID_2214524_Annot_ID_184706 3000 nt of promoter + ATG
tcattagcaaaaccaaactcatttacatacaaacatagaagattgaaacgtatacatttttgccttccctatattatctttttatcttataatcccatttataaccacacaataacagttacccctaacatagaaatttattttcccttttttgacattgtggctatggtacattcaccaaataccgatgccttagcccctagacctataaattatcacaatccagaagagaagaatcgtatccaaaaaagcaaagtatagatctgaaattcgtagattcaacctcctgtagtcacttgcatccatcacatatcataaggtatgaccttccatacccaaactccaatctttagggtaaaatcatttgcttttgcttcgatctcttatgtctcaaacaacgatgtgtttcttaataaatttcttctatatatttaatccaatatcgtttggttcctctttggtgacctagcctttgattccgacattcctgttaccactcaccatatgtatcctaacaagttattgttgtgttatgtggcctttagtgttgactgttgagaaataagatctctatgtgaaagcagaaagatggtttgtgcattttaacatttttttattcacttgacccagtaacttttccaaaattcagtatagtccttttaagtctaatgataaaacaccaaaaattttaagttttctttttaactccgttattcataaattgtcagcaacttttaaactttggacacaaattccaagttactaaagctatagatctcaaaactctatctaattagttttaattttgatgctgattaaaattttataatttttttgtcaacaaattcaataaaaaagatttcttaaatctttaatgcgacaaccactattaacaaaaaaaaaatacttcaatatttgtttgattcaaatatttccaataaaaatatatatggtcagccattaattaggcgtttactcctaaaagttttaggatttttctaaaaagtattttgtaatatatttggaaaaacatttttttctgtattttacatggaaatagactgttttcttttagtgacatgttttatactatactgaatttgttggtaaaaatatatatatatttaagatatttttggtgaaatgatatattgccattcaacccaagttaaagtttaaccaaccaatatataatttcaatgaattttaagtattaaaaataattgttactgtgtgtaaccttgaatttgctttaagaagaaaccaaaacagtgttaaaaaaagcttctcctttactactatgttaggtaacttttttttcttcgtaacaaattttcgctgacatttaaattactttgtttttttctcacaattatttttcttaatataaaagtactttattttgaaaaaaacgaaagaataaaaatgccaaactgatccatttttaaaaattgtaactattttttattttatttttttaatcacatcgctaacataacctgcacataattttcctttcttatagtattatatttttttttatcttataagtcaatttataaaccacacataaaaataattatccctattccctagcatagaaacaattgttactgtgttaaaaccttgaatttgcttttaaaagaaaccaaaacagtattcaaaaatgcttctgatcctttactatgtcaagtaacttttttttttttcaagtaactttttttcttccgaataatttttttctcataattatttattattaatataaaagtattttattttgaaaaaaaagagagagaataatactgccaaactgacccaatttttaaaatccaaactaaatttatgtgtaactatttgtttgtttgctttttattttggaaagctaacataaccatatatacatacatagataaatatacctaatcatatttttccaatcctatagtattatttttatcttataattcaatttataaaccacacataaaaataattatccctattccctagcatagaaaatattttatcttccatattttcgacattttggccatggtacatgcccaaataccgatgccatcgaccaataaaatcttcattcataatccagaagaagataagaatcacacatatagtaattcttttctccttttataatacaaatctcaaaattcatagattcaaaaaccaaatcctctcttaatttgcatcgcaccaccacagatcaaatcacaaaggtgtgtgacccttccatgcccaaaatccaaatctttaggtttaaaaaaaaaacatttgcttcttattatatgtcacatacatgatgtgtttcgtgttcccactttataactctctttttttttttcgttggttcttcttccgtgacctagcctttgattccgccatgtctgtttccatatcctaagtcctaacaagttattgtgttacctgaccttctctcatagttattaaaaacccaaatgttaaagtttttgttttgtggcagcattttaacatttttggtcacctccacctgggtttgttgattggtcatgttattgatcttcaatttggtatctttggaccaacttttttttttcttatatatatctgtataattcaatattgggttctttctaatgtagggtttagatcaattcttcatttcttggtgttgattttgttttgtggaattcagggttttagctaattgttcttccccagttaggagttttacttcttaagatctgaattgtttagattagtaattctgattagtaccaacaatgtcatgtaatataattgacttcgtatgtctgaaaatgccttattagaaatttcttatggtgaatgttagaaatttgattaggataggaaagcaatttatattgactattgtttttgtattcccctgttcttattgcagaattgtgtgtttgtatcaaatcctgggtttaaagaagtgaaatatcttctaagtggtgatttatggaagttaaa

SEQ ID NO: 11960 - DNA, 3000 bp, Unknown; identical to SEQ ID NO: 11957
  misc_feature (1)..( 3000): cDNA_ID_3023463_gDNA_ID_2214524_Annot_ID_184705 3000 nt of promoter + ATG

SEQ ID NO: 11961 - DNA, 3000 bp, Unknown
  misc_feature (1)..( 3000): cDNA_ID_3023467_gDNA_ID_2214524_Annot_ID_184704 3000 nt of promoter + ATG
agttttataacatcatagacgaaaccaaacacaaataatttgatctaacccttaatatacaagtaggtaattgaactcaaattatttgggtatattatttgtaaaatatatgactttatttacaagatagaaactaaagaatcatatttgaagtcgaattccattaaccactacaattagcatggttggtcatctaccataaagaaattaagttcatgttttaaaatttacgaaataaatagaattatatatttataatgtttaataagttacttatacattttaaatgcattttgagaccaaacggttaccttagttttaatatttagaacagaaatacacttccagtaaggttttaaattatagcaagtgattaacttaagaaacactgtattagtggaaagatccaaaactttcttacattgagattgaggaaaaggccaaaagcttgtcgattgtatatttaaaactaattggacgctagtgaatttagaagtgatcctaagaatgacccaatttaaattttgattgtcataatataactaaatactatacttttgtgataatctatgtaagttgagctcggtaacagtgttacaacttcttatttgcacggtgtcggggacacaaattacggtaaaaattcaagtgtcaccactaatgactgttcctttaatcaatactgggtttcaaataagataaaaaaaaaaaatatatacttacattgatttatttgtatggagtttaagaaatgtgagattggtgtggtgactttagacttggtggcatgtgagattagatcatgatttgccagcagagagagacaaacatgcttttatgaatcttattaaagatgcatttgagttatgaaatactactagtatttattacaaagttgttacttatttattgcaaaatgtctcaaagaaattaatgttgcacatgaagtagtacttattggataccggtttttaattccatcgtgccgtaaaaaatcagcttcttcaaaagaacgaaacatttctttaacatttttgttaattaattgttggagatttaggggttataaagtagaaaacaaaaaaggttggggcaatttaggatttaaaaaataaaaagggttgaaaatggaatcatacaaataagacaggaaaaagctgaagtttacaaaggcatttggacaagagagtcaatgccaatcataactagcaaaacaaaagaaaagaaaaaggtatctctactttaaattcactttttgatcacatgtaacacacgcgcttccaccgatttggtgtatccacaagtgattttgcaaacacatttttctacaaaaacaaggaatttaatatttgtatccatttctagcgtgacccataatgccataatggagtttgcaattattaatcttgttatctcatgcatattttcatgttgctttagtactaacaatacattgtattaatgtcttgtatgtatatatttgtgaaacgatttatatctatttagctttcgatcaaaaagactatatatagtgtagaagtaaatcaagtatttcagtattggttgtttgaaatatgagtaaattgcttagtgtcagaagattcttctaaaaaagatcgggggtgcatgactttgtattttttcgtagataaaatatagttccactctatatataagtgtgtatttttaagagatttatagttatattctctgaagtcaaaatgaataataagtcaactattcagagtcaacgtcctccttgttgtcaaaatatatacatatcaattttcaatgattggtttctgcccgatatatataaatagagacgataattttttattttatataatatcatattttactgagtataaaaaaaaacatgaagaaaactcagacctcgatggcttgatgaaacgaaaatatgctaaaaaaatgtttgcaagtgaaaaaagaaaagaaatttgggatattaatctggtttgttccgtcattcttaaccactcttaagaaaatattagaatcatgaaaataaagtgaacatatggttgatggcctgatgttgatgggtccattaaattgttttacacattatgactcgtttggtaaactatccaacaagagttgtgattttttgttcttatttcccctttaatgttttcacccttaaagtagtaggatggctaagtaggatgcttcaagtaaattatgttgtcaatcataaagtaggattcagtttgagataaattaaattaaattaaattaagctcttttgtatacaaacctccacatcctaaagaaactctttcggcaactaagacattttgagaacccaaaattttgaagacctttcgattttgtaacatctatgagcctgtcttgaggagtctaacaatcataccaaagtaaagtgttttggccattgtgaatcttaacacgagtgaagttgattactttgtctttaagtttctaaagcctacgcgataagcctattccaataacatttttgtatcttatcaaaatgtagttagctaataaaacaaaccccatttttctagtttacaggtttttatacaaaagagaaatgtatacacggaagtgaagtgagagctcacctcttatgccactattggagaagaaataatcactcgtgccattcttatgtttggaatattattattgatttttatttaaatcgaaaaatgaggaaaggatgaaaaacccttgcgaaaccacaaaaactacaagaaaacttaatttgttgggctcgggtccaaaaaaaaatgtaaatactcggcccagttgtattatttacagaaaaaacctaagtaaaaacctaagttcccccttttcacttctcgacttcttcctcttctctccgtcgtcgtcttctctcgtctccgacgataccactttcaccggaaaaatcaatctcttctattcttctttcttctccgttttcgttcgtctttgtctctttcatatccgcaaatttattttcca

SEQ ID NO: 11962 - DNA, 3000 bp, Unknown; identical to SEQ ID NO: 11954
  misc_feature (1)..( 3000): cDNA_ID_1808418_gDNA_ID_2214524_Annot_ID_184700 3000 nt of promoter + ATG

SEQ ID NO: 11963 - DNA, 3000 bp, Unknown; identical to SEQ ID NO: 11953
  misc_feature (1)..( 3000): cDNA_ID_1807705_gDNA_ID_2214524_Annot_ID_184694 3000 nt of promoter + ATG

SEQ ID NO: 11964 - DNA, 3000 bp, Unknown
  misc_feature (1)..( 3000): cDNA_ID_2707968_gDNA_ID_2214524_Annot_ID_134133 3000 nt of promoter + ATG
taaaagttttaggatttttctaaaaagtattttgtaatatatttggaaaaacatttttttctgtattttacatggaaatagactgttttcttttagtgacatgttttatactatactgaatttgttggtaaaaatatatatatatttaagatatttttggtgaaatgatatattgccattcaacccaagttaaagtttaaccaaccaatatataatttcaatgaattttaagtattaaaaataattgttactgtgtgtaaccttgaatttgctttaagaagaaaccaaaacagtgttaaaaaaagcttctcctttactactatgttaggtaacttttttttcttcgtaacaaattttcgctgacatttaaattactttgtttttttctcacaattatttttcttaatataaaagtactttattttgaaaaaaacgaaagaataaaaatgccaaactgatccatttttaaaaattgtaactattttttattttatttttttaatcacatcgctaacataacctgcacataattttcctttcttatagtattatatttttttttatcttataagtcaatttataaaccacacataaaaataattatccctattccctagcatagaaacaattgttactgtgttaaaaccttgaatttgcttttaaaagaaaccaaaacagtattcaaaaatgcttctgatcctttactatgtcaagtaacttttttttttttcaagtaactttttttcttccgaataatttttttctcataattatttattattaatataaaagtattttattttgaaaaaaaagagagagaataatactgccaaactgacccaatttttaaaatccaaactaaatttatgtgtaactatttgtttgtttgctttttattttggaaagctaacataaccatatatacatacatagataaatatacctaatcatatttttccaatcctatagtattatttttatcttataattcaatttataaaccacacataaaaataattatccctattccctagcatagaaaatattttatcttccatattttcgacattttggccatggtacatgcccaaataccgatgccatcgaccaataaaatcttcattcataatccagaagaagataagaatcacacatatagtaattcttttctccttttataatacaaatctcaaaattcatagattcaaaaaccaaatcctctcttaatttgcatcgcaccaccacagatcaaatcacaaaggtgtgtgacccttccatgcccaaaatccaaatctttaggtttaaaaaaaaaacatttgcttcttattatatgtcacatacatgatgtgtttcgtgttcccactttataactctctttttttttttcgttggttcttcttccgtgacctagcctttgattccgccatgtctgtttccatatcctaagtcctaacaagttattgtgttacctgaccttctctcatagttattaaaaacccaaatgttaaagtttttgttttgtggcagcattttaacatttttggtcacctccacctgggtttgttgattggtcatgttattgatcttcaatttggtatctttggaccaacttttttttttcttatatatatctgtataattcaatattgggttctttctaatgtagggtttagatcaattcttcatttcttggtgttgattttgttttgtggaattcagggttttagctaattgttcttccccagttaggagttttacttcttaagatctgaattgtttagattagtaattctgattagtaccaacaatgtcatgtaatataattgacttcgtatgtctgaaaatgccttattagaaatttcttatggtgaatgttagaaatttgattaggataggaaagcaatttatattgactattgtttttgtattcccctgttcttattgcagaattgtgtgtttgtatcaaatcctgggtttaaagaagtgaaatatcttctaagtggtgatttatggaagttaaaatggatgagttggttcttgacgtggatgttgaggaagcaacaggtagtgagttgttggtgaaatctgagccggaggctgatttaaatgcggtgaagtctagtaccgatttagtcacggttaccggacctattggtaaaaatggcgaaggcgagtcgtcaccttctgagcctaaatggctgcaacaagatgaaccaatagctttgtgggtgaaggtaataataatacgcgttttttatctccaaattcggaatctttaaattcgatttttgtatggttaatgtttggtgtcttgttgtggtgttgtagtggagaggtaaatggcaagctggaataagatgtgcgaaagcggactggccattgacgactttaagaggcaaaccaactcatgataggaagaagtattgtgtgattttttttccgcatacgaaaaattactcgtgggcggatatgcagcttgttcgatccatcaatgagtttcctgatcctattgcttataagtctcacaagattggacttaagttagttaaagatttaactgctgctagacgctatattatgcggaagcttacagttgggatgttcaatatagttgaccagttcccttcagaggtataagctcagtatttgatataccgaaggatttggattgcatttggttttaacgctttttaatgttgcaggttgtttctgaagcagctagggatattataatctggaaagaatttgcaatggaagctactagaagcacaagttatcatgatcttgggataatgcttgtgaagcttcatagcgtaagctactctctttgctgttaaagttttagagtatttttggtttgattcggctttgtgtaatgttgttcagatgattttgcaacgatacatggatccaatctggcttgagaactcgtttcctttgtgggtacaaaaatgtaacaatgcagtgaatgcagagagtattgaattgctgaatgaggta

SEQ ID NO: 11965 - DNA, 3000 bp, Unknown
  misc_feature (1)..( 3000): cDNA_ID_2707972_gDNA_ID_2214524_Annot_ID_134134 3000 nt of promoter + ATG
tgtaacaatgcagtgaatgcagagagtattgaattgctgaatgaggtaatggcttcaccagaggctgatagtgtcattgatgtgtattgtttccttaactgaagccactttatctggttgtgtttaggaatttgacaattgtatcaagtggaatgaagtcaaatcactttctgagtctccaatgcaaccaatgttgttgtcagaatggaaaacgtggaagcatgacattgcaaaatggttctctatatctcgccgtggtgttggcgaaatagcacagccggatagtaaaagtgtgtttaactcagatgtccaggctagtcgtaaaagaccaaaacttgagattcgacgtgcagagacaacaaatgcaacacatatggagtctgatacttcgccacaaggattatctgcaattgactcagagtttttcagttctcgaggcaacacaaattctcctgagacgatgaaagaagaaaatcctgtaatgaatacaccagagaatggtttggatctatgggatggcattgttgttgaagcaggtggttcacagttcatgaagacaaaagaaactaatggactgtctcacccgcaagaccaacatataaatgaatcagttctgaagaaaccatttggttcgggaaataagagtcagcaatgcatagctttcattgaatcgaaaggaaggcaatgtgtgaggtgggcgaatgaaggtgatgtttattgttgcgtgcatttagcttctcgtttcaccacaaaatctatgaagaacgagggctctcctgctgttgaagcacctatgtgcggaggggttactgttcttggtaccaaatgcaagcaccgatctctacccgggtttttgtactgcaagaaacaccgtcctcatacagggatggtgaaacctgatgattcttcatcttttctggtgaagagaaaggtatcggaaattatgtcaacattagaaacaaatcaatgtcaagatttggtgccgtttggagaaccagaaggtccatcttttgagaaacaggagccccatggagccacgagcttcacggagatgtttgaacattgtagccaagaggataacttgtgtataggttcttgctcagaaaacagctatatttcttgcagtgagttctcgacaaagcactcgttatactgtgaacagcaccttcctaactggcttaagcgtgcaaggaatggtaagagtcgaataatatcgaaggaagtgtttgtagatctcttaaggggttgtttatcgcgtgaggaaaagttggctctacatcaagcttgtgatattttctacaagctcttcaaaagtgtcttatcgttaagaaactctgtcccaatggaagtacagatcgactgggcgaaaacagaagcttcaagaaacgctgacgctggagttggagaattcttgatgaagttggtatccaatgaaagagagagattaactaggatatggggtttcgctactggtgctgatgaagaagatgtatcattatcagaatatcctaatcgactacttgccatcaccaatacctgtgatgatgatgatgataaagagaaatggtcgtttagtggatttgcttgtgctatttgcttagattcttttgtgagaagaaagcttttggaaattcatgtggaggagcgacatcacgtgcagtttgcggaaaagtgtatgcttcttcagtgtattccttgtggcagccattttggagataaagaacagttgctggtacatgtgcaagctgtgcatccttctgagtgcaaatcgctaaccgttgcttctgaatgcaatttgactaatggtgagttttctcagaaacctgaagcaggcagttcacaaattgttgtgagccaaaacaacgagaatacaagcggcgtacataaatttgtttgcaagttctgtgggctgaaattcaatttattacctgaccttggccgtcaccatcaagctgaacacatgggaccgagtctagttggctctcgtggtccgaagaaaggaataaggtttaatacatataggatgaaatctggtaggcttagtcgtccaaataaattcaaaaaaagtcttggagctgtctcatataggattagaaatagggctggtgtaaatatgaagaggaggatgcaaggttctaaatcgctcggcacagaaggaaacactgaagctggagtatcgccgcctctggatgatagtagaaactttgatggcgtaacagatgctcattgctctgtggtttcggatatattgttgtcaaaggttcagaaagcaaaacatcgccccaataacctcgatatcctgtctgctgctcgatcagcttgctgtagggtgagcgttgagacctctttggaggctaaattcggtgatttgcctgaccggatatatctcaaggcagcaaaactttgcggtgagcaaggtgtacaagtgcaatggcatcaggaaggatacatatgctctaacggatgtaagcctgttaaagacccaaatcttctacatcccttgatcccgcgacaagagaatgatcgattcgggatagctgtggacgctggacaacattctaatattgagttggaagttgatgagtgccattgtatcatggaggctcatcattttagtaagagaccgtttggaaacactgcggttttgtgcaaggacatcagctttggtaaggaatcagttccaatttgtgtcgtcgatgatgatctttggaattctgaaaaaccgtatgagatgccttgggaatgctttacttatgttacaaactcaattcttcatccgtcaatggatcttgtaaaggaggtatcttacttgttctagcttgtcatacccttgaaacagagatgtgactccatgttgtaaccttgttttttgtccgctgtttgcagaatctgcaactcaggtgtagctgtcgcagttcagtgtgctcgcctgtaacttgtgatcacgtataccttttcggtaacgattttgaggacgctagagacatatatggaaaatcc

SEQ ID NO: 11966 - DNA, 3000 bp, Unknown
  misc_feature (1)..( 3000): cDNA_ID_2707974_gDNA_ID_2214524_Annot_ID_134135 3000 nt of promoter + ATG
gttacctatctattaaatgcgtaaaggaggataaaggacacaccatacgtgtgaaaaaggaggttccacacgtgatcgatggttgtgcatacgtgtgagttaaggggtgggattcacgtgagagattcacccgaccaaaaactatttttttcggaaaacaaattttagttttcaaacatagaaaataaatcgaaaatagaaagatactggtaggagtgaagaaggttgggctgtcaactgtcaatcccatttgcagttagaaaaaaaatatgtgaaaattaaaatcataaaagtatatttggagaattttaatgtaacttctttctttgttttctgttttaattttctgctatttcaaggacgtgagctatgaaaataagattttaggtggctggagaaagttgtgcaaataaaaaagtggcttgagaaatatttctaattttgattatttacaaacttaaattttgatttagttcgatgaaatattaatcatttacttggctgcccatgaatcacgattcatataggaaatgtaaaaataacttacacatattttctcacacaaacaaatgtgttttcaaaacaataaataatttggtaagcgttgttggggtcacttaaattatgttgatatatataaggtggggagaggcaaaaatagcacgaagtttcaattatgaagtagctgaattggtagaaataaccaaacagttttgaatttaggaaatagtccaatttcttataggcaacaaaaatattctaaattatccgttagcaaaaaataatatttattgagaaatcacttgcattaatttagattaagtaaatagttcaaacaaaaatttgcgtgctacacaattttcgatttggtatctgattctggcatgatagattccaacataagtctccatagatatatatacaagtgggcttttcacttttgctttcaagccttccattagtatttatcctattgtggatttataacctacatagcatatatccaacatgtctctctaactgtttgtgggatggatacgcacgtcaaatcgattttggaaatttttttttttttaatatttaatatacctaggataatgtaatgactaatgatacgttaattttaacagaaaataattgtgtttgtatctatacaacgtcattataatgtatggctgaaattaattttataagtataggtttagaaaaagagatagctgaaggtgtagttgtgaaactacagaaccataaaatttcgttttttccatgcattagttgtgtgtggatggtttacatattacaaacatcgatgatggtgaaaggctatcggccgaccgtgaaatcgtgcagaggattaatctttggattttagtaaatattttgtaaagatgatttggaggtttagtcatcaggcatgttgtcataacatcaaggttttttttaaaacaatggtatttttaaaaatattattgttaaagggatattttttaaaatgggtaatctaaaaagcaattttaaaaaaatttcaataatctttgagtgataaagttttattaattaatatagatataaaataatattttgaaagttgagagtatcgtttaacacagaatgagatatttcctaatcaattaacacaaaatgaaacaacctcgatttgcagctagatttttgctttatcatatcaagcttgaggtaatctctaatgcttttttttttacgatttcgtgatgatagatgtaatatagcggtttctgcaaagaaatttaaaataattgatttagccacatatgttaccaaaatgtaattataatttgatcgatttttatgtatttcatttgtttcatattataatttgatcgatttttgatatatcgtatgattagttaattgaataaatgtacatacatgaaaaagtagtctaaaatgacataggtctcccctaaacaacaaatacacacaatattaaagaataaaattagagagcatcataggaatattatataagtatttaatttgtcaaataagaatattttattttattttattttggctcgaaataagaatatattgaagcacaaaaatatgtggaagtatttatggtggtggtttggttcattgagatatgacctttggactcaccttatcttcctattctttttagtttgctttcataaattagtttccaaattaactcctttaaaatgttgatatcagccgacatttccgtgataaaaagtttttttttctcttataaataaataataacgttgacaaaaaaaaaagacaagaaaaaaaaacaaggataatttcgtaatttcaggatgtgtatagtttttttttgtctttcctcctcatcgttattgatatgaagaaacctttgccgattaaaattaaaaagaagatgtttataaaaatacttcattataaaaaaatgataaatcaagattttaataacaaaaaaatattaaagaagattggtgggttaaaaagggaggcgatgaagaaagaacagcgacctcttcttctctcttccctctctcttcctttctctttgggagagatttttttataagtttttggttttgcagaatttgctgaataaaaactctcactaacagagaaatataaaataaaaagagtactcaagaaaaagaaagctagagagagaggtatagaagaaaacgatagctataagctcatcatcaatcatttctttaattctctgcaactccaaggtacttcctctctctctctctctctctctctataccatatatgtagatgatgaccgaagctgaaagtgagaaccttaaaagagttacaagaaagagattggagaaaaactgtataatacctagttgactcctctctctctctctctctttctttttcttgtattttttttttgtatgtgttatataagattctctgtgtatgtctgaatccttacaggatccaagagctttggaaaaaagatataatgaataacaagatatg

SEQ ID NO: 11967 - DNA, 3000 bp, Unknown
  misc_feature (1)..( 3000): cDNA_ID_2707982_gDNA_ID_2214524_Annot_ID_134138 3000 nt of promoter + ATG
ttcccatttttatgttgttgttgataaaatagaaattaatgaatggtgtacaattaaatggttaattgtatccatccgttttggagttcccgtgtcttaaggtaatggaacaagcaatgtgaagctttggatgatgttcttaattaatttcatatgttatctttgattttcataatgtttgtttttgttatccatatagtttgttatacattgtgatgtgtatctctattaaaagaatgcagtgaattcgacttataaagaaaagacaaaaaacagatcgattactctttacggtattgatgctagaagccaagggatattcccttccataatatatatgtttacaagaataatttgtcgtgttatctcataaaaatatgcttttctgacgctatcttggatcggaaatcatttgtatatatcaatttgttggaaaaaaaactaaattaataaagagatagtaattttacattttggtcaccgaaataattctacaggttatgcttttttttttagaataatgacaaaagaaacatcatgcaacgaacaaaaaatattatgatctaatctaatatagttatccaaaataattcaatccctaaccctaagtgaaagattatatattctattttcagcaaagccttataactattcttgtaaataaatctaacctatataagttgaacaaaaatttgaaattttaataagagacaagaaaacaaattatcaaatgaaaatggacgaacgctcttgatttgtcgcaacattctttactagtccacacacgtccaagcttatggtgacaattttcttaagtatcacttgtgttattgatttggaaaggtcagcaggcaaaacgtagtaaaatttataactgaatcataaatcttgatcactaaaacttaaatcgttgaacctaacattaatataacaaaatggtctattttctaaaatttgatacattcaacatagtctttttatttagaaattgtagaatagtcagttaacccataacttagcttacctcttacattataaattgataatagtaccctttttgtgcaaaacaaaataataatagtatttggatgtatatcagctatcagcattggttgggtctaattatttaagtggccacttgctggcatcaccattagcaccaagtcagtgttggtattgtaatcatattaagcactacttcttaggcataattgaccacttctatctaattaagtaaattattgttttttcaaaccaatttgctaatgtaataaatttggatttctgttttttgccaaactatttgtcaaatttgtggacattgcttgtcaccttccaataagtttgtaactagtggctgcaatactatgcatgtgtcagtatataacttgtttagtactctaataattttaccaaattgttaattatagctccccaacaatcgggagacttcttaaagcttgacgaacatatgccgaaagtataaacgacaaatagcgatcattcaaataacgttttctttgaaataaacacgttaccgaccatatggtgataaaatcgtatgtaacaaataatgttatacatatttttatgttttgtacaaataacatgagatttcgagtatattataaaattataacaacatgtttgaaatcaattaaaaagtatattttttgcaaaaaaaaaaaaactctaaaaagaaatatcatcataattaacccaagaaacgacaaaaaagaaaaattaacacaaaaaaaatatgtaattttcttctgttaacacaaacgtttatctgatttatataaacctttcaaaggattagtctttccatagcaatgtatcccaaaaagatattcgtttggttcactccgaaaactaaaaccttaattcaaaaatttgatagttttccattatttttttgtctagttgtgagtttgttccatcctaacacgtgaagtgaacacttatctatttgttccacttgcttgttcttctatactatatatttttctcaaccatccaaaaacatgcttctttctttttcacttcatttcacaaatgttttgtgtatgttcaagattcttggtattgttgttctatactatatgtttctcgtacattggaaaccataactccatactcgaatagaaaaaaaaaaaattaatctaattttaagagaaaggtttcttttaaaaaaaaatttttccttttaaaaaagtctttttccttttaaaaaaaaattttggtaaatctttttatgagttatgtgtatgagaatttttgtctctacattttggagttcgattttcgttttagtttaggatggtgaagtatttacaaaaaagaaatctatttgcgaacctaaatatcgaataatcgtatctttagatgtagatggattagtacatatcgtgatatcgatagatccacacatagtttgtaacaaaaattatcaaaatgactactagtaaaagtgtatttatcaaaataatctagtagttagttaaagttgatttaaaaagaaaaggaaaagtatgtggatccacgtcaggttgcgtgcacgtaaaagtcttttcattccctagttcttctgctctgttgccgttgtgaacaaatttaggtttctaaaaacaaaaactaacacttgttttgggaaatcgctataatcgaacggctacgataccaccgcaaagctatcacctctaccaacccgaacacgtgtacgtctctcatcacttccacatttctcgcgagaaaaaccaaaagagtttcgtaaaaaaaacgaatattcctgctgtaatattaatttctcgtgtacgttccgatatacgctgacgtgtacgagtctctttatttttaggtttaaaaaaacaatgttattatttgtaaacagtatataaacccttttagtctctattgtttcattattcagtcgtaaaataaaaccgaatttgatttttatttttctctctcaaagtttttcttgggagagcaacaatg

SEQ ID NO: 11968 - DNA, 3000 bp, Unknown
  misc_feature (1)..( 3000): cDNA_ID_2711378_gDNA_ID_2214525_Annot_ID_134140 3000 nt of promoter + ATG
catgaaatccatattactatatttattcatactattatttattgtatcatcaaaacataaacagattcagaaaacaaaaaatccatatgatttaatccatttggacaacaatgaaatatataatctttaatgagaaccatataaccataaactctaaaatcattataaacaatcatagttccttaacactaaattctaaaccctaaacattagatattaaactctatacattaaaccctaacttctatatctaaaccctaaaccctaaactttaacccataaacactaagcccttaaccatatacgtataccctataccatataccatataccataaaccctaaatcccaaaccttcttaatgttgcccataaatattaagcttaaacctcttatccctaaaccctaaaccctaaaccctaaactttaaaccctaaacgctaaaccctaaactctaaaccttaaacacctaaaccataaaccctaaactttaaaccatagacactaagcccttaaccatagaaatatatcatataccatttaccatataaaccctaaattttaaaccttcttattattgcttataaatattaagcataaatcccctaaacataaaccaattgagaacataaaaaattcatatgatttaattcatatgatcaaaatggaaatatataatctaacaagaagcatataaccctaaacccaaaaataattgtatatgaccatggtcaattaaccctaaaccttataccatctacaataaactctataatcattgtaaacaatcatagttccttaacactaaatctaaaaccctaaacactagatactaaactctaaacattaaaccctaacccctaaatttatacccgaaaccctaaaccctaaatcttaaatcctaaatcctaaatcctaaatcctaaaccctaaacccctaaaccctaaaccctaaaccctaaactctaaacccttgatattaaaccctaaacctgttaaaccataaagactaaacccttaacaatatacatataccatatcacgtataccctaaaccctaaaccctaaattctaagatcttcactttaaaacttcttgttgttgtccataaatattaaacataaatcccctaaatataaacaaattgagatagaaaatccatattatccaatccatatggacaacaatggaatatataatctccaatgagaaacatgtaaccataaaccctaaatcattgtagacaactttgattcttcaacccaaaaccctaaatcatctaaactaaacgcgaaatcctaaacaataaagcctaaatcctaaaatgtaaacactagatactaaatcttaaaccctagacattaaaccctagcccttgactttaaagcctaaaccctaaaacctaagttttatatgtacataatctataaccaccacttttgatccatgataatctaaagcacgcttcttaacctgaaaacgtaaaatattattgagatcgatgtgttcatacacaatcttacgatatacactcgtatttatgttttgttaatatgtaatcgtggataaataaatataaacattttcataaataaacttttgttgatatgaccaacaaaacttgtttcatcacattttatcaacatcttttacataacgtaacactggttttatgaatagtattaacaaaacacaatcattttgaattatcgaccgtcaacacacatccaccaaactctgaccatgtggtcatttcaaattatcgcctatcactcttctttgatttgttttgtattttttccattttttcattatttgctcatgtgttttaatgaaaatagcatcaaactacctttaagttacaaatttatagtaagaatatatgtttgggttctttaattcaactctctctctctctttgaggaatttccacaaatatttggtggccaaatctaagatttgtaaaaagacaaaaatttgaccaagacaatgatggatacactaagagaagaagaaacctagcaattaaaaatgaaaattttaaccttatgaggttgattaaagaatgagaaactgaataaaaatcttgaaaatttccaacttttaagatctaagaagagaaagaaaaaagaaaaatctagatctactttttggtgtttttgatgagagagaagagagataatgtctcaaaccatttccttttttcattaagatattttaagtgttttgtgtgtttaattttgtaaagagtagagaaaaaaatgaatgaaaagagagaaaaagtaatggttgtaaattatggtaagtttggattgcttaggttgggttgatggtgtagtagtaaaaaaactttaaaaagtgtttactctttctaaagtgctttattgcgtaattgagtttcaaaaaagtgtccaattacctaatattctcaaaaacatttatcatgttaatgacatttctgtaattaacgtaaatgagaaggatatatatggttgatttttcttttcttttttatagttacttaattttcaaattattaatgttataaaactaaaaactattcttttaaacatatatattaatatagccttaaattttaagtgacattgaagaaaattacgatggaattgaaaatgcttacaacgatattaagtagcttaaaaatatgaaattctaaaatgtgcaattcataaatttaagattcctagatgtagtccataattatatttttatctgtttggttttttataataaattagaaaaaatggataaaaaatgtaaccttagctaaaaagaaaaagaaagaaagacccaataaccaacgaaatccatttacccgtccataggtcttgggttcggcccatcagtttcccgccacattgttcccgccaaaactcatagtcgacataaagcccttgcccccactctctctcttcgtttagaactttttgataagagagaaagagatagagaaattcgtaacggagacgaagcaacgatg

SEQ ID NO: 11969 - DNA, 3000 bp, Unknown
  misc_feature (1)..( 3000): cDNA_ID_3023497_gDNA_ID_2214525_Annot_ID_184741 3000 nt of promoter + ATG
ccaaatgatcaaacaaacaaagctccatctaaatgatgcatttagatgaattagcaaatgattagcaaataatcaaacaaacatcattaagatgaatcattcaaatggattatttggatggatcatttggatgcaaattccaaatgatcaaacaaacatggccctattattcctcactttcaacctttcctctttaaccgaaaaagtatcattatttcttccgcctctcactttgcctctcctcttcacatcatcccttcttggtttccaattcatctttgggtatgatgtcgttacatgatttacttttagggtttatcatcaatcacatgtctcttcctctatgcaagtttacaagttttcgtatttctcaggtttgtaaattttgttatagttcaattatcttctctcaagtgatttggtgttattgtgtctgcaaattttagaatttttggcattactgtgtcgaaccactgacccacatggtctattctctttatctaaattgcataagtttctcttgctcataaaattctctatttaagaaaaacaactttttatttgtaggttcatattccaaattccaatctccaattatgtcactcaatattacacctatctctcatataactctagtaacggatcgatgtaaaatcaaggtgagaagtgcccttggggatttccccaaaaaaaaggataaataagggaattcactggattgaatcttcttcttgtagatgataaggtacaattttgtggatttttctgaagtctcactaaaatctattatatcatgacctatgttaagatttacttagaagaaggagaactgatgagactaatgtagagctctgttgtactactacattatagtttttaccatctttaaaagtttggtattataagaggttcgtttgattcaattttctatatttcattctttgctatatgaaacagtatcacatatactaaaccgcctctctaatctttgtcgttacaaactactaatgacttggattagaatcaaacgaccttgtggatattttttttttataaaattaaatttattttagttggatatttgtctaaatcaatgtattcttttataacttgatgtaaactgttagtgacaaggtttatattttattttgaaacatggaagtaggatacaagcttctgtaaaaagtaaaaagtaggatataagtaggatattatattatgggtacatcattgccatcgctataatttgttttattatctacagttttttctcttcatacaaacgtaagttatttctttatgcaattttctaatttgcaaacattattagagagattattgggatgaataaagttaaggagatcatcactattgcttaatctttagtttaaagatcttgggtaatttttattttcacctttagttcatgtgtaaatttttttcgttttaaccattagtttataagatctaatatttcctccacttctttttttactcagggattcactcattgatgctgccttgtgggtaaacttgcagtagatggatgtccactctgatattaaatctcaaccatcagataagaaatcaaaaatttttgtggatgattcaactatctcagagaaaaaagaacatgatttgttggcggtggaattgagggacgagaagctgattagaaaaaaagtagaagttgatgaaagaaagcaaccaaatttcaggatgaacaatctttgatagcggttgagaggaaaggaaagatggtgtgtgacacgcgcccctaatttttctctcgaaggcgaaacctagtctccggtcagatcaaatcgacggagctgtaatcggacaatgagtctaaatactctcatataatctaacatactcctatactcttaatgaattttaaaaatccttgtttaccttacccaacaaaccggaaccggacggacgaaccaaaccaaccaattacggttaagtctccaaaccaataccatttaagtcacaaaatattaacctatcagaaattcccagaatttcttttcctccctcacaaaatctaaatcgacgactgcagccaacgtcgatttgttccgacgttgaatccaatcgaccaagctcgccgtcgttttgcttctgttattcaaagtgagctttaccattctcttcttatactttggacatcttaattcatcaagtcttgtgttgttgtgtttgaattttgtagatttcaattagatttgatagatttgaaattggtgttggaaattaatagacattatgttggtaactatatattctgggtctattaagacattttaatgtactgtaatggttgattcgtagttaatcttaggcagattactgtttttggtccgaaaatctttgctagaacagaataatctaggtatacctaagaaacgtggtatagctgtgtgaagcactatttatggtataactggtatttctgaaaatgagcgtggtatagctgtttgaagtacaattgatggtataactggtatttttgaaaatgagcgtggtatagctgtttgaatagtataactggtatttctgaaaatgagcgtggtatagctgttcgaagtacaatttgctagaacaggaaaatctaagtatagctaacgtttttttttttgttttttccaggagaatgggcataatcatatattttgattatgatggatattattcaaaaaccggagaagcatatcaatggaatccaaaagtagttggtttgtatggtatattgtttagtacatcatcaatggaggagattacttattcgtggttagtggataagatatgcacaaagatgaagatagatgaatctacgatgaagctgaaattgagttacattccaacgggtgttaaacctcctacatatttatatattagggatgatgatgatgtatatgtttatctaaccacgttggatgaagagaaaagtagaagtgtcttgcatgtagaagtcggtatgagttggaaatg

SEQ ID NO: 11970 - DNA, 3000 bp, Unknown; identical to SEQ ID NO: 11968
  misc_feature (1)..( 3000): cDNA_ID_2711378_gDNA_ID_2214525_Annot_ID_184723 3000 nt of promoter + ATG

SEQ ID NO: 11971 - DNA, 3000 bp, Unknown
  misc_feature (1)..( 3000): cDNA_ID_2708012_gDNA_ID_2214525_Annot_ID_134145 3000 nt of promoter + ATG
ccttgggatagagacgattatcactggaactagtagatccaacgttccattaaacgccttctgggcgctggaacgtctgggatcggattccagttgatcagaaaggaataagcagtaaacacaactaatccacaagggattcaaaaaatctacacttaaccaacagattcgaccaggggttccacaactactctatcccatcctcagaaatcctaatcactactcagacaacatgcttaaagacaataacatataaacgaaagatgaacaagcaaaatgaaagcaaattctgaataacttagaagaaaaatcgaaatacaaagttgtaggaatgaaaagcggctgctgaataatggtgcgaaattcgtgtctctaaagtgcatgtctcagggcgaaacccttagagacttatttatactaagataagatagcgggcttcgagcccacttacggcccatggacagtgtgatcaagagtgtcggctcaaagtgggcttcctgatgggcttcgaatgggcttcgaatgggccttctcttctcttctctttccgatgctcaggttgtctggttgagtgcggattgatcaaagggtcgagctggtggtcgagtaggttggttgacagaatggtccgggctgcttcttgccctctgtgatcgagtaagtgtgtcagctgtcaggatggactggttcttctcctctgcgatcgagtataactggtggactggcaaagtggactgcctggtcgcctctgcgatagagtagaattgcagaatggactgcctcctctcctctgcggtcgagtatatctggcagaatggactgcctggtctcgtctatgatcgagtagaagtgtctagatggactgctgagctgactgcttccctctctgctactggtgatcgagtatgtttggtggaagtgtgactttctgttctgttttccctctttctgagcaccaatagctccaaaacacctgaaacaactccaaaatgcagaatgtatgcaagactagtcctagactcgactaaagatgcaaaatgtacaaaaatgatggtgaatgctatgaaagatggatgaaactagactcaaaatggtgataaaaggatgtgtaaaacatgcaaattataaacttatcaattctctaaaaaatactaacatacaatgacgaatatacccccgtattattgcaaaatttcgaaatggatggactagcaaatggaatgttaaataaaaaatggattagtgaatgaaactttataattctgatacttttttgtaattaatggaattcgccaatgtgcaactccaaattttgaatttttcattcacacgtagaaacgtttatgagtttttaaatagttagcaaaaaaaattttggactatcacacaaaatacttcaaaatcttatggaatttgacatcaaatatcactaaatgatcactaacttttttttcaatgaccacttaaattttgttttatttcttctaaaaatccaccaaatcactagccgtcttttaaaatctctccaaatctaaaatccacaaaatcttacaaaatactaagttcaatacacccttttttgtgataagtgtaaaacacacaaaagaaaacatatataaatggataatggatgggaacataaaagtccacattatttatatattaattttttaactcctctcaaaataaagtacataatttattattcaatcgatgaatttaatttgattatcttaatttggagttacaaataacaagactatcaagaagaaataacaagtttgccattgagttaaaaaatttctgtaatgaaaaaaactcgtttcaaaacgcgcggatccttttgacccggattttaaaataatgggtcataacttctaatcttagtcatccattacatttcatagtagccattgactttttcagtaaaaatcaaattatacagccagattttgggaagaaaaagctttcttttttttttaattaatttattttcttattcaataccattcataattacgtgggtttcaaattagaaaactaattatactcctatactatagggatttataatacttattatattttaaaatattacttatccaatcacattatcacctttcaataaatattttttatgtagatattaaaatatcaaacaaaaactttacttaacaaaaaccagatatgttgttttttaaatgtaacatatgtttttaattagaaatattgtaccggattattcttattgttttttcaaaaaaccttaaatgctaactaattcaatttgttcacgaagttttcatttagttttttagtatttgtcaaagtttcaaaactaaatagtaaataaattataaaataacaactaatatttaaatagtaataaagagataacaaacgatgattacagtaataatataatattattatatttcttaaatatttttgtataattaaaatagataaatattatcaaaactgatttagcatttatgatttctttgagatatttaggaaatatttttaaatattacaatcataaaataattaattatcataaactttggttttaaatcaaatcgttaaacaatcattcaaagaaattgattttaaaaagaaacaaatggttttaattaggaaagttggtgtaaaaattgattaaataaagaaagaaaataacagtattttctttaagactctaccgaattagctctgtagttataactcaatcattaacaaatcttaaaatcttttttagaaagctgtttccataattcaatcgaaaagattgaaaaggcgatgtcgatagaaaaccctagcgccgctagggtcgtgaatccaggagatctcgatgagcacatggaggagaacggccggccgccgggagggggtttaacggggtcgccgtagtgggtcgataaggttcaaagttgctactgtggaggaattccaattcctgagacgagattgagtgcagagtttgtggcttcgaggatg

SEQ ID NO: 11972 - DNA, 3000 bp, Unknown
  misc_feature (1)..( 3000): cDNA_ID_2711370_gDNA_ID_2214525_Annot_ID_134147 3000 nt of promoter + ATG
aattataaagactaagtgttgtgttgaatctagttatttcggttaaaattcttttcttatcaattacaaaaacatataattgtacctagtgttacaaaacataagtagatataccaaaataaaacaatagaacatgaaacagttataccaagttttgaaattaacataagtagatatacaaaaaacctaataaacatgttcaacagttgtaccaagttttcaaaagcataaggagaaatacaaaaaaaaaccaagtaccaagttcgaacagatgtaccaagttttcaacaaccaacatagttatacctaaaacaaaccaagagttgaaattgtttaaacattcttctttgtcttttttctcctatacctcgtctgtataggactccgatacaccggcttagcatccgtcctcgactctgccagcttcttgaccacctttggctttttaactccctctttactaggatcatctccatcctcatgtgcctttcctcgcttcttacttggctcagccaccttagcatcttgaggcacctctttctccttctcactatcagccacctctatgtccttctcactttcaggcaccccaatctcacttggctcagccacctctttctccttctctccatccatctcatcatcttgaggcacctctttgtccttctctccatccatctctccatcactctcagccaccttacctccatccatctcatcatcttgaggcacctctttgtccttctcactttcagccaccccaatctcactttcagccacctctttctccttctcactttcagccaccactttgtccttctcactttcagccacctccttatcactgtcaccttgagccacctctttgtctatctgagtctctgtttctccaacctctctctccttatcaccttgagccacctctttgtctatctcagtctctgcatcactcccttcctccagctcgttttctttatcatcaatctcctttgaaccacaagcgtcttcagttccaatgcctgattgaattgatttgattgcagcttccatcagtttcagtcttttatcttgctcttcatacttcttacagaaatctttcatcctcttgttcatggacttaaatccattctccatcaaattcttcatttcgtttacaacctcagtcaaacctccatcacttggactagtcagagctgcagcagcctttcccttgcctttcttttccactgcggcttttcttggagcttttaccacagtagacaaagctttattagccacaaagctccggtgtgctacatcttcattgagcaacggttcaaaacatatagtcctctcctcatcaactagacgtttcttccagccatcagctattagatcatcgacatcattcacttcacactccttatccataattctttccaaaagtagcttctcatcaggagttgaagccaagatactctgaatgtcctgtgcatgataagaaagtccaattaatataacatacatgatagaacatacatgatacatgatagataactaataaatatgtcatcactaaccttagttgtaccgagtttgtcatacacatctgacattggaaaccctttcatagtgcttgatttaaacttccttttacacatccgggaacactgaggatctgcggattcaatatcttcgcaaaaaatttttctgagaactgggatcgcctcaaatgctagatactacaaaaaaacaatacaagatttttcaaaaactaataagtataactgctaataaaaacacagttgtacatagtttaactttcttaaaacaattcataaatgcataatgaaatgacatacctccaaaggcataacaaaactaggaaacaccttttgtggaccaactacttcattgcactttttaatcaaatagaaaatgtctttcacattttcttcaaatgcaaatcttccccacggaaatgttttgcacaactctagatcagccacagccctaaggaagaacttctccacatagatatacctaatttatacatagatatattgtttagtctctaaaatatctaagttatattcgaacatagatatacctagtttttagtttcgaaaatttctaagttagattcaaaaaagatatactcaatttatgcatagatatactaatttatacatagatatactttttaaaatttctaagttacaatatcaataaagatataccaaattcatacatagttatacttttctaattgtgtaaagtttaaagttcatatcgctctatcgtcgttagagattgaatttgttgcttcagaatccacttcagcagccgatgctactactacttcgtcattgattgtctgtgaaaccaccacctctgccgccaatggcacacctgcgttctttgttcgagccatttctccaaacctacaaacaaaatcatttggattagcactactcttcagtcaatttcgatcacaaaacccaatctgaaacaactcggatcgacgaacaattaaatcacttacccaatttcttagtttcctgtagatataccaagatcgacgaacagttatgttgttgtcgttgacgagaattgagaatggttttactggattttacagtgacgaaataaggaagaaacaaaaaacaaagggaagaaagagatgtgaatcaattttaccgcagagaattaggggaattagggttttatttggatttgacccgaaaacagtgggcttgggttattttgggatccatttgccctggttgggtcgtaattaatcaatattcttagagttttctgagtactttttttacggaataaaaaaaatcaaaaagaaaatgctctttataagaagagtgtatgagattactcttcagccaagaggagcccctgagaatttgtttcgctgtaaccaccgcgaaacgtcgccggctgttctcttaatcttcttaggagagcctacttccaatcaatcacttcacagtatcccactcgatg

SEQ ID NO: 11973 - DNA, 3000 bp, Unknown
  misc_feature (1)..( 3000): cDNA_ID_1808251_gDNA_ID_2214526_Annot_ID_134150 3000 nt of promoter + ATG
aattattctatattcaatgtttgtcgtttatggatttgcaaacatttacaagatcatgcacacaacacaacacgtaactataagcaataaataaaacaagattcagatttaagataattaatcgtttttagaggaacggaggaaagaacatgtgaaaacaactatgagaagaaaactcagtactatcgatgatactaccatcaccaagcttgaacatcttaacagcttcatcattcattccatcattacaatattctccatcattatcatcgaagtagatataattcttcaaaagtccatggtactcggaactctcatcatcatgcttgataaattgatcagcttctgcgccactctgatacgttcatgagaagttggcacgtgtgagaactgaagtgagagattggagtcacgtgtgaagaagattataaatagtaagagagagtagagagaaaagcatcctgcgtgatcattgatgtgtaaagaggattagagctttatgtgctctgttcttgggagataagattggagaactgtaactccaagcttatcgatttagggtttgtttcattgtaattgggattttaaggataagaaagagaaattcatagtttcattcttatcacactctttcgcacattatcaacgaagtagatagaattgttcaaacatccatggtactcggaggctacaacagtaaaacaactgtccctagccacaatgagtgccttgtctcccaaggacctaacctcaacccattttgccacatactcgtccatcttataaaccttaaaaccaactgtcctttgactccttcggatataagctttctttaagcgaagttgatgaataatgcatagatctccacaatactcaacgagtctcttgttgcaactatcatatccgtcgtagtccattggaattgaaggtgtgaattgaaggaggctgagcggtgataaactaatccaccaaattgcgccggttaggtctaaggcatagacttgtcctttatgaagtataatgtccaagaaatcttcaacttggtttttgatttttgtccatattctactactctcttctccactcttgcagcaccagattttgtcatcctgtccgactgcgaaaatcagattgtctaggaaaacaactctagacaatatatgtgatggtccttctttacctatcacgccttgtattaaatacttatcaaatatatgaatctcgtaagattggcgaatctctgaaacctcaaatttcaaaaggtctagggtttgttgtgaaggggttaggagctggcgaaagaaaggagacaagagattaatcttactggattcagagacttgtttggttctgatcagccatcctttgtaagaacatgaagaagggccagttacacggaagaaagtggtgggagagagaacagtctctatcatcttgttggaggaaggaaggttgcattgaaagctcttcggtgtcgcagccgccgaacgccagggtttacagatgctacgtacacggaggacgtcactaatggaggagaaacggtttgcggttaaattgatgaggtctccaggtaattcagaccactcaggtttttccatctttgaatcaatcgacgatgtgagagcgtgatcaacatcggctcgccctctctgttataactccatatatatacacaacaaaacttaaaccctagatacttgaggacttacgtgggctggactagaatccatccaattcctagttggattttcgattagctattatcacgtgagtaatatctgcattacatgtattgacttagtattattgttggagcaatgttttttttttgttaaaaattattattggagcaatgttttgtttttgttaaaaattatttgagcaaaccaaaaaatcgcagaatgaattataaaacagttcgtatttcgatgaaatttcgtctctccctctcaatagctttggtgcaaattaatacccttactacatacatgtcaacttaactctaattctaacaaatagaacagaaaatctggagagagaaaaaaaacgtaactagatgaaagaaaagaaaaaaaaaaagacttcaaaatttgtataaaaatatagaaatgttgaacaaaaattattaactctaaaccaaaaattaagacaatgatctaatattctaatatcatgaatcatgatagaaaaggaacacctaactccataaatgatggtcatgcaatgatcaaatttctcctttatcaattattggtttatattccaatgtccaaactcgaaagtcgaaacaatctcctccatatatagccatttctttccctaacccattaaaatacaaaactaaagaaccatcaataattttttcaactgaaaaaggaagaacaatttgtgatccaaaataaaagagagaaaaaaaaaagtggagaaaggagaccaaaagtagaagcgtggtttactccaattgacggtaaacccctttgacaagtagaggcacttgatagtagtgtaacaaaagtacaacgatgggtgaagattggtcaaacatcaaaaggaccccatactcaaaagatagtattctgtttatttataatcatatatttacaaaaaactaacattcagaatataaaaatattagaatatgtaaattttgcaaacatagaggagtattaaatatagttaaatagtttcgaattaaacactaaataattaaatgttgacaagaaaaaaaaacataaaaattaatacggattccgtgcgttacaataacttagcaatattactctctagtagagatgagaacttgagtacttgactaataatttcaacgcatgttgtcttcttgcgaaatagtcccacgctattctaaaggtgggctagtggaaagagtgtagaacccacttttcaaaagcacatcaactactatataaattaatgaaccacctaacaaacaaacccacacattaaactaaagaagagagaactttagaggttagagag

SEQ ID NO: 11974 - DNA, 3000 bp, Unknown
  misc_feature (1)..( 3000): cDNA_ID_2708018_gDNA_ID_2214526_Annot_ID_184750 3000 nt of promoter + ATG
gcatctcgctcatacttgtctgagagataaaggaacaagcttgcaaaaattcatacttggcaatatagatatcaaaatcagcttaaagatgtaaactttgagaacctcgccaaaagggagaaacaccagcattagccgtcggataaatctgcagcttctcaatcggtttttgcggttcttctatgattttcaagccagaagacattatttattaccacacgccgtatcttcataagaacaaaaaaaaaaatcatgaatttgagtaaattagagaagacccaagtaactcaaaaagtagaaaaaggaagactaacctgtgttcgtcgacgttaaacgctctggttcttcttccctgagaaaaaatctgaagaagatttttagagttttgtttaagacattaagctgcagggttttaagttggtcggcccagtcgtggttgggccaatgtggacttatagtctgaatgaataaaacaaatttttaaccttaatatatgctttgaatatacaaaacatctcctgatgttgtaaccgcaatgtgtttgtaccatgttgctgttacatatatggtaccacttaaaggagttaatttggcggacgaaatttttgtaataaactatcattgaagtacacttccttgaaaccttttttagacaaatccaggtttggcaattcattagacgttaagacataaagactctcacctcggaggatatggtagcctttcaaggatatggtagttttggtattcctaaatccaaagtgcaatatgtcaaaacggagcctatcatctcttcactcataattaacaataataatggctaatttaggggatataaactattttggccagaagaatagattgatttgatggaaacagattgtacagagttgataacggtgacaatactgcgtggataatcgtttaatagcaattagacaacagtcaacacacccaaaccacatcaattacattgcacacgacaaatgacagatatatcagaccaaaccgtatttaattatatccaaaatcttatataaaattgtgattatcacaaagaaccaagatttgtacggtgtcgacacaaaacaaagaagagaaacaaaaactatttcaaacatgtcccgactaatcttcgttcgctcatatgcaattatgcacgtgtctacacatgcgaataatttgttcaaatatttccttttgtcatctacacctaccacatgtaatttaagacctcactagctgtgattttgatatttaagaatataccacatacagttttaaactaaatatttgatatgaatgaactactaatgcaaagttgcaaactaccgctaacaatcaaactcctattaagttatgttttcaaaacaggttcattgctttaatgaacgtcactaattcaaacctaagtaaaaaacttaacttttgtgtgagtatctacttgcagcaaataattactttttgttttgacaatatgttcttttggagtttttctcaatattttgcaaagagttggagtctaactctctgcttaaaaatcctacggagatgattacacctcttgcactatttatacatatccttcaaagttttttgaagtctaaattctctttacacgacatagacaaactttcttactttggatggtgaaaaaatctggttaacataccaaaagagtggtgcaatagtggttactattattaacgtcatttcacgatattgtaactagctagttcaacagttaaaggtaaatttatatcattttttttggggacaaagtaaatatatagtatcattgtttcaataatttctgcattaatatatatatccacagcattaatatatttttcataatgtcatggtagataagatttgctcgaaaaacgaccctactgaattaacaattttttttgtttatttgtcaacaatattttttttttcctgaattaataagtttctgtgaagctaccttcttcttactgagcgtctcctgtgggttcccatatacactgttttctatcacacactttgttgtttacttgtatgtattggaatggttcataaactccataaaccaaaagaatcgggtccaattttttttccaatatctaaataaattttactctataaccaaaataaccaaaattgaactaaaggaatttcgatatcattacacattacattttaaattctataaccaaaaaaaaaacgaaaaatatataaaagactaataaattgtccctacttttctaaatgaataagtttcggtgaagctacctttattacccagcgtctcctatgggttcccttattacactgttctgttctctatcacacacacactttgttacttgtctctatatatcattttaaaattaatatctttttttttcagacacaccatctttgaatcttcttcactcaaagctttgtcatattcaacgaagactttctttaaacaaaacttttaccgcatttaatactcgtcaactacacacacacacactatacatttattcagcttgtgttgtgtatatatattgtgttattcctcaacttggttgttgtattcaatttctcattcctccttaagttttctctacacaagaagatagagataaagacttgacctttttcaagtcttccttggtgttaatactctgcaaattcttgaggtatgtctctgattcttacatgggtcgattataaaagatgaataaaatcataaagtctccacctttatggagttattctgaatgtgtttgttgaaatgtctgaatgagattagatttttatccatcgtcggctataataaatgtgtttggtggtgatgataggaatgactcagtaaacaaattaatatattaatgatagttggcttagagaaaaaagattcgtttgtcaaagtttttgatattgatctgaatttgatacgtgtgcagggtagtttggaggaagagatcgtgtttaatattgttgtttaatcagagaaagatg

SEQ ID NO: 11975 - DNA, 3000 bp, Unknown; identical to SEQ ID NO: 11974
  misc_feature (1)..( 3000): cDNA_ID_2708018_gDNA_ID_2214526_Annot_ID_134152 3000 nt of promoter + ATG

SEQ ID NO: 11976 - DNA, 3000 bp, Unknown
  misc_feature (1)..( 3000): cDNA_ID_2708022_gDNA_ID_2214526_Annot_ID_134153 3000 nt of promoter + ATG
cagcttgaaccacattactaataaaaaagatagaggaccatcaagtgactcaccagagctcctcaacaacaaccgcgcaatccgctaagttccttcttgttctgtaactcttgtacaccttctgtaacgtagttgcagctgcatcaagctcggtgaccggtcttggagagaagaacacaaaaggcgtaggtggagtaatagtaggcttcgttatttggattctctcacagttccttccattcaaactgttacgagcaggcttcgtcggttcaacaatctcctcatcttccttgttcatcggttcagtctcaacttctgtcacaatctcccagctgttgaagctcaaagaccgctccatacccgtcttcggagacttttcctgcgggttctcactcttgaaactgttggttcttgaagtcaagcctccttctttaagttttaagctgaaagatctggtttcaagaaaactctcgacagggttcttgaaactgaagaactgggtcgtcacaacttctttccaagcagacaagagcaaagaaagagaaagacccatctttctctgattaaacaacaatattaaacacgatctcttcctccaaactaccctgcacacgtatcaaattcagatcaatatcaaaaactttgacaaacgaatcttttttctctaagccaactatcattaatatattaatttgtttactgagtcattcctatcatcaccaccaaacacatttattatagccgacgatggataaaaatctaatctcattcagacatttcaacaaacacattcagaataactccataaaggtggagactttatgattttattcatcttttataatcgacccatgtaagaatcagagacatacctcaagaatttgcagagtattaacaccaaggaagacttgaaaaaggtcaagtctttatctctatcttcttgtgtagagaaaacttaaggaggaatgagaaattgaatacaacaaccaagttgaggaataacacaatatatatacacaacacaagctgaataaatgtatagtgtgtgtgtgtgtagttgacgagtattaaatgcggtaaaagttttgtttaaagaaagtcttcgttgaatatgacaaagctttgagtgaagaagattcaaagatggtgtgtctgaaaaaaaaagatattaattttaaaatgatatatagagacaagtaacaaagtgtgtgtgtgatagagaacagaacagtgtaataagggaacccataggagacgctgggtaataaaggtagcttcaccgaaacttattcatttagaaaagtagggacaatttattagtcttttatatatttttcgttttttttttggttatagaatttaaaatgtaatgtgtaatgatatcgaaattcctttagttcaattttggttattttggttatagagtaaaatttatttagatattggaaaaaaaattggacccgattcttttggtttatggagtttatgaaccattccaatacatacaagtaaacaacaaagtgtgtgatagaaaacagtgtatatgggaacccacaggagacgctcagtaagaagaaggtagcttcacagaaacttattaattcaggaaaaaaaaaatattgttgacaaataaacaaaaaaaattgttaattcagtagggtcgtttttcgagcaaatcttatctaccatgacattatgaaaaatatattaatgctgtggatatatatattaatgcagaaattattgaaacaatgatactatatatttactttgtccccaaaaaaaatgatataaatttacctttaactgttgaactagctagttacaatatcgtgaaatgacgttaataatagtaaccactattgcaccactcttttggtatgttaaccagattttttcaccatccaaagtaagaaagtttgtctatgtcgtgtaaagagaatttagacttcaaaaaactttgaaggatatgtataaatagtgcaagaggtgtaatcatctccgtaggatttttaagcagagagttagactccaactctttgcaaaatattgagaaaaactccaaaagaacatattgtcaaaacaaaaagtaattatttgctgcaagtagatactcacacaaaagttaagttttttacttaggtttgaattagtgacgttcattaaagcaatgaacctgttttgaaaacataacttaataggagtttgattgttagcggtagtttgcaactttgcattagtagttcattcatatcaaatatttagtttaaaactgtatgtggtatattcttaaatatcaaaatcacagctagtgaggtcttaaattacatgtggtaggtgtagatgacaaaaggaaatatttgaacaaattattcgcatgtgtagacacgtgcataattgcatatgagcgaacgaagattagtcgggacatgtttgaaatagtttttgtttctcttctttgttttgtgtcgacaccgtacaaatcttggttctttgtgataatcacaattttatataagattttggatataattaaatacggtttggtctgatatatctgtcatttgtcgtgtgcaatgtaattgatgtggtttgggtgtgttgactgttgtctaattgctattaaacgattatccacgcagtattgtcaccgttatcaactctgtacaatctgtttccatcaaatcaatctattcttctggccaaaatagtttatatcccctaaattagccattattattgttaattatgagtgaagagatgataggctccgttttgacatattgcactttggatttaggaataccaaaactaccatatccttgaaaggctaccatatcctccgaggtgagagtctttatgtcttaacgtctaatgaattgccaaacctggatttgtctaaaaaaggtttcaaggaagtgtacttcaatgatagtttattacaaaaatttcgtccgccaaattaactcctttaagtggtaccatatatgtaacagcaac

SEQ ID NO: 11977 - DNA, 3000 bp, Unknown
  misc_feature (1)..( 3000): cDNA_ID_2708026_gDNA_ID_2214526_Annot_ID_134154 3000 nt of promoter + ATG
tttcagccaaatgggtgtatcctcttccgtgactatgctgtcggtgatcttgctcaggtttgatccaccttttattacttcagaaattcaaagttatcgctactcgtatgcccattttgatgcacttgaaacgaaaaaatatttctactacagtttcatgcttaaaaaaaaacattgtggtctggctttccttttaggaagaacaaccacttcttaagagatttagtatcctttagaatacgaaggcgtggttaccccttatgtgtttcagtatttcatcaacaggagaggttctctgggaaggatcagaggatcagcgagaacttttatgtgagaggtgatggcactgtaagttctttctttctcctgcgctatttatttgcagtacacatttctataattttgcagatctgtgatgattttgttttctatgcagcgtgcattctacttttctaatgaattcctagaaactttgttttctgaacaaggatttgaagttgaggagcttgatgtttgctgcaaacaagttgagaatcgttcacgcgaactggtcatgaatcggcgctgggtccaagctacatttcgtcgaacaaatggcaacaaaaacccttgtgatagtttgactcctgccaaattagataaatctgaacaacaggatagcattcagtctaaatctgaggagcaggaaagaaaagagattattgattacactgacattgacatatctgatggtctggctatggaaatgtttggagcctccccatcaagtcatgaggtaagagacttcggtaatctcattgtttttacatattttctcgaagagtatttttaatttaattctatgcttacaagtccatatctgtttttctattcgatttgttgtcatagatgagcgtggttaagcttagggattctgcttttaaaatcaaacttttgtcaaaagaatatcaacatacttgcaaatctacggggttgatgctctgggagtctgctcggcttatggcttctgttcttgacaggaacccaaacattgtttctggaaaacgggtgttggaattgggttgtggctgcacaggaatttgctcgatggtagctgccagatcagctaaccttgtggtagcaaccgatgcagacacaaaggcacttacgctattgacagagaacatcacaatgaacctccaatcttctttacttggaaaactgaaaacaagcgtacttgaatggggaaacaaagagcatatagaaagcattaagcgtttggcttgtgagggattcgaagttatcatggggacagatgttacctatgtagctgaagccattatacctttatttgaaaccgcaaaagagttgatcttacggaaaatgggagacgacttagaggtgcaagagaagccggcgttgattctatgccatgttttcagaagggttgatgaaccttctcttctgtcagctgcatctaagtttgggtttaagcttgcagacagatgggctgcaaattcaaaggaatctcctattgggaacatcattgacagttggttttccgaaaaggatttggtcgcagaaatcccgagttctgcgttgcatattctctattttcagatggagtaactatgtggtagaggagcaaatgttgattaactggagagttcttttatattaaaaaatcctcattgaatctcaaatcaatgaatgtcctacatgtattcttctatattagcaatggattttttgggtataaaactattacatgatgatgacttgttgttaccagccttccttatcatccatttccctcacgattttgacatttttaatggctttatgagagttgaatccacatgttaactcggtcctgcagaaacactttcccttttatgacttggattttgttggcatgttagtttagtcagtctccccctcatctaattccatcaccactttccctcattctttgccacacaaaagttgtccaaatgttcacatttccttctacatgagcaccgccatggataggtgaattatacatttacatctcctcttgtgggtttagcttgaatcataatgttttggagagttcttgtgatagattcacttccacaaaaaacctttgcttcttcaaaattactacataactccatgacataaaaaaattactaaaaacattattaattttatttttatattttttacacattgaccaaaaaataacatgttatgaaaactgaaatgataaaaatatgaagaatagtataggttttttatggtaagagaagtttagttagtgaattttttttttttttttttttgtattctcaaaatataaatagattcttattttatttcttttttcgtgtccttaaatatttatctgaatttttaattaataaacgacgatcaaaatagttctcaatcagttggatcatctttttattcctaaataaataaactccaaaagcatctctctgtttcttctcctctcttcaagctttttgtttcgtctcagtcgtcgtcatcatctctgacaggtgaattgaataatattccactttcattattccttcttcttctttatagcttttccacatgaatttttgtgtttgtgcttgtagatctaaggttttgtccagtttccggagtaattgaaatttgcagagaaagaaaaatccaatttttgttcattttggaaaaaatctgaattagactgattgatagtacacattttttagaaattttggagaaacccatgtatagtaagctacaaaatgatcaattatactcagatcatttcagatatataatgagaaatggtagattaatcattgttatttgttaggttgattcaaataaacattagaagctatttgatgaatctgtctatgtctacttgtggcagcaaggttattcacataggcaaagaagtcattcttttgcatgctgttttccaataaagttaattctctaacagaacaagtttcgagattggatattgacgacaacgat

SEQ ID NO: 11978 - DNA, 3000 bp, Unknown
  misc_feature (1)..( 3000): cDNA_ID_2993656_gDNA_ID_2214526_Annot_ID_134157 3000 nt of promoter + ATG
gtgtttcgtttgtggattttgttttctcatgatttttaaaatcccatgtttacacgatcataacgtttcgtcaattttaaaacgataactctataagtaatagcgtgtaccttcatcgtatttctttcgacgtcgtaattatgatcaccattcaccattttccttcttttttctttttagggtatataacgcaactatataaagcacacgtacttaaagaaacccatttgggcatgtgttgtccttgctgtggatcacatgcataagtctgctttttctttttaatatgaattgtttttgacttcatatataggaccaattcaaacatttatatttaaagaatattttactcagtattattactttcttttgtaatgatttacaattttgtgccactcgtatgtatagcgttttaaagaggttacttaccagtagtttttgtccaaattttatatgtgaaataacccttctcggaaggctaccacatttccattaaattattggaaaacttttacaaaatgtgacaattcgatcggaaggctactatctcataggtattgaggcaggatagtcactaagttaatgattctgcatcggtcacaaacgtggtgatcgacgtgaaaagattgagccctcgcaaaagtgagatggtgctttgtcaaacttttgcgataagtgatcatgataattacaaattaaacttcatttttgccgtttatgtgtcacttaaaattatgttttattttagttttcttaaatgaaaaaagagagtttatatatatatatatatatatatgaatcaaaatgttagttagtggatcttttgattctgaaaaattgttggatatttgtttcctcgcttaaattggtatttatagtagagtttgaatcgaggatttgaataggttcaagaattattttaccctttggaagcgtcatctcgctttgagttctactacgatgttatggttagactcccacggtgggagttcccatttactcttaaatgcaactgaacgggctttactatttgatgcaatgatacaaagaaccttcagatttaaacaatgagacgatcgcaacacaagagaataatgttactgatccttctacaacaaacactgcaccaaggcctagtttgcttgattgaatgaagtatacaaagcatagacacttatcacatttaaagtatttgtaatatggcaatttcgtatgtgttaacacatttctcaaattttaaaaatcgtttatatggatcttataaaatatggtagtaataatttaggtgggggattgggtcattatttatttctcttctattttgctactgcattaactaatattaggctaaaagttccttaaataataaagcttttttatgcgtaatgtagccgccctcatttatataggtctcaccaccaatcgattaattgtaagtaacagaaattgttgattatagttaaatgagtcgttgataatttgtttaaatttgtaaactcttcaggcaaaatttatattatgtgaacaaaattgccatatatttcatatcatgaatgaatttggtctaaacatactccatactgtcaaggtttaaaaaacattatattcatacaatcataccatgaatgaatttgtgtaaagctgtaaactcttcttgcatcctagctattttcctcttcttcttttttctttttctgactagtcatatagattttttttttgatttttatttgatcgttggagaatcttcaaaagatgactccactcatcttttcaaaaactacctagaccatatacagggctctccgtctacaacaattagcgtccggaaaacgtaaagaagtctacaacaattagcgtcctcgtggatcagtatcgtgacatttgtgtcatggaacctatccttggcagtcgaagttaggctcactcccaacggtctaacttctaagtgctcactaaaatatgaaaaactaatgttctcgaacaaacaccacctataatgactcaaccctccataaaattcgaaaactgatcttaaacaaaaatatatataagtgacgtaaaacataaatttatgtatatctattaaataataaattagtgaagtaaaacataaacttaatcgcataaaagtttaactttattttgcttctcaatagattttgactacataatagacgtggattttagtcaaacacaagcgatattgcaaaatttccgatatatatatatacacgtctttttcactaatagaaaagtaaacatatcagctcatcttttctctattggcagttctcatcatcttaattgaaaatttatgtttccactttttttagcttagatacaaactcaactttgtaaaagattttcttgttgcatattaaattttacatcacaacaaaaagaaaaaaagaaataaacaaaggagatcaaataggttgtacataaattaagcaatcatacaacatcaaatcaacagctaaaaagttcagtacaatctttacttccgaatttacttcattgtcttgacatcatgttctaaacaaaaaccaaaccaaagttctccacaaacctgtcggtttttaaccaaaccaaagttactagcttaattcaaaaaaaaaaaaaaacagaactgattcagaaaccccaaattgacaaattgtcaaattgtcaaaaagtggtcatctttatcctttgacatctggttagtataaaaaattgtaataaatgcaaacataagatccaaaactacaccttattagaacggaggaattaagagtgacataactcactccaactacgaccagtacaagtagttggcgacattaactacctctcaccaaccaccaaacccaatccccacaatattaccattactctcatataactacacatattcatatttacattttttgccaacacaactccttataagatatacacttcatcaacctatagatctcactcacataatcaacctacaaaacaaaaacaagaatg

SEQ ID NO: 11979 - DNA, 3000 bp, Unknown
  misc_feature (1)..( 3000): cDNA_ID_2708030_gDNA_ID_2214526_Annot_ID_134158 3000 nt of promoter + ATG
atccactaactaacattttgattcatatatatatatatatatatataaactctcttttttcatttaagaaaactaaaataaaacataattttaagtgacacataaacggcaaaaatgaagtttaatttgtaattatcatgatcacttatcgcaaaagtttgacaaagcaccatctcacttttgcgagggctcaatcttttcacgtcgatcaccacgtttgtgaccgatgcagaatcattaacttagtgactatcctgcctcaatacctatgagatagtagccttccgatcgaattgtcacattttgtaaaagttttccaataatttaatggaaatgtggtagccttccgagaagggttatttcacatataaaatttggacaaaaactactggtaagtaacctctttaaaacgctatacatacgagtggcacaaaattgtaaatcattacaaaagaaagtaataatactgagtaaaatattctttaaatataaatgtttgaattggtcctatatatgaagtcaaaaacaattcatattaaaaagaaaaagcagacttatgcatgtgatccacagcaaggacaacacatgcccaaatgggtttctttaagtacgtgtgctttatatagttgcgttatataccctaaaaagaaaaaagaaggaaaatggtgaatggtgatcataattacgacgtcgaaagaaatacgatgaaggtacacgctattacttatagagttatcgttttaaaattgacgaaacgttatgatcgtgtaaacatgggattttaaaaatcatgagaaaacaaaatccacaaacgaaacacgacatcatatatatattctaaatatgtagtattgatatgtgatcaaaacattgttaggttaaacttgaaaaggaaaaaaagttgctgttaaaagaagttgctaagacgtatgggaaattagtaatgttgacaagagaggtatggatgttgaaatgtttatgatgatatctaacttatggctgtcttctttaatgagtcaaatggctgatgcattttacgggaagtagttgaagcaaccccttataccattattgcacattattattatttccctctctcttttttgtattgtttttaaataaaaaaaaacaatttcagatcggttaggtccttttggaccatgaattttgtaggccataaaaaaataaaaaatagaagtccaaaacaaatgaagcagtgaataaactttaccaaaataagatccaaacacgtacgtgcatgcttgaatttgttcataaatgactgaagatttttcatttgattgactaaatattgtttttacttctttgcctttttttcttttataggttttgccaagaaaccaaaagcataggtaatgaacatggaaatccgaaccatcttcatcttatatgatacatactcatttagcaaagaaaaataattaaaggatttagtttttggttgtcacaaaaaagctttgtttcaagaactctgtcattgcgcttatatcaggaaagaaacttgaacaaaaaaaaagagctttgtttcaagaagaagggtctatactctatagtctatatatagtgcaacagaaaatgatcacgtgaggttgtagatataagagaagattatcgaaccaatcttctaagacaatttcagacttaatagttaatactagtagttttcttatatatacaaccaaaaagaaacggtttaagaagtgaaatataaaaaaactatccaatcttatccaacgagtcatggttctaaactcccgttgacttacataccataaccacagtcaaccctaagataaagatggctaaaatatgaaataattgtggcccttcttattattatatcaaatataaattcacaaaaattcaatggatgaggatgatagaactgggtttaacatgggcttccaacctaaaaccaattgacaataggtggagtggtccgaaccttctatatatcacttgataattcctccaatttttgatgtggaactttctttcattaacaaaggatacaaaagaaaacctctcataagcgacaatattaaataggatttagttatttagcaaaaaaagtagaactttagttatagtattttcataacaattttcttattatttaaccgcttgttaccaatcataacaaaaacaaaaacgtgatggatagttataagatgatgaaattgaagaactctgaaagagaggttcatgcttcgacacacaaatctcgtcaagttttgtgacttcgtctagaaacgaagattaccttataatctagctttttattctaattttttttgcattcatggttataaatggaagggatttgatgaaattagatgggattggagatggagaaggatggaggcacctgaagagagaagaacaattgttaaaactataagaaattaaagaataaaaagataaaagagtatcatgaagagtgaagaagaaacaatggtcataaaactatatttgcgattatttatgcaactttatatattttttattttttttaatcttttaatttattttatattactattgtaatgagattttacttataacaaaaaaaaatatttttactattcgacttcttgttacaacttaaccattttcattatgaccaaaaacacactttcacaaaaactttgaacaattttcatttctttttgttacaaacccctccaaaaccaatcttaaaacagttttcatttacataaaccttgagattaaatcacattaaaaatcccaaatcatatgggtttaaacttaaacagaatcttataaaaattcgaaagcccaatatgttttgttttcccaacaataaaaatagattggaacagaaaggttgtgggaggcacacattacacaccaaagcagtgttttctttctcctgaaaagatttttcaagctctctctttctctcaaaggtaaatgcttctctgatttcgccatttttgcttactcgattcaaaagac

SEQ ID NO: 11980 - DNA, 3000 bp, Unknown
  misc_feature (1)..( 3000): cDNA_ID_2708034_gDNA_ID_2214526_Annot_ID_134159 3000 nt of promoter + ATG
gattgtgttcagtggctagctaccatattaatgtgaagaggcataggatgttagtagaactagacatattttcaaatctaccctggtcttgattcacttgttctgacatgattttgcagttgctgatacacttctctggaaggatttaaagcagactcttattgccatattcattctaattagtatctattataactttgttgcaactgggtctaccgtcgtaactgctctttcgaaggctctattggtagcatctgtatttttgttcctccatggcattctaccagagaaaatgtaagattcctgagatgccaacttttgatagattttcatttatgtgcaatatgaactaccttaacctagttctctaataatggaaaccagaaggtatatgccaaacatttttgaaacactgtgtatcgtactcttcaatcaggaacaagtaatataagcaattgctgtctatttcagtttacgaacaactgaatatagatgcttattttgcagatttggttatacagttgaaaagattcctgcatcgcaatttcacctctcaaaagactcatcacatgacctctcattgtcagtgatctcttcatggaacaccactgtaaaagctttaagatctctttgccaggggaatgattggagcttctttttcaaggtatttttccttgaactagttattgctggcaagttccagtcgtacgatatcttatcccaacctgaaacagaaatagggacaaaattcgattgctgaagttctctttggtaataatattgtaacaccgctttggtgtttttaatgtcataggtggtcttcgttttgttagcattgagtttggctggagccatatctcttcacagcatatttgttataggtacacactcactctctatctagttttactacatgccaacgctacggttgtatgaattatagttcttcaacaataactggttttgttgttctgtttttgttcaacaggactgcccattgccttccttgcttttctcgtgtacgaaaagaaagagcaagagatcgactcaatagtggtgagttttaaatctttcgcatgcaagcacaaatccgatgtgtatgagaaattgttcggaagcaagaaacatgactaaaaaccctttttttgcccagcatttgtaattttcttttgtttccaacgacctctaactctggtttgagcttttttcaagttttattatttgtgaatctcttttttactcatttctattggtctttgtttacatgcttggagaaaaatggatgttgagagatgccctattaagccacaacttttgtcctctaacatgaaagtaagcattgaaaaatcgaatgaatttgtgaaaaaaagaaaggagagaagaaagattcgcaaggttgattcctaaagcacatgtccttagtcccgtgcctttgaatatagaatcaattgatagattatcaaaccacaaaacaactctaatattgaatttaatgacaaaatattagtaaagaccaactttatgaagtggcagcctttttatctacttgttgtaagtctatttctcgaattttcctttccaaatatccaaaatgtaattaatgtaaattgagttaactatattccaatatcattaaaatcatagagacgaatttcataacgaataaagaaaaaattttaagcttcaattttattgttaatattttgttgtacacatgttaaagcgaataatttagcatatgaaattcttacagaaccacgttatattacatatgtaaacaacatatctccgaagtagttcttttgagtttaatttaaagttgttaaaaaataaagattatctgaaaataaataataatacaaaaaattataaaaataaatagaaatgtttaactggatcccatccatctaaaaacagaagcttacaaattaaaatttgtattatcactccacttttattaaaaagccaaaattacaagacttgttataattacaagagttttggtgtaagtaattaataaaaagaagtcgggtcgggtcgggtcaagcccaactatttttgaatcacaagagttatctctcagtctcactagtcacttgcaaagaagcgttgtgtgagagttttgaatagaaagagtagttgtctctcattccccaaatttggaatcacgccgataaagccaaaattagccccacgaaaaagctccgacaaccaaagtaaccatctttttccgaggattcatcacttaaagcaccattttgtccacaatcactcaaccctaaaatctttttctcctttgaatccttttcatgcttcttcttacattccccgatttctttttcctctgagaaagtgatttccttttgattttgattcttttttagtctttctgcaatgattccgtattttgaattaaggatttataaaaaagcagagattggagcttggtttgttgtctatcatcaactatcacaatgggtgctctcagaagaagaaatgttggtttgattgattcaaagggttgttctaagttgtttcctgttttacaatctcctcctcttactactacttcaatgtctcagtccaatggtccattctcttctcttgtcatttgtgtcactggtttatccaaaggtaaagactttgttcctttttcaatctctattaggcagaaagtttgaatttttatgttccatcaatattaaagttttattcttctagactttcagattctgttgttataactttggttttatgtttgtaaatttaaagaatttgttcctcttcaatctccattagtcagaactcagaagtaggatatttatgttaatcaatctttagatttcagatgctgttgtgaatgtgatcttgttgtattcataacattggttttgtgttgtgatatgttaaattgctttgtttctttgcagatgcaagaaaacaagtcaaggaagcgacagagagactcggaggcgagtacactcctcatcttcaccagcg

SEQ ID NO: 11981 - DNA, 3000 bp, Unknown
  misc_feature (1)..( 3000): cDNA_ID_2708038_gDNA_ID_2214526_Annot_ID_134160 3000 nt of promoter + ATG
agtaacaaacatcttgtgaagctgatagggttttgttgtgaagaagagcaaagagttcttgtttatgagtacatgcctcgaggtagcttggagaatcagctctttcgaagtacgtcatctactatatttttacctaacttgctaaaagttgtttcaatttttgctatatatgttctagaccgcgttacaaaacattttttctgtttaaacctaaaagaacaactccacgaagactttaattacgttttagttatagaatgacaagaataaaaaatattgaagaaaagaatccatatggttcacgttaacttcgtcaagttcttactttatttatgggtcgtacactacattaataacttcttaaaaaactatatattttttataatttagataatattcaatagtattactaactttgaaaagtgtgtgaattgggacaggaaatagcttagcaatggcttggggaataaggatgaagatagctctcggagccgccaaaggtttagcttttctccatgaagcagagaaacctgtcatctacagagactttaaaacctctaacatattgttagactccgtgagtttttttttcctttttaaattttgtatccactattaaatcaaattaaagtggtatttctcaactgactctttgatatttcaggactataacgccaaattatctgacttcggtctagccaaagatggacctgaaggcgaacatacgcatgtaactacccgagtgatgggaacacaaggttatgctgcgcccgaatatatcatgactggtaacatttttgtaaggaatttatttcttttaccgtgaagcgatattctttgagatatgtctttaatggtttacatgtgttgtaggtcatttgacgacgatgaatgatgtatacagttttggagtagttttgttagagctgataaccggaaaacggtcaatggacaatacccgaacacggagggaacaaagcctagtggaatgggcgcggcctatgttaagggaccaaagaaagttagagaggataattgacccgaggctcgcgaaccagcacaaaacagaagcggctcaggtagctgcttccctagcatacaagtgtctaagccaacatcctaagtatagacctacaatgtgtgaggtggttaaggtcttagagtctatccaagaagttgatattaggaagcatgatggcaataacaacaaagaaggaaagaagtttgttgatataaataagtttaggcatcaccgtaaaggcaaaagacgtgtgaacatcgcttattcagattctctcgtttacaaggaatccaaggcaaagcaaaacgatggcatttgaaatacatcattttctcatatgaattattaagcattcatattctatgaacgcaattcttatcttaagttatgaccattcttccaaaaatttgaaggaaagaaaggtgatgttataagtatcctagttctctggtattttagattaatttcctttacataattcaaaaatactttgtacaaaagagtcatgtacaagaaatataaaataaatgtttgtaaatcatatatatatacaccagtttgttgggcggacaacgttgaagttatttcgctctttaaaacatagtagatgatcacttggttggttattatggagattggaattgcaataaaatcaaatcatgtatggtacggcagctacccctagattattcttggtgattccaatgaaattatgagctcctcggagcactctcgttttcaagattacatatgaaaccgtttgggtatatttgagtttcagaatgctgtataaatgtaataaattattaaatttttatatttattttatctatatcaacaataagtatacttttttccctagatgacttaaattcaaagcaaattaacaataacaatcagtttgaagattatttttcctaaatataaatataattgtataaactttaattagatttttaaaataataagctaattcaggatattcaaaatatatagagaaatcttattaaaaaaaaaaattagttgaaaggaaatagttaacctaataaaagcaagtaatcaaagcccaaaaatttacaattaaaacccttagtgataaggattaagtgtcattagtagttaataaataaatgttgtagatagatggagtcactaaaaaaaaaaaaggtcaaaacgagaggcgcaaggtttggtgtcttgttaaataaatcttgtggtgctcgtgttacctctttagccaaacaacacccccaaacaattactcttatagagagagtagaagaagacgacgcttaccccaaaactcgaatccctaggaggtaacagcttaagctctccgattaccccaaactgcaaaatttctcatctttctctctctttatcttgttttcaacagcagcctttacctttttcttttaacctctgatcttgttatcttccatggatccatttccttaaaggtttgctctttctttcagagatattcttatctctacgaatctcatcttgatttgggttcttcttttttgtgtggtttaataaatcacaaatctgtttttttctatcttggatttacttaaaaatcttgtttttaataaagggttttcttttatttcagtcatttaaagatacccttattctagaatttagtagttgtgtttcaaattttaagtctttatgtgtttgtctggtaagaactataaaaaagctgcaatgggttttgacttatgagtttgtagccactgaaaatgtatctctttttcttgtttaggttttggtaatatgaattgagaagtccacgcacgtgtgtatctctattaccgtcaggtgtgttacctttcttctctgagtaatttgtttgattaaagcaaagtattttgcaggtttcttctttgagtaatttgacttagaaaagccaaactcttttttttgcagattttggtttaaaagcagttatttttactagtcttgtaagaatg

SEQ ID NO: 11982 - DNA, 641 bp, Unknown
  misc_feature (1)..( 641): cDNA_ID_2708052_gDNA_ID_2214526_Annot_ID_184768 3000 nt of promoter + ATG
gtcatctgtgaaacaagccacagagagacaaagactcgtaagtattgggcaacgaaagcgacctcctttattcaccactgccattaacatgttcttcttctccttcttcttctacattttatgaccgttttacccttcaagagagagaaacaaaatcactccctctcactcactctatctctctcttctgcaaagcttcagaactctggcagagagataaaagatgatggggtttttaactttatcctccccaaataattcttcttcccttcatctctctctcttacacaacaggtccctacatttgtacaatctcctctctttaaagactctctctctttctctctccatctctatcttactctgtatttctgtcgtctgagcactcaatgaaaccactgtaaatttccgccagaatttgatgtgatggaacgataaaaatcattttttctcggttaaagtaaaaaaacaaaaacaaatttctgtagaaatcataataaaagaaagaaaaaaaatctaatgtcggtacataatacggttctcttcttcttctctatcctctgtttcttcttcatggagacttgaaagcttttaaagtatatctaaaaacgcagtcgttttaagactgtgtgtgagaaatg

SEQ ID NO: 11983 - DNA, 3000 bp, Unknown
  misc_feature (1)..( 3000): cDNA_ID_3023585_gDNA_ID_2214526_Annot_ID_184766 3000 nt of promoter + ATG
tctatattgttgaacagttattgcatgatggaacaaaggagtttgctcaaaatgaaacagattctgctaaatatatgttatcttctgaaagtattgtaagtggttagattcataggtcacttgagctgtctttgttagagttttgagtcttgtgagtaccttgtcttatggtagtcaacttattatcgtaatatcaggcaattggggagaaactatctgagattggtggtaggttagactatccacgtcttaccaaggacatcgctgagggaatagaaacactatggaaggatcctgcaattcaggtgtgtttgtgtgtgtgtgtgcacgttttatttactattgcactcaaagttgaatacatgatttaaacgtttcattttgtaggaaacttgtgctcgtggtaatgagcttcaggttcctgattgtacgaaatatctgatggagaacttgaagagactatcagatataaattatattccaactaaggtataaccaaagtatcattctttgttgaaaacatttcaagtaatgatcttaaaatggttgaataaaactcattggatcagcctcggaggatcaatgtattaacaaacagaagccttttgctttccatattagcctagttgagctagcattttcagagaccagagtcaatatgcaatttctgtgacatgtgtcttccggaatgtgttgtcattggtgcattttttctatgttggtgtttcaggaggatgtactttatgcaagagttcgcacaactggtgtcgtggaaatacagttcaggtaccaactactttttgttttaccctttttcctgtttgattgttagtctttcatagatgagtaattgtttgataagctctaagtgttagtctggttcactaggcaatatgattagctaggcggtttgtagtagctgtgttaacagctcagcaacaatcttgttaatgtagtctctctgcgatgtgtaagttatttggtgaaatgaataaaagtgtttacggattcgattcctatgattgccactaagatgtactaatagaacatatgaattccataccaatatcaaacttgttgttgtggtgaatctacttgtaatgatccgttaccaaagatgaattcacaaatggtatatgagataaagcttcgtttatgcagccctgtgggagagaataaaaaaagtggtgaagtgtaccgattgtttgacgtgggtggacagagaaatgagaggaggaaatggattcatctgtttgaaggtgtaacagctgtgatattttgtgctgccatcagcgagtaagctcacttcattataaattataagatatcctcgtactgtccacatattgccaaaacattaactgagttttgatcataggtacgaccaaacgctctttgaggacgagcagaaaaacaggatgatggagaccaaggaattattcgactgggtcctgaaacaaccctgttttgaggtttttagttacatttttatctcatcttttaaaaatttaaagacactcttgagatgggtttggttacaaaaacttggttctctttacgcagaaaacatccttcatgctgttcttgaacaagttcgacatatttgagaagaaagttcttgacgtaagaagaactaaagcatatttatttgttttgataggcaagcaagtctttttgttcaataacgctttcttattcaatgtgcataggttccgttgaacgtttgcgagtggttcagagattaccaaccagtttcaagtgggaaacaagagattgagcatgcatacgagtaagcttgtctccaaactttactgattcccgccaaactgttaccgttatatgaccttatttttaatttggattcaggtttgtgaagaagaagtttgaggagttatattaccagaacacggcgccggatagagtggacagggtattcaaaatctacaggacgacggctttggaccagaagcttgtaaagaaaacgttcaagctcgtagatgagacactaagaaggagaaatttactggaggctggccttttatgaccttattattacatatctctagtaaattacctctccttattattataagaaaaactcgaaaactgaatgaccgtgtaatttatctttcgggacaaaagacttagcgattcaaaatctaatgtgtctcgatggctacgactagtttctattttatcattgtttttgttaacattcctctgtctttgacttcttatttttttttctcatcaaaaacatctcattttgatcttgtttttggggttatattattattaaaatgaggcatccacatcccgaaatctagaaagtgaaacacaacacaaaacgtaactttatcagtactaaaaagttttggaatgttcctaacatgaaaaagttcttacattaaaaaaaagtatgggggtgaaactgaacaaatacaaaatatgatgtaaaaactgaaataaaagtaaaacacatggggtctaccgtgatttcagaacattcgaaaaagcgactttaaaaataattgcaccgaagaaagaagaaccctgaaagcaaaaaactcttcgccgttgttgtttcttacgtcaaagaatattccttcttctctttcgttaatagatcccaaaaaaaaaaaaaagcttcattgattcttcttcctctgtttttgattccgttttcgagcaatcctctgaaacatgtatgttgttgttctctctttcttccaatggtgttctgattttgctttttctgttatacgataatgataacaatcgcttcttagtttgattaatacgaaactctcaaagatcacgaaattggttttgttagggaaccatttagatcaaggcttgtttgtgattgttgttgttgattcagctttgatttgattcgttagccattgattttgatttgagaatttgtctttgtttgatttttcttgcagaatctttggtacaattggagttatattcaaaagcttataaatgtcaaat

SEQ ID NO: 11984 - DNA, 3000 bp, Unknown
  misc_feature (1)..( 3000): cDNA_ID_2711382_gDNA_ID_2214526_Annot_ID_184765 3000 nt of promoter + ATG
atgtccgttgactttgtttcttccatgattaaaatttaagaagtaaggaagagaaacaaatttgaaccattgattttgttactcttaactaaataatcatttattcaataactaaaggtcggttggtcttcaggtacgaacgttcttctatactaacttgtaaattgtaaacgtaacagattgtgcagtagagattgcggttacaaatgtttgacaacgatcacaaaaattgtttaacaccgcgtattcttccgccaacgtttgcggcagcgggtggttaaaaattacactatttttaagttttaaattcaaataaatttaataacttttttgactcttggagtcatgctctgaacacaaatgattcattttccggagaacataagtgcattgtatccgtctaatcgtcccaacatacttcactataaatgtaatttaatactaacaattaaattgaagtgttgttcgtcgcatgcatgtatgtacgtacaataattatatagtttcattatcatagaactgtcggggaaattgtgaatcatcaccagccgccacatgaacttatttgccgttgttctggtttaaggctggtaagatttattcggcggctgtaggcctgtagcccttgaaatatggtagacaagatcgtccatataattaagattttgtttttcacttctaaattaattaatgggtgacttgggcgattttgtattgttgtttagtggctagaaagaaaacttttaacgataaatttacttatgcaaaaattatattagtttagtttagcaactttatatgtacttaattagtaaaataatacatttaaatgtaaactatttgtacatattaatgttgtccaaacaatatgcactttttgaatttttttactgtattctccacctagtttttctaattcatccaagcattttgatgaatttgcatgtctccatagatgaattagtatctactatctctaaaaactcaatctccaccgaagatattgcttaaccaatgtgctcctagaccaaatccaaaaccttagccgcttcatacttaacatccacttttgtagcatcctcaaactgttttacaaccttttcaaccgggacacaatcgccttgtcttagtagtgaagcgtaggttaatcatggatgatgatttttgttctttgacaacatctggtaaggtttttggtttatggctcaccctttttactttttcggtctttcttatatagtgttttggtgggttttttctcgttcatttttcacgaccttcttatcctattactagggtcattaaattgttcgttaggttaaagagatttacaatatgaaaccgattatgtccattaaaacgtgaataagacagaaaagagcaccaagaaaatgaaaaataatttaatgtatgttcaggaaatcctatgaaaacataatgattgatcgggtttattggttttgtagctggtggtttaagtggttagggaagctatgtatttataatttattgattcaatatggttttgcatctgaaatatatttaagcccaaccaataaatataccatcactcgccaagaccgtttctcagtggaaacattttgtgagaagttcaagtcgatgttaatgattgtaaggatttaacggatgtgatgtttttgtaggttgaagatttaaagtactatatgatatgttgtgtttttatcgattttgaatctttattttctttcctaaatcaaaactgcaatatatttcctaagctagcaaaacccattctagatataagtagagtccagcttgtaatgcaactgcaaagcaaaaatcaagatatttcgatacaaggacttgatgtcataaaattccaaatttgttttgtcttgccacacttagtaattctcttccaataatggttaacttaatagtatataaaataaaaatgcatataggttccgtaattaatcttctttatcgtcacgagaggcacatcttttttcaacatttgaccactctctctctctctctctcaggacctttcggcgtaatttcgtcttcccctttgcttaacattttctttctttctttttgaccaaatattaaaaatatatccatttttattttatttttaattaaattcataatttgcattttatgtatttataataaaaaggagagaataaatccaaaagagtgaagcaaaaacattaaagcggaaagaaagtggtaaaacaataatagaaacaggagaagcagaagtactacttcttcttcttctgctctcttctcagaccttgttttgtactttcttcttcttcttcttcttcttgtttgcgaactccgatatcttcttcactacctttgactccatttctttttcttcttcaggtgaattctactttacttttcttcttaccccaaatttactcttttgggttttatgaaagttttgttttttattactcagatcttgtcctagttctcctccttgttctgttgtttttctgtttcgtttcgaattggttttgtttttcaagtttagggttttgtagatcagttcgtcgttactgtagattggaaatgaaaattatgattctttggatctgattatagcagttcaagtgtgaactctatctattacttgatttgctatctcacagtttttgaatttcttaatggtgttagctactcgacttttagagctcattttcttaactactgaacttgtttcatttgagaggtactaatccagtatatattataaagtttaatgctttttcttacttgcattctttgaacatgtttgctattttggtgagtgaaactttatgtatatttatgaattttgagctaaagtattgattgtttcataagtaggtgtaggcattgtcttgttatgagaagcaactgtagctggaagctcaagtatttgtttttagctgtggagcttgaatcttgatagttttcgacttctatgttattacctgtggggatatagaaacaatc

SEQ ID NO: 11985 - DNA, 3000 bp, Unknown; identical to SEQ ID NO: 11981
  misc_feature (1)..( 3000): cDNA_ID_2708038_gDNA_ID_2214526_Annot_ID_184762 3000 nt of promoter + ATG

SEQ ID NO: 11986 - DNA, 3000 bp, Unknown; identical to SEQ ID NO: 11979
  misc_feature (1)..( 3000): cDNA_ID_3023547_gDNA_ID_2214526_Annot_ID_184760 3000 nt of promoter + ATG

SEQ ID NO: 11987 - DNA, 3000 bp, Unknown; identical to SEQ ID NO: 11978
  misc_feature (1)..( 3000): cDNA_ID_2993656_gDNA_ID_2214526_Annot_ID_184758 3000 nt of promoter + ATG

SEQ ID NO: 11988 - DNA, 3000 bp, Unknown; identical to SEQ ID NO: 11977
  misc_feature (1)..( 3000): cDNA_ID_2990166_gDNA_ID_2214526_Annot_ID_184753 3000 nt of promoter + ATG

SEQ ID NO: 11989 - DNA, 3000 bp, Unknown; identical to SEQ ID NO: 11976
  misc_feature (1)..( 3000): cDNA_ID_2708022_gDNA_ID_2214526_Annot_ID_184751 3000 nt of promoter + ATG

SEQ ID NO: 11990 - DNA, 3000 bp, Unknown; identical to SEQ ID NO: 11984
  misc_feature (1)..( 3000): cDNA_ID_2711382_gDNA_ID_2214526_Annot_ID_134162 3000 nt of promoter + ATG

SEQ ID NO: 11991 - DNA, 641 bp, Unknown; identical to SEQ ID NO: 11982
  misc_feature (1)..( 641): cDNA_ID_2708052_gDNA_ID_2214526_Annot_ID_134165 3000 nt of promoter + ATG

SEQ ID NO: 11992 - DNA, 3000 bp, Unknown
  misc_feature (1)..( 3000): cDNA_ID_1014010_gDNA_ID_2214527_Annot_ID_134167 3000 nt of promoter + ATG
gagaaatatcgaaatcgctcccctaaaggcggtgtggaaagggaaaatcttaagagttatggtcaagaggataaaaagaggaaagcagaggatttagacagtggaaaaccgaatgaataccagaatagacgccggaaaggtggctctaagctatcagaagaagaaagagctgctagattgaagcaaatgcaaatggatgcagaggtgcacgaggagcaaagatggacaagattgaagaaagccgatgagaccgatgcagtggaagctgataagaacaaagtatccacgggcaagagctttttggacgatgctaataagagtgtgtatggagttgagaaaggcggaagctcaacaattgaagaaagcgtgcgtcgcagaagctattattcacaacgtggaactgcagctgaaggcaatgcgtttcgacgctgatgatgtaaaaatattgttacaacaaaacacaatgtatactaaggtttgtgtcttttttgatattttttttcagtttttgacattgtatttctgattccagaatattgttgagcatcaagctctttaggtcttttgatatatgaagacaacgaggctgaggcccattgtcataagcccattatggggtggtccagtgttttatcccggatcgagcgtgggatttgaatagttagtgtgtaatcttattcagtgagtgggacgttgaaatgaggtgtatgagtcagtcaatgaatacccgtgacatgtagttaagccataatactccaagattcccctttggcaccttttaaataaaccacgagatgaagccactctctcttttgtctttttttaatatgttttattttctttctttttcttgtccatctttttaaaaataattgaaatttgacctagggtcgttggtgtgttataattttgattcaatttcgaagttcgcatgttgataagaaaaatataaacatttgattcgaaaatgtttaaaggaaaaaagagagatggatttgtaatggaaacattttgacgtgtgagattttaacctctcctattttcaaagattgggcaatatggggttagaagcttgcaagggggggttcacgtgtagcgtaaatgtacaatgatgtcacttcctacactttatcacgtccttgaatttataggaataaagcaaatgttctaatcaataataccaatcttgcatgtttatttaattattatatagaagtttgattttataacgaattgtgtaatatagtacttttgtgatgccgccgttcctgaatatgttgactttgcaattgcaagccagacctagaactgaagaaaaaaatgtacgaattagtcatttatttattcgaagcataattcatttggaaaatcaggaagaccattatagtacggagccaaaatatttgaacatcacctaacatgttttgtaagcttctttgatatttattcttgttaataaaattttactttcttacggacaatagatgcaaccaatttgcattaccttctaaaaatatctactgtagttgtagcggtgcacatcaattattataatttttgaaaaaatggtgtacccaaaaaaacataaatattgttatagcaatgaatacaaatcaaagaaatatatgtatttaaaaacttaaaaatagaagagttgtacgaattcactaccgaaatagacaagatttattttggccaataccaaaattaatggtatataggacatgagtgagtcggcttaaagagaagaaaataaaaagaaataagaaataggaggagatgtaacagaatggaaaacgaaaggtgtggaaattgatttgagaagatgtcgcctaataatattaaccgacaattagtggcctcttctctgacttttgacttatacactgttttttcacatttgttggtgctctctcactcccacccaatcacggcccttcttttctaatcttactactctataaaattaaatattttttaaaaacttatagtgatcatagtgtggaacatttgcttcaatagttgacctagtaatttaatagtatctatatgatgtatacaatgttctttttgttgccaatatcgatagaaaaaaagttttaacttattcgaaaaaagaagacaaaaattattatagagtaggttcttgtggatttgaatcgatttgtgatttgtgaatactacttaaatagaattatgtaagattctacaattagtgttttatgtggttagagatgataaaaattacagttagatgattaaataatatttccgttgatacggatttggattctctaccataaatacttccaattgtttatgttgatgagaagtgtgatcagttaataaagaattaagacgttaattaagaaattgatatgtgcaaaaattgatagggcatcattaggcaatttaaaaagaataatagagaatggcatttaatcctatcaatcatatttagtttgcctatttagttttgaacctttcgattttaaatttaactttattgtcactataccagaaaagaattgtagtcatttctccaaatgaaaaagatttgaacttgggaacaaaaaaaatttgaaatcccaagaaaccttttaaagtagtaacaaaggagtagaatgttccagttcagtaaaatttcactttttctataaaggtgacagtaataaaataagatactcttttttattttaaaaaaaaaccttcgaatttttccagaaaagaatctgacaaaaataaaatgaacagagaaaagaaagcaaccaatcttatgcaatagaatccaaaaattcacttgtctctattttttaaaaatgggtcctttttatgaaggttttgccaaagtgtcattagtgcccagaattaaacgcaatccacttcaatccaaaatcccatactaaattaaaaccaacacacaggaagaaagaagaaacctctcatcttcccctctcttctgttgaagaaagcttaaacctttctgggtttcttttaact

SEQ ID NO: 11993 - DNA, 3000 bp, Unknown
  misc_feature (1)..( 3000): cDNA_ID_3023651_gDNA_ID_2214527_Annot_ID_134168 3000 nt of promoter + ATG
actatggcgacaagggttagtttcttcttagctctggtaatgacggtggtgattcttgctccttctgtcgtctctggagaaaatgggttttccgatcttaaaatccgtactcacttgaaacgactcaacaagccagctctcaaatcgattaaggtgaattccacagtgatattagagagaaaactccataaaagtttcattcttttgctgttttctgggaataattttgagtttcttaaacagagcccagatggagatatgattgactgtgttccaatcactgaccaaccagcttttgctcatcctctgctcattaatcacactgtccaggttctgtttactcttctttcttttgtttgattctctgttgtttttcttctgtatagttctgacattgttgttgtttatgggtgtattatagatgtggccaagtttgaacccagaaagtgtatttagtgagagtaaagtttcatcaaaaaccaagaatcagcagtctaatgctatacatcagctttggcatgtgaatgggaaatgtccaaagaacacaattcccatcagaagaacgagaagacaagatctttacagagcgagttccgttgagaattacggtatgaagaatcagaagagtatccctaaacctaaatcttctgagccacctaatgtccttacacaaaatggtcatcaggtaattatttttcttcacatatgaattagttttggccaatttttgttgtgtctattaacctcttcctttaccttttgttgttgatttagcacgcgataatgtatgtcgaagatggggttttctacggggctaaagcgaagataaatgtatggaagccggatgttgaaatgcctaatgagtttagcttagctcagatttgggttttaggtggaaatttcaactctgatcttaatagtattgaagctggctggcaggtatttttcttctttcggtttttgatagttctttcctgaaaaagaaactgtttttgattcaaagatttgtgttttcaggtcagcccacaattgtatggtgataataggaccagactcttcacttattggactgtaagtttcagactattcaatctagatttttgtttttgtgtgttttggctttcttgatgaatcattcttttgtctctcacttgtgaaaacagagtgatgcataccaaggcacaggctgctataatcttctatgctcaggatttgttcaaatcaatagagaaatcgcaatgggtggatcaatctctcctttatcaaactatggaaactctcaatatgacatcaccatactcatctggaaggtaaaccaacaacaaatatccatgttgttaccatctatttagtggtttagctatggtttgagaaatttcagttttgtttttttgttttttctcaggatccaaaagaaggacattggtggttacagtttggagagaaatacataataggatactggccagcttcactcttctcttacttatcagaaagtgcatcgatgatcgaatggggaggcgaagtggttaactcgcagtccgaggaaggacaacacacaaccactcagatgggaagtgggaggtttgcagaggaaggttggggaaaagcgagttacttcaagaacgttcaagtagttgatggatcgaatgaactgagaaacccggagaatcttcaagtgtttactgatcaagagaactgttacaatgtgaaaagtgggaatggaggttcttggggaagttacttctactatggtggtcctggtcgaaaccctaattgcccttaaagatttggtcgacttactcacattgcagatcattccaaatcaattgtataaaaaacatataatatatatatatacacattcttaagtatattattaatttcaggtttgaagagtggtatatggtatattcaaattcatctgcagaatttgtttgtttgtgtgtttgagagtgttttctctgtttccatggagtgaagagaagataaatttcttttaaagaacatggtcccatgtgtatactgaaatcaaatgatcccattattaatttatttgtatttttttttttgtatatgagtggtactttgttttcaatgacctgtgttaatagctttgtctgtatgtaccaaaacatggagatgggacttttggctttggatcttcattaatcactcatgtttaacagtatctatcagaattattggccaatcttcattacactaatactattatgtataaatctattaactatttttgtgatacttcatttaagactaacataaactttgttttttttttaattatcagcaagcttccattgtattggaactatgtttttgtgattgatcaacaaaacagaagcaagttaaaatttacaacttgaaatttttttcttataattatctcaaattaaacttataattacatctatgtgaatgacagatctatcttctcatgtccactgttatagtcaacgaaatgtttggggccataagccacaagagagttgactttgatcacgttgacgagttctcaatcataaaagcataatcaatttaacatagtatgagacttataattaatttaacaaagtattcaatggtgccaaaagaaagttcaataaagtaccgaccatattaaaattcatgtagagatttaatttaaaagtgaacatggtgcaatttacaagttcgtgacctctacgcggaatggttcatgcagagtaacaaacaaatgataatttaatttaatagaatgataattgatttatatttgcttcaaagagaaaaaagtttaaaactgaattatatccttcttgtcaatgtcacagatagtttaatactttatatagataacgtcgaagacgaggttacaaaaaaaaaagaaaaaagaattctggttagagttgagaaaaaatagtaagttatgtagcattccacttctataaattccaatgaatactgtctaaaagttttgctaagaactgtatagccatg

SEQ ID NO: 11994 - DNA, 3000 bp, Unknown
  misc_feature (1)..( 3000): cDNA_ID_2708139_gDNA_ID_2214527_Annot_ID_134169 3000 nt of promoter + ATG
aaacaaatgataatttaatttaatagaatgataattgatttatatttgcttcaaagagaaaaaagtttaaaactgaattatatccttcttgtcaatgtcacagatagtttaatactttatatagataacgtcgaagacgaggttacaaaaaaaaaagaaaaaagaattctggttagagttgagaaaaaatagtaagttatgtagcattccacttctataaattccaatgaatactgtctaaaagttttgctaagaactgtatagccatgatgagaatgaccggtttcatagtagctatgatgatagcagcggcgatattcactacttgcgttgatggaaacaagttcttttatcaccgggaaattaaagtacttcgacatttgaaacggttcaacaagcctgctcttaaatccattaaggtacatatcttatataaatttcatgacaaaaattaaagaaacctttttagagatgaattctaatacgctttcattaatctttcttgcagagtgaagatggagatgtaatagattgtgttcctatcactaatcaaccagcttttgatcatcatttacttaaaaaccataccatccaggtttggtttcacttccaagtctatctattgttttaaaacattatgatttttgaatcaattgtgacgtaaagtttacacatgcagatgagaccgagtttctacccggtaagtgattctacgtacaccaagagggaggcaaaggctgtaactcaggtttggcacaaggctggagagtgtcccaaaaacactgttccaatcagaagaacaaagaaagaagatctcttgagaccaaaatccatcaggagttttgggagaaagtctcatcaaagcattccaagaactacaacctttgatccaacattaggtcatcaggtacaagtcaactacatgcacacacacacacaaacacatgtgtatcattgttaatgtcttgtggcttacgcttttcatttcttttggagtgcctttagtacgcgctaatgggtgtgagaaatggaaaattttatgggacagaagttgcaataaatctgtggaaaccatatgtccaaattcctaaagagtttagcttggctcagacttgggttgtgtccggaaatggctctagtctaaacaccattgaagctggttggcaggtttggttccttcttgactacatcctctttgcttttatgcaaaacacttaacttgctctaatattttttgtcttaatttataggtttatccagaactatatgatgataataatcctagattctttgtttattggacggtatgttctccttttcagcagatttaggcgtacttatctcttctactatacactaatcatttgaaaaacataaagattgactagttttctgatccggaatagaactatagaagtctataattcaagttaagtctctagatttatgtatttaaggatttaattaaccattatgaaatcgttttttttttttgggaaatagcgtgatgggtaccgaaaaacgggatgctacaaccttctctgctcaggttttgttcaaacgagtaatcgatacaccgtaggtggatcaatcaccaccatgtcacgctaccgtggaactcaatatgatctctccgtacttatatggaaggtaataacgtaattatatttcacctcaacaacatcagattcaaatattcaacgtaacttcagtggcaagttacataccttttcgctcaagttacctctccatctatcttgaaatggatatcaggaccaaaaaacaggaaactggtggcttagagtcaatgaaaaagacgttattgggtactggccaggctcgttgttcaattctctaggaagagaagctacgagagttgaatggggaggtgaaatcattaactcaaagaccggtgggagacacactaccacagatatgggaagtgggcattttgcagatgaaggttttaagaaagcaagctatttcaggaatcttaagatagttgatggaaccaatactcttagagaaccacaaggactttacttctttgctgataaacataactgttacaatgttaagacaggaaatggtggaacttcttggggggctcatttcttctatggtggtcctggtcgaaacgttaaatgtccttgattaggatctgtgtgttcaaaagcttttataatctcacatacacatgtctatatttgaataagaacatttgcgaaaaccacgtcatcagagatgtttatatctgtcatttttcttaatttattaatgaacagtctgttgacagtgaaattgaaatatcgagaataataaatacgtacatattgataggtaactaaaatacagctggtttaaatcaaattgcaaaaatataaaacattgcacgtttaacaaatgtaaattaaaccgtgttcgttattcgttattctttgaccagttgaggaatcgtttggacggtagaatccgtcactatgcctctggaatatatataacgcatgaatccgttaaaacaaaactagaatgataaagaattatgtattgttttcaggtaaggcaaattatatagatgtgaatatgtgatatatataattgcagagctttaatgtgtattatatatacacaatgttttgccatgatgttatattattcataccaaacaatccacaagggaagtaacatgcgaaatggttagacgtgcaaaacattgcaaaaaatctataacaaattaactatgttgatcgaatcaaaggccacacaacataacagtgatttgcgatgacttttcgtttcacaataaataccaaacatgtgctgagtttctctttagataagaccaaatccttgaaattttgtgtatgtggttggttgatctaactcgaccaactatattgattctgtccccatttccctttaattctgtctttaccacaccacaacactaatcataaaacgtcactgtttgtctttgattttgaattcgtcaatatcaaa

SEQ ID NO: 11995 - DNA, 3000 bp, Unknown
  misc_feature (1)..( 3000): cDNA_ID_2708128_gDNA_ID_2214527_Annot_ID_134173 3000 nt of promoter + ATG
gcagagtagcactaacaagctcccgtaatgcgtttagcatggttagttctttccctttagtgttatttaggctctttaaaatgcctctttaggtttatatgtaacatttccatcgactgtttattcaggttgctaatttaggcttatacgctattgctttagttgtatttggtgttagcgaggccgtgacaaaagaaaataccgaatctcaggtttgtgcttctattgacttgtttatggtaatgccttttgatatatgattctaagtctgcctaagtctacagtatcgttggattgcttattcatccatcaccgttggctgctgctttgtggtcatatttcttatggggacaaaggaaccaaggtaatgcacacttttctctgaaatgcttatatcagtttttaccgaagttttatgccataatagatgagatatctattgagaatgagttgcttttatataattttcaaaggctgaggataaatctaagagaaactagtcgagcaagaataccatggtcttattggttccgtaaaattctatactatcaagttgctatggtttatctcctcactcgactagtattgaatgtttcacaggttagttagtttctgtatctgtcatgctttgcttcatttgtattccatctttatttacgtttcaggatgactttaatatttgcaggcatatcttgcattctttgttattgatgatttgcaaatggctcaatctgctaaagctctggtaaaagaaagagaaccactgcacttagctttcatctctatgaacatcaaactttttctgatcaatgtttaattttcagattcctgcaataatctacgtatgcagcttcgttgtatcagttatgcttcaggttgcaataagcttaaacgcattcttcttcgtttctaaactttttgttttgttttctatctgttatgtaactacatattccattcaatgtaggagattccttggaatggaaaacgcctcaaggcatattattgtgctggtggtattatttggatattctgcggtatatcaatactcttattgcccagaagcattaactcttacatgtatgcgatctctgtctttatcggcatcgcaaatgcagtaatgttggtaagacactcctttgttacagaagtcttcatgtgtttacatataactagaagatctttcttttgataatcacaatatgtacaggtgacatcaattagtatgcagagtgtcttgattggttcgaaactcgggggatgtgctttcgtttgtgggtcattaagcttcttagacaaaatgtcatgtgggcttgctttatatgttcttcagtcacatcaaggtaagtttttgtctttctttctaatattatcttaaaattgatggaagtctaatttggaaaatggtgcaggcacttcaccaaaggttgacgtaaacatcaaagaatatttttacttctcggtgacaagatatgggttaggacttgttccagctgtatgctcgcttgttggagttgttgtaacatattttatggaactcgatagcacgattctaaagcctctgtgtcaaccgctactactagaatgaacagaaagaagaaacacaatgcttatgatctggtaaacacatatagctcaaaacttggttactgtttgacagtaaatgtttcagtctgctaattttttgttcataagaataggtttatatcacactgcgacaggcaaaacatttgtacaagaattactgaaagtcattaaaaattaatgcaagttgatttttattttatgttgtctactctttaatcgcttccttcattgaatcttccttgtctgagactctgaagatgaataaagattgactctttgtgatatccttgcagaaagaatcatgaatatttctgattcttaccctttgtttttgttttcattagaaatttagaacatagatgatcgatgaacatatccacgtgagaatcaaaacttaatccaatccattaaatagtttctctattctacagagtctgagaaaggaaattttttgattcacaaagcaattgatcaatgtttatcttttattttttggtgtggtgtaatgttaagttctttcatttggttattcacataaacataggaaaatataatggagaacaatcagaattatgtctttttaagcagttactcatgcaaacctgttttgtgatcttccagcttatactggttgataaatggaggaaaggtttcagttttttttttcgccgactagatctagcaatgatgatgctctcagggtcagagagaaacatctgatccatttttaagggtcaagcagagtagcacataacaagtagagaaacagagccggtgaaaaacggagcacctagagaaacagagcaaaaagatagcagagcacagaaaacagagctagcaatgaaaagaaaacagaacactcgaacagagcaatcagataaacagagcaagtaaagacataggacacaaaaaaaacagaggacaaggaataaaatgagcctggatcaccaagaattgtttgtctcggctgattctttcatccttgcaaataaaacacagctgagtaaacatcaaaacatctatctaaagatctcaagtccaaacattttgttcagattcttgttggaataactaccaccgctgaaacttttgcgatggacatggaactatggaaggcaagtttttggcagtaaatttacaaagtagagactttaatacaaaataactgcgtcactgtctttactctttagcttaatcgatgggacaaagtcaaactctgcaacactgagtcactctgaatatacctccgcttaaacgatgccgtttaaatctaaagtgcgagttccgtcaaagcccatttatggcccacacacaagacgatgccgtttcacgccgacacttaggtttaggtcgttttccacctccgactagtaatcccggaaatcttctccgcatgagctccggtgaaaaatg

SEQ ID NO: 11996 - DNA, 3000 bp, Unknown
  misc_feature (1)..( 3000): cDNA_ID_2992390_gDNA_ID_2214527_Annot_ID_134175 3000 nt of promoter + ATG
tttcagtcggtgaagataagaatctctaaatattgggcccgtcagaaaccaaggttttaattttattgggcctttgaaaatatactaatggtccatgaatgaataacaaaaaattattgggttgatttgcatgagttaagactggctggcagtagacgctgaaattgaatctatgattgtagaaaatttggttgtatatttacgttttgattttataataagaatgcaactgtaatgttaggcaagccaactacgtcatagatgacgccatggtctcgtagctttttcaaagagcttcatagcctgcgccaactgtcacaatgcacacaaatctatagtcaatcattgagtggacactttctctcggtgggttggtgtagagtggtaagacactcccttttctcttttccactcccacaaatttttttttagcttcgcacatactttaatactttttgggaataatattgagaaatagctttgaagtatcaccaaccacggcttgtaggatggatggtaattagtatgtcgccgtattacaatctaataacttacatgtatgaattgtatatgccaaaagtgatagtatattttaaacctcattaacgatggcagtaaataaattaacgaatgtaacatttgtactatatatcaatcttatttattaatttttcattcataaaaacaaaattcagaacaaaatacaattgattcaataatatccatgaacttctcgacaccacaacgcatgcaatcatcacataaacttacataaacaataaaccatttttcatatacttttgaaagatactaaaaattgctatataaatggtaagagcgttaggaagcaagtggtagtggaaatcacaacaacaaacaacagtgaaagataaattcagcataacaaaacaaaatggagtcacggaagattaacctaatggcgacagcaatagctttaatagtggtggctatggtggtggcagctgctgatgataagacgaaagacaaggaggagtgtacggagcagctggtcggtatggccacgtgtcttccttacgtgcaaggacaagcaaaatctccgacgccagactgttgctccggtctcaaacaagttcttaattcaaacaagaagtgtctttgtgtgatcattcaagacaggaatgatcctgatttgggtctccagatcaacgtctctctagctctcgcacttccttctgtttgtcacgccgctgctgacgtcactaaatgccctggttcgtagctttttcactgttaaaaatctacctatacaatgttctgtgaagtaattattttttgtagttatgaatatagcacattaattaagaatgaaaacagagtgtatatgtatgaaaatattttagtaaacaagttttcaaaattaattatttattaaatattagcacaatcataattgttttggaatgggtgtttttcagctttgcttcacttggatccgaattctccagatgcccaagtcttctaccagctagctaaaggtttaaacaaaaccggcccagcctctgctcccactggctcgtcccctggacctataagcatttctccgacttcaggatccgatgatggtaacaacagtggtcgaacgacctctgtgccaggcaggaaccacgctcaaagcttctataaacaatggctggggctcgaagttgtgttccatttcttcgtaattttttatattttcatcctcgtatagataaataatgataacgaaaactgaaaagcatgtgatgttgattagtgaaattgcggtgacgctgatttttgcagttactgttttgattggtgtatttaattctagttcgagaactcttcttgatattttgtgtgacgcaatacgagctacagtttttctatgtctcgtatgtttttatcagttttatctgaaatactataatcacttacaaaaaacaaacactaaattttattatgtggttgtgctagccttagttgtatacatacatattttcacttacgtacgtacggtacgtcaggtatcaatttttctttctttcatcgagtatgtggacgccaagttacatttttttcgtttggttttagcgtcggtttagggattgaagttcaaaaaagagatgcttctagtaaaatatcttgtagaattgtagtgccttttagaagaattaccctttggtctcaactcatcaccgaaagcaagaatatttttctctaaattctatacaccataacatcaccattcactataactaaaacaaatggaatgaaatagtagcaagaattaatgtttttcttttcatttaaatttattataattgcaaaaagaaaagttttaccaaaaaacagtcgagtccaataatcaatatgagtaaatggttcgcatttttattttaaaaattgaattttttaagagcttgaaaattgaatttaacaaaaaaaacaaaaaaaggatcggtcaaacaaaacaaaaagggttgaaaattgacttaccaaagtctttataaagttgataaacttttgccttgttataaaaaaaatctactataaacagattgcgcgtctggagataactgatttttttttttttgatatttgagatttattatctcacattttctttaaaaaatcaaatcagaaaaaagaagaatggaatcaacaatcatggaggattgttctagctagttaaaaaatgacttacgtaccgaaatttttttaaaaaaaattaatagtctcgataaaatatactcttattaattattaattaaccgattgggcgaatggagataatgatgttgacattcgagaatcacctgttctcacaatttttcattaccaaataaaaaataaatccatgaacttgtctacacggcaatgcatgcaatttcacagaaacttacatatacaataatattttagaaaaagataaataatgctagatgagttaggaaacaaatggtagtgaaaacttaaatcagaacaaacaaaatg

SEQ ID NO: 11997 - DNA, 3000 bp, Unknown
  misc_feature (1)..( 3000): cDNA_ID_2711390_gDNA_ID_2214527_Annot_ID_134180 3000 nt of promoter + ATG
aaaaaatgaaactagtaaaagaagtgttttcaaatagaattagcatcatatttaattatttttctacagaaactatagggaagccaaaaacagaacagaacagacatgccgacaaattaaaactttcacacacacagacacatttgcgaccaaattaaagacatatatatggctcacgctatctgtttagatattctaactatatgatgtttgtataatattatagtttagatttatcgtcagttgattaatcacaaatcataaacacattattttattccgactgtaaattaaaaattaaactaaaatgtactagtgtaaaataatagtgatacacacataaaactttatttaaatcaagttgttgttgtgtgtcatggaggcaggtccatagctgtttcgttatacaccttctttgttatttcaatattcaagtttgttgttaatttaatgttattgactaaccaacaatccaatatatttataattatctatatataaataacccgccgcagtattattccacggcatacgaattattttggttcaaattacagatatctaaaaaaggatcaaatcttttctcaatcgtttatagtttcttcaatggagattactcaatatcaaagttttcatgaaggttcgagttctagggtttccatgaacaggaattcacaagtaatatccaagatcaaacccaagattcgcataatccatatatttgcaccggaggtcatcaagaccgacgtcaagaactttcgttcactcgtccagagtctaaccgggaaaccggcaccgggagaagccaaaaccggtaaaaagagagccaaatcaagaattacgactccccaagaaccggtttgcgatgatcatcagccggtcaacaggctttcgggtttcaccggtttactagcaaacggaggaaaccaccaggtgaaagaagagtggggatcaggtgatcagagtacttcgaacacaaacacgtactttgatctagaaggtttaattcaagatgtcggagaagattacttctcttcgtttcccatgagatcctcttcttcttcacaagtcgaaggtttcatcttcaacaacaacaacaacaacaacaacaacaacaacaacaacaacaacaacaacaccaacttcgatacaaaggctcataattcgtcttaattaataacagattaatttctagggttttcaatcttattgattctgcaaatcgcatttggtgagatgagatctaatcgcaacgataaggtcatattttgtgggagaaaaaaggcatagaagttgtatatagatataacaaatgggtatgatgagagacataaacttttggcgggactgactttgccaaggttgagagttgtgatgaagagagtttaatctacgtgcagcccttctaggagaagtggctgtatctaattaagatgtggtcggtcaaaaaagccctagttttattatgtaacttcattgatgtgctattattggatgtgtattaattctttggtgtgcagataaatgtgatgattgctgtactttaattttggggaaaaagtttgtatggaattagaacaaggatcgacttgttttcgatatagatactctgattgattgtgtatattgaatatcgatacttacataacggttattcggttaaagtacagttacactaattaaattaaactgtaagttaacaagaatattctggctcaagctaaattattttttttattattattgtttactaatcttttgttacaaatgttgaaaatgatatttattatacatgtagtacttcaactaaaataaataacgtgttttcatatttgatgtacgtgtataatatatcattttcaacagtgagtaatattaacccttttatcaaaataaagtaaaacaaaatgatataacctatcaacaaaatgcaaagaaaattgatccgaaccgaatatagccgtaacggtacaccaaaattgttttgagattttagtgtccgttgaccttttcatataaagccaaattattcggtctggtttccaaaagaacgaaaaggtatatgattacggtttactcccttgcttctgtgttttggtttagtttggtttaccttctcaaagttctcgaacgtcaacatttattttatcttattttgtaaggttctgcacatgttatacttattaattagtctactttttcaggcattgggattatttgttttagtctaaatcggttttggttgcataatattggatgaaaacattgtaaaggacaatttcaaacctgacttttctagatttggaaacgttccggctgcttgaaaagctcacataaatattagtatgatttcttaaaccaaaaataaatgatgattatcaacaataccgtaaataaggcaaaggaaataaatgatgattatcaacaattgccgaaaataaccacaccggtacaccgaaattgtttttgagattcataaaaccggaataatacgcctaaaggttattttctccaataccggtttagtttggtttgccttctcaaagtactcgaaggtcaaaattggaatttagtaataaacctgctccagctatatacaaatgtcatttgctcacctttcgccgattgattttgtacatcacacgcagacgcagcttttagtatttttttcaacaatcgcttttttttttctcgatctccgtgaagctctcgaatctctggtatgtttcttcgcttcttcatagtgtttctcatttccttttggtcttccataattttcggagaatctagtcctgtttttctcttcttctggaatctgaattcgccggtgaattccgctgatcgaatctctgagttttgttgaattatttgattcggcgataaaactttttttgtttgtttctgattttggtgagtgttgattgcttgagttttttcacggatcgatttgttttgagaattgggtggatactgtctgtcacaggttttgagttttggaga

SEQ ID NO: 11998 - DNA, 3000 bp, Unknown
  misc_feature (1)..( 3000): cDNA_ID_1807107_gDNA_ID_2214527_Annot_ID_184804 3000 nt of promoter + ATG
tacacttcaagatacgttgaagatgttatgttctacgctaacaccaatcttagttacacaacagatagtcgcgtaaatcaaacaagtaactaacaaaataaacttatttcccaaattattttcaccatttattaaaaagaaaaacggtttttgaaatgtattgttgaaatttacagcggagaaaaatggagttcctgtgggtgaaccggtaagatttttctttccacatgtagcttaaatttattaatttaaattgtgtaatagagacgagtaaatataattgatgtaagaaatgttttcattttcagacgagtgctgattggctctttatatgtccagaagggtttcaagatgttctattatacataaaatcgaagtttcaaaatccagtaatcctcgtcactgagaatggtaggtcaaagtaaaagataagttgggtttataggcgaaatgtataccatcaattgcaaccagttaatgatctctacttgctacattgctaaaaaaaagccaaaataatatatgtaattttagaaataaaaagatattaaaaaaaacatacaattataattttaggaattgataaacttttaatttgtaggtaaatcggatatattggtcaaacaatttgattgcaagtgttttattactttggccctacttattctgatatttacatactttgggggggcattttacctccttaattaggaatgcctagcgagaatgacaaatcattgtccgtgaacatagcactcaatgacgaggcaaagatcaaatatcaccaactccatctcactgctcttctagaagcagtcaggtaattatattaatttcatatacaaagaatttcaaatatccagacttctgtcatagttttacaaaaaaattaataatgttgatgactgatgtgtttttctttcatggaacattgaaacagtcaaggagcagatgtgagaggatattatatatggtcattaatggatgattttgagtgggaatttggttacaaatatagatacggattggtctacgttgattttcaagatggacttaaacgacacctcaagagttctgctctttggtaccatcattttctatccaactcatcctcctatcaaatggactagcaaggaatatctaaaattaatatcttcactttatacaactttcttatgtattcctaagaataaaatgaaacatgcaactttagcagtactgtttatcccagactgggacacgaatatatgtatcaagatttttttgtgtggccatcaaaacatattgggccgtggttctaggcttcaagcactcggttttcagatccgaaccgggttgaatgttgggtcttcagatgacgacccggagaggaatttacttggactcacccacttcatatctatgtactaatgaaaataaaaatatccaacaggccattacggatgatcatcacacaattattgcatgcaccaacccattatcaatatttttgttttttgtttgcaaaacacaattatcaaatcggcaagtagatgttagtcttaatcactggaataatgacgaaactattcgagtgattaactgattatatatatacttttctgtcagtgactatatttagtataaccaaagaaagtatttaaatagtgttgcaatttctttataaccgatctgaagtttgagctgttatgtgattttttatctttttttttgtttttattctttccgctttcgtaaaagctttttataaaccattgatagactgatagtgaaagaaattagtcgacgaaaaaaaaaaaggaaaaaaaatcgacgacaaagttgaccaattagatgccacgtcatcaagactaattgtaatttgtcaagtggtccccgcttcgtagagcccaaagacgaaatcttattcacgtgcttgtaaattaccaatatgcccttcttaagttccggtgaacgattcaaagtcaacgacgacccccatgggtcgatctaaaaaagagttgactggaggataaacaataaaaatatacaacattaggctatatatttgttgaacattaaaaaaagttataaaatttgttgaacaagaaaaggttataaatttagaatctacacacaacaaaacgaggacttgaagacctcgttgtttcctaaagactgaaatctgttgttcctaatgatatgaacatcattaggcgcaaagtatctaatttgaattgtgcgtgcatgttttttctttttaattattgacttattgtgcatgcatgttaatttacgattctaatttctaaagcattagcctctttcgtaacttagtggaactttaagttacaaaaaaaattatgaaaatccattcgattaattaggtgtagttggatttgggtcaccatggaactcatttatattattgacctgtccttttctcacttgatctattgtttatttagagaatatggtaactgttacaagatgtttggtaaattatagcctaaccaagctaacataaacgtaaataatatcgaataactcaattttgaaggtgaaaatggattattgattattatttatatactatggactatggagattggagacagacaatattcacggtaagaataatcgacaatggacaaatttaatatcaaattaaaaataaaaaaatatattaaaatatgctagtgtgctgaaaattttgaagttgaccggtcttcttgatattttttgtaacaaacaaaaaaactagctgcaataggactcaatcaatacgattgaaaaaataataaaaatcccataaaaaaataattgtaatcctagtttgacttctcaattctctgcatctctcaatcacgcatttatatatcatatcattcaagcctttttatcttagtgtctctctataaccagagaaattatttcaagatctacttctcatcatcgttcttttcttatctcttcttgtccaacttcttctgaatcaagacaagagaaaagcaaccaaag

SEQ ID NO: 11999 - DNA, 3000 bp, Unknown
  misc_feature (1)..( 3000): cDNA_ID_3023617_gDNA_ID_2214527_Annot_ID_184801 3000 nt of promoter + ATG
tgttaagactcccaattcgaaataaactatcattcatatttatgtaattatgttgcaaatgtagtgttggagccaatgtgaagggatttttcgcatggtcgttgctagacaatttcgaatgggcaatgggatacacggtccggtttggactggtttatgtggatttcaaagacggatgtaagagatatcccaagaaatcagctgaatggttcagaaagttattgaatgaaaagaaaaacgattgatgatgatgagatatgtatatttcattatattagtttctctgttactcttgagagatttatatattttttcccccctttggaaataatgagaaatggttttagctattttcacaacgaaacccgattgatgtatagctgatggaaatcatctttcgatgtaattacgtacgttttataaggaaacttaatattaaacttgttgaaaaagttaaaaaaaaaatagaatgtgaaaacgatataggcaaagagtatgtaacatctacaactttcagcatatatcaatttgaaaaaaaatgttcaatctttaaatttttgaagaatctcatggttttcaaagatcatcatttatggtattatgagttggattattgatatttttttaaagattgtgatggtcccattattgattatagcatgtgagatgttgacagaactgctataatgtgtaacaattattcgcttcgatgtgagaatattctattaatacgcattcaaatagaaaagcccagtgaatatgaaaccaccaaatataaaagcctcacaatttatttatttattttaggctctgaatttttttattttcttattatggtaaatcgtctttttttgttaactttgtctcacattcccttagatggcaaattagcatcttactttacctgaatcatttaacttgaactgaaatgttaacgttaatgtgttccaaactttcaatctcaaaaaccaatttagtaatcgttcaagcagaatttgtatcaaacttttcttgtgtatcaaacaaagaaaaaaaagaaaaaaaaagaaaactgacgttatttcttttttcgttttgaaaaagtaaacttacgatgacgtcatttcaggaggtttaagcttcaacttttccactaatttcgaatcattcgaaggtttaaccgtttaaatacatctttttctcacactaatttctaagttactactacaatattattctctacgaccccaccactaaccactattatccgaacttccgaaggaaaagttcgtcacgccgtctgactttagaaaagcacaaagagtaagatctcaactagtctctcatgcgtgcatagcaacaacgtaacaagaagtcagtaaaggcggactctatatgcgaacttagtacctgaatctgatccaaagacttatgcacggtttgatgtaaaatcagtagtctagtcgattatttttagtgagttttaattagtaatagctacataaatcctaagttcaagttacgactattggtttacgctttcgcatatattatattaaaactgatagaggaatatcaagatcgagaaaagtttgttagagaacaaaagcaacaaactcattctcattcattctcttaatcaaaatgattacatttccctctcttatatagtatgatagttaacgagacattaagccaatgttgaatacacggtttacataaaccgatcttaatcgattctatactctaatacattgcgttggtagctcacatgacataagattactttatattatttaaatcattctgaacattatcttaatgggctaagctttcccaatttgaccatgcccaactttttaagagaagatatgttttaaaattaaattgcgtatacagattcacttgacgtcactagccacgtatagtacgaacttatgaatgaagacataattgcaaccatatccaaactgattaactatactgtatccgtatgtataacacctacaacgcctgcttgtaaatcatacaggaatgaatttaagtattttttatatcttcgttaccaataccatatcaaatacattatgtggaaaaaattcaaggcacatgttcatccaccagcgaataaaaggaacaatatctttctttgtggatattcaaatgcaggataattcacattctttcatatttgcatttttaaatacatggaattaatctttgatgtcatttccttgtggaatcggaattggatgtttttgataagcatttcataatttcaaagattaattccagaagaaaacgaatttttaaaaaaaacatttatctaaattttcaataactaaaactccaattcctttgggataaaataaaattccaattccacaggaaatcaaaaacaaaatcgacaaaaagggtttggattgtaatgaatgttacaccgcaacagccacgatatgaacaaagtccgtaaaagggaacgtcagctttttcgaacgtgaaagttgtaagcgctccagagtgttttacatgcaaaaagggttttcgacagtactgaacatagccaattttaagaccacattcaatctccacttgtccaagtacaaacacacatgcatagacactaagacacacacttatttctatagattagaatgtaagcagtgatcccgaccacattcaaacacgaagatgaacagaagctaagatacggtctcatttgggggtaaaaagaaaaggaaaccaaacttgaattctcttccttatttaattatattactatacttctcttcattagggcaaatcattgtttaatgttaattaagttactttatgatagtaattacatactaatatgagtataagaacatacctttccacgtagaccaacaacgtcacgagactaagctctatatataggagaagagaaatgcttagtttgttacaactacaaatctcatctttgaaacagtttgaagaaaatacataacacttttaaattccaaaacacaaaaaaggaat

SEQ ID NO: 12000 - DNA, 3000 bp, Unknown
  misc_feature (1)..( 3000): cDNA_ID_1807359_gDNA_ID_2214527_Annot_ID_184800 3000 nt of promoter + ATG
agtgggatcagcttgaggatgaaaagaaggtgaagaactagcgaatggttgagaaggaattggctggtttggtttgtgcgtcttcatagaagctgaaacagaagggcttggcaatgtatcgtgaaccacttgagcagcattgcgcatacttggctgcattcctccagattgtctccattccctaataaccgaaaaagcatttgttattgataggaaaagagaagaagcttttcacttgctcatcggataaatgctcagatttaagatcttgccttatccttcgtattgtatcatctgagttaacacggcctagaagctctctatgctcctcattcgataaactcaactctttacgtaattcagttatgacactttctttttcctgaacataaaatacatgttattccacctaaccagacactaacacaacaagagaaatcaaagtagatcaaaaaatacccatgaaatagcatctccttgggctttaaaggctcttaaaacagagatatatgcttccttctcaatctggtgaatctgagcttccatatccgcagcaagatcatcatacatctttgggtaagatggcggaagattcaaaggtcttccattaccagccacgcgtcctcctcttcctcctcctcctcctcgtggaactctatgcgacggtggcagatcatcatcagttcctgaatacaccaccggtaaaatcaatcaatgttgcattctcaataatcaaacctttgtgaatcaatcattaccacacattacattcaaaaggtttcagcttaaatcaagaaacagcaagatccaaaatttcaactaaaaacaccaatccaccaaaataacacaatgtataacagtaatcgcacggagaaatcccaaaagttgtgaaaaccctaattttcagtgactgatagagaaggcgagagaaattctacacagttttcgggaactaaccactgctatcagacgatttgcagtccatgacgaagcttaaatcaagagacgaatctcgaagatgaaaattggagaagctagacgaagaatcaagcacaatttgccaaggttgatttcaatttgacttagaagaggactcgatttttggttttgagctcaattttgtactttgtcgagctgctataagaaagaagcgacggatcaatttcttgctccggtaacaaatctgagcttcactataagtgattcagcttaaaagattacagattttgcctaaagctcattatttgccaaaattagaagaactcagacgaaatttaattttataagaacaaaagtaaacaaatttgttgagaaaataaattttcgtagattcattctcattaaaattatcaaaatagttacgagggaaataaaacaccgtcgtttcgtccccagccacgtgttcacgtagagatttaaaaataaaaaataaactgaaaattagatatatcacaaaaccccgaagctgtgtaaagccttacccaagcccattagttttataagtaggcccaactatttgtatgttaaattgataaacaaacgtatgttattgcttcgatgtgttcaagtaagtaaaatacaacaacgtacgttagtacggtaaagaaagagttcaattttgatggatcctctaattctttttttatattatttgttattcttcaaatttgttgaagtgcaatagctcaccaaagatactacgagtctacgataaagaaagagttcaattttgatggatcctctatttttttttttttcttccaatgattctatgtcacattgtaattctacctaagcctgcatgcttatgtaaattgtaatcacgaggaaaatcagttttagaaacgagcaaaacctcactcgtatacttttagtttacgcggtgtctccgaagacgatcgattctaattataatcggcattacattgttgatatatggaaggttcttcaatgaacagtgtgagtttcctaagaaacagctaaacagttatcggtgatcgctaaaacctttcacagtttgataaagttttctcctgctctagtttaatttcatcaattttggaataaattttatttaaattatttttggcttacaaataaatttgtattggactgttcttgtaaaaattaaaacttttgtaatgaatagttgttaaatataaatattttgatagttaaattattactaactattaagaatttagtccatatttaatttaatatgaactaaattctttgtttttgatcaaaaaacttataaaattaaacgtggaaaaagatccgatcctctcaaaccaaaacaatgacttggttcgtcacattgaaaatcaaagagagtgttaattaatttattaaatatatcatgttaggtttgataaataaaattgttattctgaccgacagtccaaatcccaaacgcgttccagactacaccaacctgtgaaaataaacgtttaaaaaagaaagaaagactcaaagaagtaaaacaaaagtaattaattaaaatttgaaatagtagccgttacaagaaacttgtcgatatttgtatcaaaagacgtttttacacaaaatgacgaaaactggacttatcaataaaactaacacgtcttcacgtttccttgagaaattagcacatctaagtaaatgtctacacgacgtgcaatgatgcttttctttctctaattttttctttttaataatgactcagctactttagatttatttttgaaaaaattcactcacgttttatcattcttttcctattttgatataacttgataaggtcatttttgaattttccgtttactaattaagaaaattagaatattttatcatactctctttctctttccctctatcagatcatctttctcaaatagctctatttagatattcacatacatatccagttgtgattctcttccttatataaacctccacttaactcatcttcttaaaaacaaaactaagattgaataatcataaagaagaaaactaaga

SEQ ID NO: 12001 - DNA, 3000 bp, Unknown
  misc_feature (1)..( 3000): cDNA_ID_2708092_gDNA_ID_2214527_Annot_ID_184798 3000 nt of promoter + ATG
gagtagctctttttcattgtcttcttcatcgcaggtagatttctttttcttcgtctctcacgaatctctatctagttgcttaactaggatttgtctttatatgttaagtgatgtggttctagatctttaaacctggaattgattttgctcaatatgatgttcttatgttatctcatgataagtaatcattggtctatttcacagtttgtttgactttgaatggctacatcatttggtgaacagggaagtagcttgcttgttgatgtaatgagtcatcctgtgataacgttagcttctgattcctttaagaatcttgaggaaaagaatgtttctttcgatgaaagtgattcagagagctcaacaaaagacagatatgtttacatattccaaagagaatttgctgttgtgaatccagctcttgttgatgttagttgttgttacctcactagccccatcttaaaatggttacactctagtgtttccttgttgtctaatgattttgctcaatttttttattgcatgagaattagtttgttggcaccgatgaagcaacaacttgtgtaggccttgttatccgcaacagaaaatctggaatgtaagcatttgatccttttatatgcttattaagaggatgagttgcaaaagtttatgaccatctgaaattgcaggacgtctgttgcacacatggattcgccagagattgtggatttggggataagccagatgttgttattggttttacaggatgacgtagatgccgagttagatgtattatcactctcctttttacattaccaagtgtcttcgagtttatgttaatgattcagtattttattctgagtgcttttgaatatctccacggctttgtatgcaggtacatatggttggtggttatgaagatgtcgacataaaagtttgtctctagattttctatttctcagtctacttagttctaagctgtagagaggtctttagctgaatgtcttgaccgttatgtgcagaatgctgatggtgttggtgactatgccaaaccagagggttattcatttccgttgtgttgcaaattagtagaaactttgcagaagagaagagaaaactttcacattcaaaccctctttattcttgggcacaataccaagttggattcacaagcaaacacgtgccccatttttaatggatgcctggttagtagtctaatatgtctgcttcttctctactatgctaattagaagatgtactaagtcattctttacaaatagagaaatggaaattgaccctcattcatctaaacttgataggtgacatgtactaagtacacttttgtaattggttttcattgtcaaaatactgtctttcttccttagggactaactagacaatagaattgcttgaaatttgttcatatgaatcagtaatcagcgtaaccatgtttctttataacctttttatcaggtgaataccagcaccggtgcaatcttgccagccagtttcaacagaacatctagatgtccggatgagatcgttagaagaattcgagtttcatcatcgtttgaagattctagctggaagggaaagttacttgacacatatgacacaaaaactgatagattcatcatcgcaccatgccgctggtaaaaacaaaacgctacttctgtcacattacatataattgcatctaccattatatattgtctttctcaccagatttaatgtaattactctatccactactcctcattacagtttcataaatcgtgtttatgtttgtaatataggacaatgcgcttgattgaatatgtttgggaacttaatcagcttactgatgaagaaatcctcactaactgttccacctcaccttctgctgaaggtccagacttcgtaaacagtttaagaaggttagtcattttggaagcttccactggatcattatctagaacacaaacaggacataggaaaatttgcattctctttctttttgtgtgttttaggaattggggatatttactgaaatatccagaatggagcaaaacattcccaaggaggcaaccacgtgtgtttgaaagaactgtcgatggacactggaaaaaatgctgactttctcatctaatcatcatgacattatccagaaatctggctaaaaacaacggttagtgtatctaacattttgagatttatgtaaatggtcaagaacacatgtgattgattcttggacacagaaaatgtttgatttatctttttgactttttgtatcaaacgttgcaagtttggttcctatgaaaatatgggccggatcaggcccggtagacctatatgttgcccatggtagacattccaatctcaaatccaaaccagagacattccaatcgaaacaataatacacttaggccttagcatgatttcgtaaacgtagtccgacctaactttcaccaacaaaacgacggatataaggcattctgtttctagaaagtagaataaaccaaagagggccattcttgtaataccttatttccgaaagatgttgaactaagcctaaccgggctggatataataaggcatcgttatgggttttaaatttacaatttaactaacgaaaaggaaaaagggaataggtcaaaggataaaaagcagcggttaaaactagggttacttaatccacttttcggttttaattacttatttatttccccttgaattggtgtagtcgtatgctagtattactattagatctcattacttatagggaacaaatataaactcgatagtttgatttgatttgaatttatttagattagattataccgtaatgaaaaaacacagtagtatttaaataagaaaaaaaagcacaaaaataacaagcgagcgagttagacaagaagaaagcaacaatacaaatttaaatacaaaataaattatataaaaagagaataaaaatccctaaaactgcgagcgtttttgtttgtgagagagaagaagagagagacgagtctgtatggcaaaagg

SEQ ID NO: 12002 - DNA, 3000 bp, Unknown; identical to SEQ ID NO: 11997
  misc_feature (1)..( 3000): cDNA_ID_3023632_gDNA_ID_2214527_Annot_ID_184790 3000 nt of promoter + ATG

SEQ ID NO: 12003 - DNA, 3000 bp, Unknown; identical to SEQ ID NO: 11996
  misc_feature (1)..( 3000): cDNA_ID_2992390_gDNA_ID_2214527_Annot_ID_184785 3000 nt of promoter + ATG

SEQ ID NO: 12004 - DNA, 3000 bp, Unknown
  misc_feature (1)..( 3000): cDNA_ID_3023636_gDNA_ID_2214527_Annot_ID_184784 3000 nt of promoter + ATG
atgaaatagtagcaagaattaatgtttttcttttcatttaaatttattataattgcaaaaagaaaagttttaccaaaaaacagtcgagtccaataatcaatatgagtaaatggttcgcatttttattttaaaaattgaattttttaagagcttgaaaattgaatttaacaaaaaaaacaaaaaaaggatcggtcaaacaaaacaaaaagggttgaaaattgacttaccaaagtctttataaagttgataaacttttgccttgttataaaaaaaatctactataaacagattgcgcgtctggagataactgatttttttttttttgatatttgagatttattatctcacattttctttaaaaaatcaaatcagaaaaaagaagaatggaatcaacaatcatggaggattgttctagctagttaaaaaatgacttacgtaccgaaatttttttaaaaaaaattaatagtctcgataaaatatactcttattaattattaattaaccgattgggcgaatggagataatgatgttgacattcgagaatcacctgttctcacaatttttcattaccaaataaaaaataaatccatgaacttgtctacacggcaatgcatgcaatttcacagaaacttacatatacaataatattttagaaaaagataaataatgctagatgagttaggaaacaaatggtagtgaaaacttaaatcagaacaaacaaaatggagtcacggaagattaaagtaatggcgacagcaatagctttaataatggtggctatggtggtggatgccgccggagctgataaagggaaagacaaggaagagtgtacggcgcagctggtcggtatggccacatgtcttccttacgtgcaaggaaaggcaaaatctccgacgccagactgttgctccggcctcaaacaagttattaattccgacatgaagtgtctttgtatgatcatccaagagaggaatgatcctgatttgggtctccaggtcaacgtctctctcgctctcgctcttccttctgtttgccacgccactgctgacatcactaagtgccctggttcgtagcttggttttacctctcttgcattttacgatatattctttgttacgtgcggtttgattaaaacagagtatgtatagacattttaaacaaacaagtgaaaatttattatagactaatattagcagactagtaatatttttgggatgggtgttctgtttcagctttgcttcatttggacccaaattctccggatgcccaagtgttctatcagctagctaaaggtctgaacgaaacagtctcagcctctgctcccactggctcggcctctgagcccactagtatgtcttcgaccccaggatccagtgctggtaacaacagtggtcggacgacctctgtgccaggcacgaaccacgctcaaagcttctccaaacaatggctagggctcgaagttgttgcccatttcttcgtaattttttatattttcatcctcgtttagataagtgaaaaggatgtgacgttggttttgtgcaactgtggacatttgcggtgacgttgattttgagttttgagtcttttgactgatgaatgtagtttcacttcgtgacaactcttctcagctttttattttttgtatggcgcaacataagacacgagcaatagttattctatggctcgtttgcttttatcaattttatttaaaatcttttacttgagttcgttgagtctaatggtttggtttctcttaatttcatgcatacaaacgtaatttcatttacgttagtctattgatcgacagattaattggaattattattgtggctatttgaaataaataaagattttattaaaaaattttatgcaccaataaaaaaatcagaaaaagcaaagagaagagtgagggatcgaatccacaagaaaaataaaagaggtaaaccacaaagcaaaaatagaacatgatgatcattgaattgaagggcacaaattaagctgtagattcagtatccaagttgtaatatgtttacatatcaactgatattaattggtgcacttgacaaatggcaagtctttaataagtttctatgtaaacaatcaaaaccggactactgaacttcaactttatgattcatccaagagtaaggattacatgaagtcaggaacaattcaatataatttaacaaaacgtagttgaacatttcggcaacccgccgaatttagcctaactaattttatttgtacaaaattgctaaattattctcttattacataaatgttttgcaaaaatatattcgtttcaggcagacaagtaacagcacatagagaaccaaaatatattcaactacaactagatttcgaagaatctgttgcaaacgtttttattataccatccaaaaacttcccatgcccaaatccatagagcaatcacatgaccgcacagtttcccatattatcttctctatctgtctcttctcttcacgatcgtgtgaatgaattttcgattattcttttccttttgtggtcaagaatactaaattcgaaaagaataacgtgtttacgcagacaataataaaattagtgtaacgtattattaatacaaatacaatgatgcaagtttctcgttaagcagagctcacacaaactttctcattcaccgttacttttttcttttcttttctttttctaattcccgtactttgggacaattctaataaaaaggctttgttgactcaaattcgatttttcagatcgaaagtttcttcctttcgaccctacaggcagatacgaaagtttgttccttgctcgtttcgaaatctctcttctcttcctcaatttctctgataaaaaagttcgaatctttagatgcaatttagtctattccaggtgttgggaattccaaattcttgacgggttttgcatgcacgtctttgcaggttcgaattgttgaagaaaacaaaaacaaattttgtctcttttgaaaacgattagttgatg

SEQ ID NO: 12005 - DNA, 3000 bp, Unknown; identical to SEQ ID NO: 11994
  misc_feature (1)..( 3000): cDNA_ID_2708139_gDNA_ID_2214527_Annot_ID_184779 3000 nt of promoter + ATG

SEQ ID NO: 12006 - DNA, 3000 bp, Unknown
  misc_feature (1)..( 3000): cDNA_ID_3023651_gDNA_ID_2214527_Annot_ID_184778 3000 nt of promoter + ATG
ttaactatggcgacaagggttagtttcttcttagctctggtaatgacggtggtgattcttgctccttctgtcgtctctggagaaaatgggttttccgatcttaaaatccgtactcacttgaaacgactcaacaagccagctctcaaatcgattaaggtgaattccacagtgatattagagagaaaactccataaaagtttcattcttttgctgttttctgggaataattttgagtttcttaaacagagcccagatggagatatgattgactgtgttccaatcactgaccaaccagcttttgctcatcctctgctcattaatcacactgtccaggttctgtttactcttctttcttttgtttgattctctgttgtttttcttctgtatagttctgacattgttgttgtttatgggtgtattatagatgtggccaagtttgaacccagaaagtgtatttagtgagagtaaagtttcatcaaaaaccaagaatcagcagtctaatgctatacatcagctttggcatgtgaatgggaaatgtccaaagaacacaattcccatcagaagaacgagaagacaagatctttacagagcgagttccgttgagaattacggtatgaagaatcagaagagtatccctaaacctaaatcttctgagccacctaatgtccttacacaaaatggtcatcaggtaattatttttcttcacatatgaattagttttggccaatttttgttgtgtctattaacctcttcctttaccttttgttgttgatttagcacgcgataatgtatgtcgaagatggggttttctacggggctaaagcgaagataaatgtatggaagccggatgttgaaatgcctaatgagtttagcttagctcagatttgggttttaggtggaaatttcaactctgatcttaatagtattgaagctggctggcaggtatttttcttctttcggtttttgatagttctttcctgaaaaagaaactgtttttgattcaaagatttgtgttttcaggtcagcccacaattgtatggtgataataggaccagactcttcacttattggactgtaagtttcagactattcaatctagatttttgtttttgtgtgttttggctttcttgatgaatcattcttttgtctctcacttgtgaaaacagagtgatgcataccaaggcacaggctgctataatcttctatgctcaggatttgttcaaatcaatagagaaatcgcaatgggtggatcaatctctcctttatcaaactatggaaactctcaatatgacatcaccatactcatctggaaggtaaaccaacaacaaatatccatgttgttaccatctatttagtggtttagctatggtttgagaaatttcagttttgtttttttgttttttctcaggatccaaaagaaggacattggtggttacagtttggagagaaatacataataggatactggccagcttcactcttctcttacttatcagaaagtgcatcgatgatcgaatggggaggcgaagtggttaactcgcagtccgaggaaggacaacacacaaccactcagatgggaagtgggaggtttgcagaggaaggttggggaaaagcgagttacttcaagaacgttcaagtagttgatggatcgaatgaactgagaaacccggagaatcttcaagtgtttactgatcaagagaactgttacaatgtgaaaagtgggaatggaggttcttggggaagttacttctactatggtggtcctggtcgaaaccctaattgcccttaaagatttggtcgacttactcacattgcagatcattccaaatcaattgtataaaaaacatataatatatatatatacacattcttaagtatattattaatttcaggtttgaagagtggtatatggtatattcaaattcatctgcagaatttgtttgtttgtgtgtttgagagtgttttctctgtttccatggagtgaagagaagataaatttcttttaaagaacatggtcccatgtgtatactgaaatcaaatgatcccattattaatttatttgtatttttttttttgtatatgagtggtactttgttttcaatgacctgtgttaatagctttgtctgtatgtaccaaaacatggagatgggacttttggctttggatcttcattaatcactcatgtttaacagtatctatcagaattattggccaatcttcattacactaatactattatgtataaatctattaactatttttgtgatacttcatttaagactaacataaactttgttttttttttaattatcagcaagcttccattgtattggaactatgtttttgtgattgatcaacaaaacagaagcaagttaaaatttacaacttgaaatttttttcttataattatctcaaattaaacttataattacatctatgtgaatgacagatctatcttctcatgtccactgttatagtcaacgaaatgtttggggccataagccacaagagagttgactttgatcacgttgacgagttctcaatcataaaagcataatcaatttaacatagtatgagacttataattaatttaacaaagtattcaatggtgccaaaagaaagttcaataaagtaccgaccatattaaaattcatgtagagatttaatttaaaagtgaacatggtgcaatttacaagttcgtgacctctacgcggaatggttcatgcagagtaacaaacaaatgataatttaatttaatagaatgataattgatttatatttgcttcaaagagaaaaaagtttaaaactgaattatatccttcttgtcaatgtcacagatagtttaatactttatatagataacgtcgaagacgaggttacaaaaaaaaaagaaaaaagaattctggttagagttgagaaaaaatagtaagttatgtagcattccacttctataaattccaatgaatactgtctaaaagttttgctaagaactgtatagcc

SEQ ID NO: 12007 - DNA, 3000 bp, Unknown; identical to SEQ ID NO: 11992
  misc_feature (1)..( 3000): cDNA_ID_1014010_gDNA_ID_2214527_Annot_ID_184777 3000 nt of promoter + ATG

SEQ ID NO: 12008 - DNA, 3000 bp, Unknown; identical to SEQ ID NO: 12001
  misc_feature (1)..( 3000): cDNA_ID_2708092_gDNA_ID_2214527_Annot_ID_134188 3000 nt of promoter + ATG

SEQ ID NO: 12009 - DNA, 3000 bp, Unknown; identical to SEQ ID NO: 12000
  misc_feature (1)..( 3000): cDNA_ID_1807359_gDNA_ID_2214527_Annot_ID_134190 3000 nt of promoter + ATG

SEQ ID NO: 12010 - DNA, 3000 bp, Unknown; identical to SEQ ID NO: 11999
  misc_feature (1)..( 3000): cDNA_ID_2708084_gDNA_ID_2214527_Annot_ID_134191 3000 nt of promoter + ATG

SEQ ID NO: 12011 - DNA, 3000 bp, Unknown; identical to SEQ ID NO: 11998
  misc_feature (1)..( 3000): cDNA_ID_1807107_gDNA_ID_2214527_Annot_ID_134194 3000 nt of promoter + ATG

SEQ ID NO: 12012 - DNA, 3000 bp, Unknown
  misc_feature (1)..( 3000): cDNA_ID_3023761_gDNA_ID_2214528_Annot_ID_134197 3000 nt of promoter + ATG
tcaaatttaatttagttacttgaattttttttttgttaaagagttacttgaaaaattttcggatatcaaaacttcgaaagagaagtaaactttatatcaaatattattttatataaatatgtggcgataccaaagtaagataagtaaataacgagtacagtgatatattatagtaagcagggatgatgtagaggattgggacgtgtacgttggttgtttgaaaacatatgttccaacaaaagagagtcttgagtgaatctaagctttaaggatcttcacagtctcttggaagactctctctttgacactttacccaattattccattcctttcaagcaacataagacaacgatcgttggattcagcttcacttggcaaatctactgttaatctgtctcatctcctttttctctagatatttggtaactttagaattaagatggtgcattcaatgtttaaatttggtgagattactcacttcatttccatttatctcatctgactataagaaaacatcgaacttaattaggaatgtttgaaatgtaagttaagattggtgtcttgctcatagtaggaaaagaatgtaaaaagtaaaaaaaactatatgatttggaaaaatatctaattaataggtggcaagaaggttcttgcgaatttagcttcgagtaaattgttagacgatacttaaaaatcgattacttcaaatgaataacttgcacatagtttgtgatgaaatgaatctaagctataaaaaaaaaattgtgtgttcacgatgagaaaagtatagtaagtacaaataaacaaggcaccaaattcttgaggagtttcgatttctttaaaatatacttttttttggggtttttttacacgtctcgtgaatgtttactaaatttgctaacaaccaaatttagaaattaaaatataagttcagaaagtaactagtaaacaagagatggtattagttaaggctaaagtgatactggtaaatgatgaggaattagaaatttagaaacatggttttactaaaagtaagaaagaacataataatgttggtcgttagttgtagccttgtaggtttaccaacttcaaccctttcctttacttattacatatttttaacatttatgtttgtatccaataaacattaacaagttgtaactacataactttttgttttctgaaagaataaattactttactgtgcttttgtaaatcctcttgagattttttttgagagaaaattatcattactttatttggaaattggttttacgaaaaattgatcatacacaatttactaaccaactcatgattcgatcaataggtatatcacccaaaaaatatattctcttctagtgtttcagcgtgtaagtttagccattataataacgcttgactttgaatttataaaataatgtgattattagtcggtgacaagaataattcaactaatcataagaatggtggcttccaaaaggaccaaaaccatgaataccatacgtatacaaacgaataaattcgatttataaggccgaattcattgggccttataactaatcaaatttacaaaatggataaaataaaattgaaactaaagcccattatatgaatttaaagcctaacaaaatttcattttgccgtccttagaccaacaccgattcgcacgccgactcgtggacttcggagggcaatcatgaccaagcacgatcggagactcaaagatacctttcttaatttaatcgcattactctcattctaaccgttatggacaacattttaaccggaatagttacaaataatgccattaaattgatacatttaaagagagaggtttgactaatgaccaacttttaacctccaaattaggaaataaatacattaaaagatgaacagtgatagtaggtggtaaccaagtaaaaaaaaaacttccattttctgaaaactcacaatgtttaccttttggtatttgattttacttcaaaaaggagcatttataacaaagaaactatactattgcagagagaacatgcaaatcaaatggactttttgtttcagagtttcacaccttttatttatttctgtttttggtgaatcaatctgaatcatatcaaaaacagaaaaacagaaatagtatgattccattaatatctagtcagaaaaaaacacagctggactaaatagcttacattctaaagtttgaatgaaaacagtttgtaacaattcatgttttaagtattaaataccgaaattatgtcatttttaatccaatttaaatgatgaaaaattagattacaattttttttaaaaaaatttcaacaggaagatctttgagtatattttcttataaagaatattaacatttacgtatatatcttctctcgcgaaataagcatatatccaaaattataagtatatataaatagaaaaaataatcatagaatcttgaagtgttgtactttgttaaagctgtgtccttaaacccaaaactgaaacacacacagaagacagaagaactcgaaacagctccaaacgtgtgagtctgagattcctcagctctctctgaaacacaaaagacaatattaaagttttgctctgtttttttttttttaattaatgctttttataatttttcaattccttatgcaatcactaggtcagatcaacaacaacaaccctaataatgattcacagtaaattttttttttaaaattttttttcacaaaaaccctaagggtttcttacatcgccgtcgatttttttcttctaactctctataaaacccagtttcttcttaaagtttcgatttttctatttctcatcatctgatcattgtgtttagggttttttttttttttaattgaaaacgacagtaatacatggagattggattttgagtactagcttaaagttttgatctttgggtttagttttggggtataaaggtgtcatctttaggatttttagcgtaattgattttgggggtttcttgttgtttaggtg

SEQ ID NO: 12013 - DNA, 3000 bp, Unknown
  misc_feature (1)..( 3000): cDNA_ID_2708154_gDNA_ID_2214528_Annot_ID_134198 3000 nt of promoter + ATG
aggacaagaaaaatacaagtggctatgtctttacttctggatcaggtgcattttgttggaattctagcaaacagaagaacgttgctcaatcaacgaccgaggcggaactctttatcacatcaaggttcgaagttctacgagaagagctagacgtaacgatgaagccatgatcaaggaggagtgttggaagtgatcaagtcatcatcttattttagaagagatatattatatagtgaagtaactggtttatatatattcgtatcacacatcgaagagatacaaatataattgttaactacaaaacagttacatgtgtgtatgtgtctctacattaggttgtcttctagagacgtgtcccttagtcaaagtgtgtcatgtaaacctataaatacagtttgtatatgtaataaaagtgtgtggttttcgttttataaaaacagagtgaaatatagagtaagacaaaacagagtaaaatctgtgttgtccgatccttaacaactttgagagttcaaagttctacagtattgtggttgctttgggtctattataaatatataggtaaacaatgcgggaacgggtataacaaagccgaccacagagtatacagcacaagattactcatttctgatggctacaaatctcgactcagcttttcatctctcacagctcgcgcatcctttgttgaaagcatctggttcagggagcatcgtgctcatgtcctctactgcaggggttgtacatatcaatgttggttccatctatggagcaactaaaggtttatatatactttaatatatactcaaactattaatgatccttttacgttctgaggctaacatataaatgagtattgtacatatatctacgcgttgtaggagctatgaatcagctagcaaaaaacttagcatgcgagtgggcaagggataacataagggttaattctgtctgtccatggttcatagcaactcctttagctaacattgtaaggcaataaaatgagaaaaaaaatacaaagatctccttaatactaagaaattttataacagatgaatttaacttatgccaaaatctcttaattagtatctcaatgatgaagagttaaagaaagaagtggagcgtaagacaccaatgggacgtgttggaaacgcaaatgaagtatcatcgcttgtcgcatttctctgctttccggctgcttcgtatataacaggtcagacaatctgcgtcgacggaggtttcacggtcaactgcttttctttcaagccagtgctttaaagcattgattgtttgttttatattgcatctatgtttcttcgtttactgtgtatttttattttaaaataaactcgcaatctctagcgtctaaaagtgagttgaacttcatcaagttcgtaggtaagaccaaacaaaactctataacattattacagaaaattccatgattattttctttgataaagaaaaataaaatgtgttgcatcaactaatttgagtcaaaacaataaattaatattgttctttgttattatgatatttttataacaaaacatgaacaagcctaaattgtaacaaaggaacaaccctctttagtacttttcttaaccacaccctaccggaaataatgtctagatctgctagtggatacggagccgtcatcatccatcatcaggaattattttattttcttaaacatgtgatctccgttaagaaactactagccagggatacctaatacatgtgtggtccaacggtcaatgtgccagagatgacactcagcttaaagaacgcttacgtaaatggcaagcaaagggtttcaggtcaccacttctgtctgcgacgtttcttctcgtgaccaacgagagaaactcatggaaaccgtttcctctctttttcaaggaaaacttaacatccttgaaagtatatatatatattataagcttctcctcctcgatcttgggaactacaagaaccaaattatgttgtgtttatacatatataggtcaacaatgctggtacgtttatactcaagccgaccattgagtatacagcagaagaatattcgtttataatggctacaaatctcgagtcagcttgtaatgatatgggtctaaacttgagatttttgtttaaggggggtttcttgtaaagtggtccggtattgtaaccatcaattgaataaattggtgatgtccaaatatttccataatatcaagagacagatgagcttagatagactggtcttgacggttgtgtaaagtaaaattttactgggagaggagtttgcagagaatattgcaccgaatataccaatgcggtgcgctggagagacagaaaaagtggctgcaatgactgcattgctgtgtctacctgcatcttcttatgctacaggtcatgccttctaattaaacgcttccagccttccaccaagtcaatctcaaaccggacaagaatttacattcgatttttgttatatcggtttcttaaaatttagtttgatacattcgatatttcaatgttttgtttccaacattttgaatgagtttgatgaataattcaatgcaatttatctttgttttacgtttgttataataatgactcttattagacccaatcaaagaaatgtaatgaaaataaacgatctggtctcttttacctgtagtctgtagatggtagaaataatttaggaaactgacaatgaaatatgggttgactaattaggccaactagctaaaagaatgttcatgtagtaatatttaaggttctttacattgaacacaaaaagccactatcatatcgtgcaacgttttacaacataaaaaatcatcataatgtggaatttgagatgagacaaagttcaaaacaatcacgttcatttttttatttcttttttggtgttaaacattctcgtaacattctcatggtcaaacctgacacctagacttggtcatatgatattctctataagactatactcttcactgcagaaactgatatccagaaatg

SEQ ID NO: 12014 - DNA, 3000 bp, Unknown
  misc_feature (1)..( 3000): cDNA_ID_2711424_gDNA_ID_2214528_Annot_ID_134200 3000 nt of promoter + ATG
aaattttgatctatttgagcgtttagatcattccctcctccttgttcttctttttctttgaatgccgcatacacttcttctctagattttttccaacgaattggaaaacttctatccatcatcttgatgtccaagatcttctttccttttaagtcttgaatcacacacttgttgtcttcaaagatgactcgatatccgttggatatcatttgagagacactaagcaaatttcttgctagttcgggtacataaagtacatctttgatgacatgatctcctttgtttgtggatactcttatatctcctctgccttcagacacgacctttcgaccattaccaatccttatggtaattttcttgttgcggtccaaagtgatgaagtgtctaacatctttagacatgtgattggtacatccgctatctaccaaccacgtttcttctccaattgttgagatctctttttcttcaacagcactaaagagaatatgacactcatcttcttcttcatcttctgattcttcactacttagatgtgctctttcaccttttttaagtttccaatctctggctatgtgtcctggcttgtcgcacacatagcatcttctttcatagcttccacctctttgtgaaatgctttcactcttctttctgaaacagtctacctcattgtgattgttcctcttacacacgctgcaccacatgttggtcttcccatggcgatttttgtttgcttgttttctgctcttgagccaagcttttctccataaaacgcaccctcattgatacgttcttctcggagactcaagcgcttctcatgcgcattcaaagtacctatcatctctgtcatagagaaagttgatagatcctttgtttgttcaaggaccgcaacgatgctatcaaactgttgcggtaaggagataagaaccttttgaaccaattggtaatcggttttctcttcaccatgaactcttagttgattactcatattaatcaacttggttgtgaaatcatttatgttttcactctcctccatcttcagattctcatattctcttctcaaggtctgaagattaatcatctttacttgtgaacttccttggaactccatctattctcttgcgcttgatgccggagcgattctcggaaatattgaatcagaaactgcactttgaagaatctgaagagccatcatatccttcatcacttgatcatcacgctctctagttaacgccggtgagttttcagacgacgaactcaacgtaattccattttcgataacatcccacaacttccttgttttcaagatggttatcatcttgattttccaaaagccatacgattcaccattgaagattggaataacttgctgcattgttgtctccatagctctgataccatgtagaactttgaactctcaaagttgttaaggatcggacaacacagattttactctgttttgtcttactctatatttcactctgtttttataaaacgaaaaccacacacttttattacatatacaaactgtatttataggtttacatgacacactttgactaagggacacgtctctagaagacaacctaatgtagagacacatacacacatgtaactgttttgtagttaacaattatatttgtatctcttcgatgtgtgatacgaatatatataaaccagttacttcactatataatatatctcttctaaaataagatgatgacttgatcacttccaacaaatacacaacaaaaaaatcacttgatcttgctcaaaaccttatgcattatgctcttatacataaacttacaaggatgttgagttttccttggaagatagaggcaacgttttccatgagtttctctcgttggtcacgagaagaaacgtcgcatacagaagtggtgacctcaaaccctttagcttgccattcacgtacgcattcttgaagctgagtttcgtttctagcacatgtgtggactcttgctcctaacatggctagttcctccaccacagcttccctattcataacacagttgtatacatattgacacgtgcaaatatgtaatatgacatattaatgtattcaatattggattagtagggggactgacccgaggcctttggagccaccggtaacgagagcggtcatgcctccaaggctccatctacatttgtctctcaagttttcttctgctttagccatttctggatactattttcttcaatgaaggtcacatatttaaggccaagaggtggaagactagtcgtgagggtggccaaagatacttttacgtgaattgtttaactttgtcctttgaaacccctgtctgaatgtcttagccacctctgattatgagccacagacccaaagatattttcttggagatctgaatttatggttgagaaaaattcataatgaatgaatgaatgataataatgagtaatgacgttcgtacacagtaaggccttttgatgtttttcttaggttactcaaaataatgggcctcgattaagggttaagccccaactacatgggatcgactcatgtttcattgtttgagaaaaactaaagaccccatgtaacatgggttgagctctgttctgctctagccattgttgtgtaatgatgtattttgatgagaaatgataatgaaaaatggctatttatgatgaattaatgatacgaggctatgagattgtttgaagaaattgaggaaagctaacgtatctcttgacgttgtgactgttgtggtgggtagaaaaattagagatcaaagtaaacaatcttaagactgtagtttagtgatgatggcgtaactaatgatgcataatcaaaaactaatagaaatataaggcccacgaaaataatatattgggcttttcttggcccatcaataatctgttctcaatctcaagaaaacatgaaccgttggatgtaaccaaacagaagtgggttatgtccagaatctgaagagatcagagagtgtgggagtggacggaaag

SEQ ID NO: 12015 - DNA, 3000 bp, Unknown
  misc_feature (1)..( 3000): cDNA_ID_2708197_gDNA_ID_2214528_Annot_ID_134201 3000 nt of promoter + ATG
gctaacgcgtacttggggattttcatggcatgaccgaccagttcggatcaatatggaagccgctttattcagcagaaactcgagacagcaacaactgatgagaaaaacatggtctatgaggagatcatgccacaagctcttgtcctgatgactgacgtttttggaaactatgtgattcagaaggtaatttatttagtcttcctctttggttttattttgaagttaagccatagtaagatgagtgattcctgaattttgcttatcttcctacagttctttgagcatggactcccgccacagaggagagaattggcagagaaactctttgaccatgttttgcctcttagcttacagatgtatggttgccgtgtcatccagaaggtaaagtctagttcccacctgttttactgttctctccattctcaagaacagttaagagtttcattatttttcatatgtttacctttttaggcaattgaggtggttgatctagaccagaaaattaaaatggtgaaagaacttgatggacatgtaatgcgatgtgtacgtgatcagaatgggaaccatgtggttcaaaagtgtattgaatgtgtgcctgaagaaaacatcgagtttattatttcaactttctttggccatgtggtgaccctctccactcacccatatgggtgccgtgttattcaggttcttgctattggtgattgagaaagatgacaccttttttgatcttatgcttctatgtaaaactctttttcatctcctgttgcagagagtattggaacactgccatgaccctgatacacagagtaaggttatggaagaaatcctgtccactgttagtatgctggcccaagatcagtatggaaactatgttgttcaggtttgtaaaaagatatgagttttactccttctggtgattttttatactttgctcaaaactgatacatgttttgtggacagcatgtgctggagcatggaaagcctgatgagcgcactgtgataatcaaagaattggcggggaagattgttcagatgagccagcagaagttcgcatcaaacgttgttgagaaatgtttgacttttggaggtcctgaggaacgagaattgcttgtgaatgagatgctgggaacaactgatgaaaacgagcctcttcaggtctgtcaaacctttatttcagatgattgtcgggggaaataaagaaactattagctcatagcttcttcttcttggtatataggcgatgatgaaggatcagttcgcaaactatgtagtgcagaaagttttggagacctgtgatgaccaacaacgtgagctgatacttactcgcatcaaagtgcatcttactgctttaaaaaagtacacttatggaaagcatgtcgttgcgcgtattgaaaaactcgttgctgctggaggtatgtatatgttcctcttctcttctatgagcacattgcatttactgcatttatttgagaaagagagacaaaataagcatttttatgacatttcattgtctctaagtggttcttttcttatatgcagagaggagaatggctttgcagtccctaacccagccccagatggcttaagaccttaagtaatgtacagcttaactagggtggatggggctgccgtagcgttttgagaattaggtaagatctaaaccggaaataatctgcggggaaattgtgaaggagagctttgttttctctgctaaatctgtaaaattgtgtagtttgcttacggtttttctatacatagaacgaaacatccctctttaggctgatgagtgagagataaaaaggcagagaatggtgtaaagatggattttagggtttccttcacacaaaagagaatggctttttcattgccaaatgtgtagaagtgagaatatgtgttcatgcttttaggacaatcccagtttagagtttttttttctccatctatgtaatttgtttcatcaaactcttgtttcctatttcacgaggaactttttcgtttcggctagtttgcaatcttcttgtttatatcgatccagttgattggtaacgtatcatagatgtaacaatcacatagcaaccttacaaacaaaatcaatcttggtctctctgcacacagtggaatagaatcattcacaatcaatttttaatcttatgaacctcttggtccagttttggctcacattgccttcttttggccacctttcttagacttcttcgatgctttatctttctcaaacctctctctttagtctttactcttcccaagaaactcagtcactccaatgtacacagagatgagaagagtagagaagcacttgtataatcaaagcaacaccatcttgaccaccacttgacacaattgcttcagaagaagaagatgaaaagatgaagcaggaaaaacttctctttaagtcgctgaacaagcttaagtggcaagaagactcttgtgggaagagaaggttctcaagggagaaagagacaaagtgtgattttcttacattgccttaagtgttgtcgtttaacaagaatgtgtcatgtgtctctgtatttaagggactccgaaatgttagggtttccttatgcaaaacaataccaacaattattaatctcaattcttccttccatttctatctctctcactctctttctctctcgatcttcttcttcttcaactcttctgtcgataggctcagtatcggatttttcgtcaacactataaaacccatttttctatctctctgtctaaaagtctttactttaaaacaaacagtgacatgaaaaatcaaagcttcgatacaatctcaggatggatttgagtatcgcttaatgaagttttgatctttgggtttagttctacaacagagtatttcgaggattgtatatattgaggtataaagttttgatctttatgatttttatgtttcttttcctgaagagtttagtgtatatgagtacaatctgataaagtggttatagggtttttgttgtttaggtgataatg

SEQ ID NO: 12016 - DNA, 3000 bp, Unknown
  misc_feature (1)..( 3000): cDNA_ID_2708201_gDNA_ID_2214528_Annot_ID_134202 3000 nt of promoter + ATG
agtacattttaaatataaccttattttttgtaagtaattacataagtatgccattagaaataaaatttaaagagtacattaattcatctctttaataattaagtcaaatactaatttaattaattaaatttaattaaaaaacaaaatacattattaatttccaaaaaagtaaccaattaaaatcaacaaattagatttgatatctaaattatcatattaattttttattaattattatagttcacctctcatctttatatgattctattttggcgaaaaaataatatcatcgttataaaaaaataattagagttttttcgcatatgccataatttgaatttttaaaaactaatataaactgttcaatacatgaaaaaatattataacgggtcaaaaatagatttaagaaaattttctactgaatactgggtcataatttgaatatttatattcaatttcatacatattattttaaaaatttataatcttatatactacaataattaataacatattagatttttttatgtgtatgatgtgattcaatttttaatacaagatagaaaatcctagaattgacgggtttaaatcgatattaatacaagatggtatactacatgtgaaactctaaaattaacaatcaaaatacaagtgtataattttaaacactaaacaatataaataatatcaacaaaacatatacaactcgcagtttactatacatttaaaatcaaataaaataatatcatatatttataatcatctttacaataaaaatttttagtttaaataaaatataagcctacatgtggtatactgcaagttaaaattataaataagcagattaccatcacgatgtccgtaccttctcacatacacacttatcaaaaattataaataagcattttaaatgtaaccttattttttgtaagtaattacataggtatgccattagaaataaaaacttaaaactttttaaaacctcttggtatatacaaattaggattcttcattcataaaatcattattccaagggttttgggatgtcttatgaaatgattttggtagaagaggatgtacatttttttgaataaaaagtagtcagcaaaacatatgttttttttgggagtttttagataattaaatcagagaatagggttgggcatacgagtaacccattcgagttctggtagaacccgttcgggtttgggattaatgggtatatgatttactatccaatagaataattctaaatatttggttctggttcgggtcggatccagttgggtttgggtcagtttggataaaaagtttcagaccctaaaaatatccaaaaaaaaatagaaactggaaatttgtatgtacatagcgggtctccaaacaaaaaaaacttttaaatttgttaagttttaataaatttaattatatttgaatatattttacaaaattttgacaaacataacaaatcatttttgaatagtttagttgttttggatatttaggtccaaaattaattgacatatttaaatttataattataatcttagataattagataatattacgattaaatataattaatattttggatattaaattaatgtttgggtttttgaatactttgttttgtaccaggtaatttccagaccaatcggatatccacgggtttactaaaactctacccaataaggaaatttcctaaaattttaacccgccctaacccgtttttttggttcgggtattgagttggttattgggtccgttttttcgtcagccctatcaaagataatctaatataggcctcaattaggtccacaaatataatccaaatactatacaaagactaattctaagttaggccaaaaattagaccctttaatacaaaggaaacatgtttcttaccaaaacaacttgtatacaaattttacacatttacttaaaactacatatgttgtatttattataaaaataacatttttaaacaaagtcaattcaatgcagcattatatgcaaatagtaaaaacattgaaaaatattatggcatcacttttatattatactatttcttatgtaattcaaacaaagtatacaatttaatttatacaaaatattaatgttcgtgctgtacagcacgagttatgatctagttctcttttattattgagcgcgctaatttattcctttttaattatcataaaatctttaaaattttaaatagccccaaaaatgttgggtttaaaaagtgtataaaattttagaaacaagtcatatttgatttaggaacatttccacctaaaaaaattagaaacttttagtaaacataaaactttaaggtactttgagaaatgttccaaaattgtggtattgataaaacaaataaagttacacaaaaattaatctataatatactaattttgaactaaaataaaaacctaaagatccttgtcatctagaagtgttgtactttggtaaaggtctctgctctaaaacccaaactgaaacataaagccaaaagatctcaaaacagttccaacgagaaaaataaggtttgttatcttccaattttcataatgtttttttatattcctttgtgcaatcgctaagtcaaaccaaccctaatattatttcgccgtaatttttaatttccaaagataatcataaaaaaaaaggaacaaaaaccctaaggttcttgcatcgccgtcgtattattccgtcaacactataaaacccacattttcctatctctctcaatctaaagtctttgttagggttctttatttttaaaacaaacagtaaccagaaaaaataatcaaatcatcgaatgggtttgagtatcgcttaataaagttttgatctttgggtttagttctaaaaacagagaattttggggattgtatatatttgaggtataaagttttgatctttatgattttttttcgtaatggtgtgagtataaactattgaattgattttgggttttttgttgtttaggtgacaatg

SEQ ID NO: 12017 - DNA, 3000 bp, Unknown
  misc_feature (1)..( 3000): cDNA_ID_2708205_gDNA_ID_2214528_Annot_ID_134203 3000 nt of promoter + ATG
tgacccaaacccaactggatccgacccgaaccagaaccaaatatttagaattattctattggatagtaaatcatatacccattaatcccaaacccgaacgggttctaccagaactcgaatgggttactcgtatgcccaaccctattctctgatttaattatctaaaaactcccaaaaaaaacatatgttttgctgactactttttattcaaaaaaatgtacatcctcttctaccaaaatcatttcataagacatcccaaaacccttggaataatgattttatgaatgaagaatcctaatttgtatataccaagaggttttaaaaagttttaagtttttatttctaatggcatacctatgtaattacttacaaaaaataaggttacatttaaaatgcttatttataatttttgataagtgtgtatgtgagaaggtacggacatcgtgatggtaatctgcttatttataattttaacttgcagtataccacatgtaggcttatattttatttaaactaaaaatttttattgtaaagatgattataaatatatgatattattttatttgattttaaatgtatagtaaactgcgagttgtatatgttttgttgatattatttatattgtttagtgtttaaaattatacacttgtattttgattgttaattttagagtttcacatgtagtataccatcttgtattaatatcgatttaaacccgtcaattctaggattttctatcttgtattaaaaattgaatcacatcatacacataaaaaaatctaatatgttattaattattgtagtatataagattataaatttttaaaataatatgtatgaaattgaatataaatattcaaattatgacccagtattcagtagaaaattttcttaaatctatttttgacccgttataatattttttcatgtattgaacagtttatattagtttttaaaaattcaaattatggcatatgcgaaaaaactctaattatttttttataacgatgatattattttttcgccaaaatagaatcatataaagatgagaggtgaactataataattaataaaaaattaatatgataatttagatatcaaatctaatttgttgattttaattggttacttttttggaaattaataatgtattttgttttttaattaaatttaattaattaaattagtatttgacttaattattaaagagatgaattaatgtactctttaaattttatttctaatggcatacttatgtaattacttacaaaaaataaggttatatttaaaatgtacttcctaaataatatagtaggatttcttaattaggaaaatgacaaaaaaatattatatttacctcttaacttttgagattttatttaaatttatgaaagttttgcttttttttcagcggagatgttaggcgaaacttacattattttcttgtcagcaaagatttggtgaattcgttaattcgatgatgataacgttagtgacggttgcaaaaatgtttctgtttttacggttttttgattcatgtagaggcaaagtttgtttgtaattggaaagaaaaaataaattaaataacgaatcttaaaaagtcttccaagttgatttttttctttactgacataaattttgctttatatatcatacaaatacgtcaaagtccataatttcgatgatggtgatgacaaaagaaaatatgttattatcttttgcatgacatgccctcatatatgaaactgaaacacagagttatgagctcatctatatatacatttttgctgctactttgtgaaataaatactggagttgggatttatttacaacggctgccactggcatttaataattgtttttgataattagaaagaaaatcttctaattaaatatttgacatttaacaatcttcccaaaatctctcaaccttaactacacgattaattactaaaataaaacttctaaaatatttaatatcatttaattactacaaaattatcatttttgatattgcttttctgcatgattataatcatcaaaccgtagagatatttgatagcatttaattactacaaaattacaaaatatttagacaataattcataaacatatcataaataaaatcaacattaataaaataaatgagttttttttagaggacgggttggcgggacgagtttggcaggacgttatttaataacaattgtaaactatacaataaaaatattttatagatagataaaatttacaaacttttatatatattaattaaaaaaataaattgtttccgcggtgtactgcgggttaaaatctagtctaatacaatattagagataactatagtcattgctctcatttttccatttgcatacttatatgttctcaattctcatacctaccttatattgtgtgcccatacaccttccatgcgcacttgttgtccacacaaattacgatcaaacaactgttatatagtttccacccacactttcacctatggtttaagaaacataagttactctaatgtagtaggacgagttgaccaaacctaactccttcattttgttgcaccaacccatatttttaccgagtaatgcacaccccaaaacttataatcatagtcatcttcctttcacgtcccataaggttcacattgattactctaatctatttcactttcaagattaccaccacatgtaacttttccattccttttccacatttatctcttaaacctcaaacactttcaagtttcatcttctctctctcttattaacttcatctaccaaccctacttaacctaaaaccattttcaattgcttaatcagtccacacaatgcacataaatttccgtgaccacactgttcgttttagaagaaaaaaaccacttccaaaattgcatatgtaccaataagataaaatgttttactcattcaaatagacctacgagattaattaagactaggtttgctttgggctaaaactggcccataagct

SEQ ID NO: 12018 - DNA, 3000 bp, Unknown
  misc_feature (1)..( 3000): cDNA_ID_2708209_gDNA_ID_2214528_Annot_ID_134206 3000 nt of promoter + ATG
tagctaacatcaaaatctgaaaactatcaatggctaatacctataaatcgatagctgtatcaataatcttcctactatacttttcttgtgtctcaagtcaacaacaaaccaaatttcttaaccatggctttctggaagctaatctcctcaagtctggctcgtccaagatccacccgagtggccacttggagttgacaaacacttcgatgaggcaaataggtcaagcttttcatggctttcccataccattcttaaaccccaactcctcaaatttggtatctttccccacaagcttcgtctttgccatcactccaggacctggcgcaccaggccacggcttagcttttgtcatttcaccctcgctggactttagcggggccttaccaagcaattatctaggcctattcaatacctccaacaatggaaactccttgaattgcattcttgcagttgaattcgacactgtgcaggccgttgagttgaacgatattgatgataaccatgttggtatagacctcaacggagtgatctccattgagtctacctccgctgaatattttgatgaccgagaggcaaagaacataagtttgaggctggcgagtgggaaaccaataagagtctggatcgaatacaacgcaactgagacgatgctcaatgtcacattggctcctctagatcgtccgaagccaaagttgcctcttctctctagaaaactaaatctttctgggatcatctctgaagaaaattatgttggattctctgcagccacgggaactgtcacgagctcacattttgtgctaggctggagcttcagcatcgaggggaaagcatcagactttgatatcacgaagcttccctctcttccagacccgctacctccattgtctccatccccgagtcctccggtttcagtcatgaaaaattcgagtaacacgatgctgatcataatcattgctgcatcagcaatatttggaatcttgatcttaagcttcttagcggtttgcttttttcgtagaacggaaaacttcaccggaggcgcacggaaattctcccaccagacgatttccagcgcgacgggaggttttgacaactctaagcttttgggagagggaaactctgggagtttttataaagggcaacttgctcctacagagataattgccgtaaagagaattacttgcaacacaaggcaagaaaagacagccctaatagccgagatcgatgcaatctccaaggtaaaacaaagaaatcttgttgatctacatggttactgcagcaaaggaaacgagatctatcttgtttacgagtatgttatcaatagaagcctagaccggttcttgttcagcaacgacctaccagttctcaaatgggtacaccggttttgtattataaagggtattgcgtcagcacttcaacatcttcacgctgaggttcaaaaacctctcatacacggaaatgtcaaagcaagtaacgttcttttggacggagagctaaacgctcgactaggagactatggacatggaagcagacacagcactacgggacacgttgcaccagaactagtcaacacgggaaaggctacatgtgccacagatgtgtttgaatttggagtgttaatcatggagattgtttgtggaaggagagccatagagccgacaaaggaaccggtagagatcagtttagtgaactgggtgcttcgaggggtcaagagcggaaatctcttaaggagatgcgacaaaagaatcaagaaaaagaatttagtctctgaagaagtgttattggttctgaaaacaggacttctctgcgtgagacgatctccagaagataggccaatgatgaagaaagtgttggagtatctcaacggtacagaacatctccctcatgatgactacgtcgtctaaaagaggaaatggctaacgatgatctcgaaacgccgttgtacaaatcaagattggacccaagatgcataagcatgatatgaataatacatagaataacttttaaaaatggaaataagaatttctcgttttgagaaattaatttcattaaatattatcttcgattaaacaatcttcgtactcttccgagaaaatgaatattttaaaatatttgtgtttgattttaaattctaaatgatgtttgttcgtcgttttaggataactagtatgtattgttaaagaaaagataagcaaataaatagtattgttggcagacttttctagccctttcattgtaatttcaattatctttgttcaccagtagatttttatagtagcaacaaaatctagatttctatggaatttgggttcagtatagatttttttttttttttgttaaagggattagtttagattttggattggattcacctggttaatttaaaagaagggtatatgcactagatgaccatgaaatcaataataatatagaaactaactatgagtctatagtgtctgtcggagacgtatctgaaattacccgcaaccccctataactgtgttcttggttaggggacatataggtgtataggcgtatgattgcagaaatttgaattttgaaaaccttggtaagagcaatgctgtatgtggacgcaaacgatatagattttaatttcgagaaatcgatttattatcgaattttttgaaatatcaggagctccaaaaaaaaacctagcgccgcttcatttgctggttttccgagaggaaacgtcttccgttctctacccatagattctgcaaactctccgaatatctatttcaaatctatattgtttctcatacatatcgtttctttagattcaatctcgcagttaggcaatcaattccatcgggctacaggtaatttcacaaatatatgcggtttaagctattcaacgttctcgatcgccatcaacttctttatttctccaatctatattccgattaactgaaatcttaggtacatactgtttctgatttataaacttctattttgtgcagaaaagggttcgacttgtagatg

SEQ ID NO: 12019 - DNA, 3000 bp, Unknown
  misc_feature (1)..( 3000): cDNA_ID_1807300_gDNA_ID_2214528_Annot_ID_134208 3000 nt of promoter + ATG
cgtttcctttgctgcagtaaccatgtagatcaacaagatttctttgttttaccttggagattgcatcgatctcggctattagggctgtcttttcttgccttgtgttgcaagtaattctctttacggcaattatctctgtaggagcaagttgccctttataaaaactcccagagtttccctctcccaaaagcttagagttgtcaaaacctcccgtcgcgctggaaatcgtctggtgggagaatttccgtgcgcctccggtgaagttttccgttctacgaaaaaagcaaaccgctaagaagcttaagatcaagattccaaatattgctgatgcagcaatgattatgatcagcatcgtgttactcgaatttttcatgactgaaaccggaggactcggggatggagacaatggaggtagcgggtctggaagagagggaagcttcgtgatatcaaagtctgatgctttcccctcgatgctgaagctccagcctagcacaaaatgtgagctcgtgacagttcccgtggctgcagagaatccaacataattttcttcagagatgatcccagaaagatttagttttctagagagaagaggcaactttggcttcggacgatctagaggagccaatgtgacattgagcatcgtctcagttgcgttgtattcgatccagactcttattggtttcccactcgccagcctcaaacttatgttctttgcctctcggtcatcaaaatattcagcggaggtagactcaatggagatcactccgttgaggtctataccaacatggttatcatcaatatcgttcaactcaacggcctgcacagtgtcgaattcaactgcaagaatgcaattcaaggagtttccattgttggaggtattgaataggcctagataattgcttggtaaggccccgctaaagtccagcgagggtgaaatgacaaaagctaagccgtggcctggtgcgccaggtcctggagtgatggcaaagacgaagcttgtggggaaagataccaaatttgaggagttggggtttaagaatggtatgggaaagccatgaaaagcttgacctatttgcctcatcgaagtgtttgtcaactccaagtggccactcgggtggatcttggacgagccagacttgaggagattagcttccagaaagccatggttaagaaatttggtttgttgttgacttgagacacaagaaaagtatagtaggaagattattgatacagctatcgatttataggtattagccattgatagttttcagattttgatgttagctatgttcaatgctatctttttatagcttcaaagagctcaagacacattcatattcaaattttttgtttatgctgacaagttaaacaaacttagttgaagatttgactttctatataaactgctaaacaaaccctttttttttttgcaaacctttatattagtatccttgaaaaattctttcgaactttcctccacaatttcttcctaataaaattgattgcaaaataaacaagaaaatggttacatattttctgtataatttaaatgtgattacaaagtcataatggatcaaaaattattgaacaaaaaaaacgtcatcttttagctagcctttagggtgaatcacctttttttttgttacacatataattttgactgcctaacgatcgacgtttatccactatgactatgtgatacaaacaaatagaaaggtttctcttgagtcttgtaattgtgcaattatttgtattaggaagaaattgtggaggaaacttgcaataattatcaactatatgtcgcataaaaggcgttgctatgttaggcttttagccactatatatccaatataaaaataaaaaatggatgaacaattgaacattccttgaaattaaagtgttaactttaaatatgaatatttataataaaaaaatatcctaacttttttttattattattataaagacatacgttgtcaaactaagaaattcaatttgtaaacgaagaagaagaatacttgaccattcaaatcttagtcttgttctcactgaaaacttgtacaaaaataaataattacaaaatctagagaagttttcatgcaaaattgtatatgtagatgtagtcagatagagttccatatattctataaacgaagaaatcacaacaatacaatgtacaaattaacatcattagattagagtcaaagaatttttaaaaatatatcaactttctgagaagagtacaaagattgtttacgaacgaagaattctcaaaacataaaataattagtttccattttacaaaaatgatcttaggtaatctgcttatattggttaaagtatttctattttctaaccaaaacttaggcaatttattttgtcaccaacatacaatattatattaacaatctatatattactaatctatatgtttttttctttttggtctaaggtaaactttgtgatttaattgtagtattgtacctcttcaatagatactccgtactcgcatgtattaatagagcatcacatttatcgacttctctatggttagtttatgcatctactaagttttttatggacttttgtttttgttgttcatttatcgaaataaagcaaaaaactgcaacgatccagttaatccgcaaaaattaatgaattagagttttttttttttctcttcttcttgttgcattttctcctttttttttctattttttctaatgatattaactaatatcttccctactaaaatattgaaatgctttattttattttttaaataaagaaattgattatgattttttttttgttacagtttataaatgtgtctaataatttatggatattttataaagtttataagatatatatacagtaatttaaaatttgccgcaatgatgacgtcgtcatcgtcactaaaccaatcagaaccatgcttcgcataaaggtgactctgactcatttgaaaagctgaaacataaactctgctctgcataa

SEQ ID NO: 12020 - DNA, 3000 bp, Unknown
  misc_feature (1)..( 3000): cDNA_ID_2708217_gDNA_ID_2214528_Annot_ID_134209 3000 nt of promoter + ATG
tggcctttgtgttttaggagcaattaatcaacttacgagaagtctggcttgcgagtgggccaaagacaatataaggatcaatgctgttgccccgtggtatatcaaaacatctatggtggagcaagtatgggtttaaaagccttattatctattatgcggttaaatataagctcttgaggctgaaaatcaaaatgagaaagactaagctaatttgtgtgttccttgtttaagatggggttgtttaatggttctcgtcttttggtctcaggtccttagcaacaaagagtacctagaagaagtctactcagtaactcctcttggtcgacttggcgaaccgagagaggtgtcttctgcagtggcttttttatgcctacctgcatcatcatatattacagggcagattctttgtgttgatggtggaatgtcaataaacggtttcttcccacgacatgattaggccactctattgttttactagtttccttgggatcctttttgttttatctttagcatgtctcctttctcccgtgaaagacagttcatcgatatgagatgagaattgaagttgtgctactaagtctactgttaatgaaaaggataatttagcatcagacagcgtgattcagtttcccttgtcttttactgattatcttgattgtgcatgtgggggaaaattgctgaggaaccttttcatgttatgacttttatgaaaacaaaaactttatgtttcttgagttagtattcattagcttgtattctgtgtcatcctttctcggttttggctttcattgtgtcttgaacctgcactcatatccaacaaacaatggttgaggaagagagaagctgcatagaataaacgaggaacctttaatgaattaccgccacctgtgtctcgggtcactcttcttctgcccttgtatttacagcacattaagctctgcttttggttaatatcgctttgtctctgtgtttaataatgtttttggttcgatgtatatatacaggtaagcaatgcaggaaagtgtatagccaaaccgaccacaaaatatgcagtagaagatttctcgttgctgatggctacaaatctggagtcagctttccatctctcacagctcgccaatcctttgttgaaagcttcaggttcagggagcattgtccttacgtcctctgttgatggggttgtccatctgagagtcggatccatctatggagcaaccgaagctaccgtatatatgtctacatccttaaaacaatgttcccttgcgttatgatgctttcgtaacatatagatgcgtttcaggagccatgaatcaactggctagaaacttagcttgcaaatgggcgagtgacaacataagggcgctctgtttgtccttggttcattaaaactcctttaactaataatgtacggcgaaaagtaaaaagtctccttattattatgaaaatatatctatatcataacttcccaattttgatttgtatgaaatgtttcagtttctcaatgataaagatgcaaaagaaaaggtggagagtaggccaccgatgggtcgtgttggaggtgccattgtcaacgttttttccttcaagactctgccttaaaatacatatatgcatgtgtttggattatattttcctgcgtaataattaagaaatgtactttagataagttcctatctaaagtcgcttgtgatgccaaagggattgggtcccccttcttcttcttgttattctctatgttttgtttcctgaaatatttatgcttgtggtgaacgagagttcaatatctgaattcattatctactttggccaacgcctaatggtatcatttggtgtctcaacatgtgatggagtgtctaatttggtttgaaatcccaaaattcaatatccatgggtattctctagtaatttataaaagaactttggtccaaatcctacaagtggtcatatactgacataccacatagtggaagaactagctagctgggtttgaaataaactcaagataagacaagtggtcagaattgatgttgagagatttttttcctcagcatgggtgtcaaatgagggtccatcaaagtatgcagatgtcactaagggtttccatttagagtaatgagacatgaaatagtgggttttgggttttgagtatttgggttttgagtaagtattccaatataatatatgttcggataattttgatagctaaaatcattgtccacggtcccaaacgcccactagtttaggtaagatggacagccctagatgtaactatcaggagttgcccaatgtctatcatgtaattgtatcttttcttatttacaaagttgttagtaatctatctttatatacaatttaaagaagctcttgttagttatgtgatagataaagatggataacagccgatggagtcttcaaggtatgactgctcttctgaccggtggagcgggaggaattgggtttgtcttcttaccccatttttctacttctatttgatatccaaaatggtcaagaattcaaggagtttatgtttgtggaatgttttaggcatgccatagtagaggagctagctggttttgggccaaagtccatgtatccgacatatctgaaacactgctcaatcaaagtttaagcgaatgggaaaagaaaggatttcaagtgagtggtacaatctgtgatgtatcctctcgtccggagagagaaacactctgcaaactgtctcctcgttgtttgagggcaagctcaacattcttgtaagacgtttgtgagtgaagttaatggaaatgacaatgagcaagttttgctcaaatattttgactataaaatgtcaattttggttaggaccactatcttagatttttttcatcttcactcgtaaggctacgtattatttccaccacacatacaaagataatcactagattcatacttatccgttccacattcattgtatatacaaaatctgtggcatttctggtcacttcaagtaagatacaagaaaaa

SEQ ID NO: 12021 - DNA, 3000 bp, Unknown
  misc_feature (1)..( 3000): cDNA_ID_2711416_gDNA_ID_2214528_Annot_ID_134210 3000 nt of promoter + ATG
tcttcttgttattctctatgttttgtttcctgaaatatttatgcttgtggtgaacgagagttcaatatctgaattcattatctactttggccaacgcctaatggtatcatttggtgtctcaacatgtgatggagtgtctaatttggtttgaaatcccaaaattcaatatccatgggtattctctagtaatttataaaagaactttggtccaaatcctacaagtggtcatatactgacataccacatagtggaagaactagctagctgggtttgaaataaactcaagataagacaagtggtcagaattgatgttgagagatttttttcctcagcatgggtgtcaaatgagggtccatcaaagtatgcagatgtcactaagggtttccatttagagtaatgagacatgaaatagtgggttttgggttttgagtatttgggttttgagtaagtattccaatataatatatgttcggataattttgatagctaaaatcattgtccacggtcccaaacgcccactagtttaggtaagatggacagccctagatgtaactatcaggagttgcccaatgtctatcatgtaattgtatcttttcttatttacaaagttgttagtaatctatctttatatacaatttaaagaagctcttgttagttatgtgatagataaagatggataacagccgatggagtcttcaaggtatgactgctcttctgaccggtggagcgggaggaattgggtttgtcttcttaccccatttttctacttctatttgatatccaaaatggtcaagaattcaaggagtttatgtttgtggaatgttttaggcatgccatagtagaggagctagctggttttgggccaaagtccatgtatccgacatatctgaaacactgctcaatcaaagtttaagcgaatgggaaaagaaaggatttcaagtgagtggtacaatctgtgatgtatcctctcgtccggagagagaaacactctgcaaactgtctcctcgttgtttgagggcaagctcaacattcttgtaagacgtttgtgagtgaagttaatggaaatgacaatgagcaagttttgctcaaatattttgactataaaatgtcaattttggttaggaccactatcttagatttttttcatcttcactcgtaaggctacgtattatttccaccacacatacaaagataatcactagattcatacttatccgttccacattcattgtatatacaaaatctgtggcatttctggtcacttcaagtaagatacaagaaaaaatggataaaagatggagtcttcaaggtatgaatgctcttgtgaccggtggcactaaaggcatcgggtcagtctccattttagatgctcttttattgcattgtgatatttagttatggaagaactgactatgtttgtgtgtgtgtgcgtgtcatgaacagggaagctgttgtggaggaactgtcaattttgggagcaagagtccacacatgtgctagagacgagactcagcttcaagaacgtttacgtgaatggcaagaaaaagggtttcaggtcaccacttctatctgcgacgtttctttgcgtgagcaacgagagaaactcatggaaaccgtttcctctctcttccaaggaaaactcaacatcctcgtaagtgtatacatattagcttctcctccccgggcttgggatttacaagaaccaaaccatgttgtgtttttaattactttttttttttttgtaaagatgtttttagttgttggtctatacatatcttatatataggtgaacaatgtgggaacgttaatgctcaagccgaccacagagtatacagcagaagaattctcgtttcttatggctacaaatctcgactcagctttccatatttcacagcttgcgcaccctttgttgaaagcctctggctcagggagcattgtgctcatgtcctctattgccggagtcgtgcatgtcggtgttggatccatctatggagcaacaaaaggtactgtatatactctttaaaacaatatttctttacattatgatttatatgcaagtgtatataaaagcattttttttcaggagccatgaatcagttggctagaaacttagcttgcgaatgggcaagcgacaacataaggactaacgctatttgtccatggttaatcacaactcctttgattagtgatgtaaggacaatttccttagaacaacggcgaaaaaaaaataaaaaataacttttgattctaactttttaacttatttgaaaatccctcagcttctcagtgttgaggagatgaaaaaagaagcagaggaaaggacacccatggggcgtgtgggagaggcaaatgaagtctcaccgcttgtggcatttctttgtcttcctgcagcttcttatattactggtcaagtcatttgtgttgatggaggtctcactgttaatggcttctcctatcagccacatgcttgagctaggtctgtgttgtgtgtattgtccaatgaaaacagtaaaccaaacaataacatcggaaaatgaatgatttgaatatttaggttaagccttaaaactaaattcattttggtatgttgacatattgtaaaacgtaatgaacaagaaaccttaacagaagatgtttcttttaagagtacacgagccttgcagaaacagaacacaagttgaactcaaatgagaagatgggcttcgacactcatcaacttacaatgctcagttgatcaagcacaaagacagaatcatgcaatgatgactcaaaaggacagatggcttcactgttgaagattttgactatatgtcattttttgcttgggacacttcgatattttagtcatgttttctaacatacgactacatagtttctcaacatgccacgtacaaacaagacaacaaactcattaattcatacttatctggattctgatccacatttactgtatacataatttgtggcatttctggtcactgctagtaacaagcaagaaaa

SEQ ID NO: 12022 - DNA, 3000 bp, Unknown
  misc_feature (1)..( 3000): cDNA_ID_3593631_gDNA_ID_2214528_Annot_ID_134211 3000 nt of promoter + ATG
tatggctacaaatctcgactcagctttccatatttcacagcttgcgcaccctttgttgaaagcctctggctcagggagcattgtgctcatgtcctctattgccggagtcgtgcatgtcggtgttggatccatctatggagcaacaaaaggtactgtatatactctttaaaacaatatttctttacattatgatttatatgcaagtgtatataaaagcattttttttcaggagccatgaatcagttggctagaaacttagcttgcgaatgggcaagcgacaacataaggactaacgctatttgtccatggttaatcacaactcctttgattagtgatgtaaggacaatttccttagaacaacggcgaaaaaaaaataaaaaataacttttgattctaactttttaacttatttgaaaatccctcagcttctcagtgttgaggagatgaaaaaagaagcagaggaaaggacacccatggggcgtgtgggagaggcaaatgaagtctcaccgcttgtggcatttctttgtcttcctgcagcttcttatattactggtcaagtcatttgtgttgatggaggtctcactgttaatggcttctcctatcagccacatgcttgagctaggtctgtgttgtgtgtattgtccaatgaaaacagtaaaccaaacaataacatcggaaaatgaatgatttgaatatttaggttaagccttaaaactaaattcattttggtatgttgacatattgtaaaacgtaatgaacaagaaaccttaacagaagatgtttcttttaagagtacacgagccttgcagaaacagaacacaagttgaactcaaatgagaagatgggcttcgacactcatcaacttacaatgctcagttgatcaagcacaaagacagaatcatgcaatgatgactcaaaaggacagatggcttcactgttgaagattttgactatatgtcattttttgcttgggacacttcgatattttagtcatgttttctaacatacgactacatagtttctcaacatgccacgtacaaacaagacaacaaactcattaattcatacttatctggattctgatccacatttactgtatacataatttgtggcatttctggtcactgctagtaacaagcaagaaaaatggataaaagatggagtctacaaggaatgactgctcttgtaaccggtgcagccagcggtatcgggtttgtttttttctgttctctatatcatcttttgaatcattgttctgcttatgtttcaaggaatttaatctatgtctgtggaatgttttagttatgccatagtagaggagttagctggttttggagctagaatccatgtatgcgacatatccgaaactctgcttaatcaaagcttaagagaatgggaaaagaaagggtttcaagtgagtggttcagtctgtgatgtaacctctcgtcccgagagagaaaaactgatgcaaaccgtctcttcgcttttcgatggcaaactaaacattcttgtaagtaaatgatctttatatagaaacaactaagcatttcttttagcaaaattttctaaagagaaatcttctttttgttcaacataggtaaacaatgtgggcgtacttcgcgcaaagccaacaacagaatatgtggcagacgatttcacttttcatatctcaacaaacttggaagctgcttaccatttttgccaactttcacatcctctcttaaagacttcaggctatggaagcatcgtgttcctttcctctgtttctggggttgtgtcaataactgactgtggatcactttatggtctaacaaaaggtaaccacaattactacaaatctgactaatcaacaaagagtttttcacttccttattttttagtggtttgttgacttcttttgtaggagctctaaatcagctagctagaaatttggcatgtgaatgggcaaaagacggcataagagccaatgcggttgcacctaatgttgtcaagactgctcagtctcaattcgtaagaaataaattttaattttttttttacgttttggtgttgttgttgtgaatttaacaacctcaattcctcttattatctctaaatttttgtttcttaaaagtttcttcaagacgtcagtaaaaaggagggattgtttagtagaactccacttggtcggtctggagagccgaatgaagtagcatcactagtggtcttcttgtgtcttcctgcagcttcttatatcacaggtcaaaccatttgtattgatggaggcctcacggtttacggtttctcctctcaaccacaggcttgaaaatggtcttgtcgtttcttgtctgtttaaatattctctccctaataaaatctctcatcacgctatgagtttatgtcccttgtacaaaaacacacaatgtcaaattgttgctctttagtcttgtaagagaaatgagggacttatctatatgaaggatcaattaaactagtactattttatttgtttggttaaactatccttctctaattattgcaacttatgtgtctatatatggattaatgtcataagtactagatggaatcaaagataacactaaatagcgttagtcatagaatcatactcacaagaatgagtcctctaagttcaatggaccactccgaagtccatcatgagaacaagaccaatcaataaaaatgtccttttgttatctaaattagcaagtgtaccaaattttgttcaccattctaacttataatttcagttttcttttgtgagtgaagttattgaaaaagaaaaataagaaagtattggtcaaagattttgacaacaacaagttattttcttgaggaaccaccaacttagatattttagtcatgttctctgttataagtcctactgctactacataatgtttccaccacacataaaaaacaaactcaataattcacacttatctgatccacattcattgtatataatcttatggcatttctggtcatttagtctcaagcaaa

SEQ ID NO: 12023 - DNA, 3000 bp, Unknown; identical to SEQ ID NO: 12014
  misc_feature (1)..( 3000): cDNA_ID_2711424_gDNA_ID_2214528_Annot_ID_184821 3000 nt of promoter + ATG

SEQ ID NO: 12024 - DNA, 3000 bp, Unknown
  misc_feature (1)..( 3000): cDNA_ID_2708150_gDNA_ID_2214528_Annot_ID_134212 3000 nt of promoter + ATG
gtttcttcaagacgtcagtaaaaaggagggattgtttagtagaactccacttggtcggtctggagagccgaatgaagtagcatcactagtggtcttcttgtgtcttcctgcagcttcttatatcacaggtcaaaccatttgtattgatggaggcctcacggtttacggtttctcctctcaaccacaggcttgaaaatggtcttgtcgtttcttgtctgtttaaatattctctccctaataaaatctctcatcacgctatgagtttatgtcccttgtacaaaaacacacaatgtcaaattgttgctctttagtcttgtaagagaaatgagggacttatctatatgaaggatcaattaaactagtactattttatttgtttggttaaactatccttctctaattattgcaacttatgtgtctatatatggattaatgtcataagtactagatggaatcaaagataacactaaatagcgttagtcatagaatcatactcacaagaatgagtcctctaagttcaatggaccactccgaagtccatcatgagaacaagaccaatcaataaaaatgtccttttgttatctaaattagcaagtgtaccaaattttgttcaccattctaacttataatttcagttttcttttgtgagtgaagttattgaaaaagaaaaataagaaagtattggtcaaagattttgacaacaacaagttattttcttgaggaaccaccaacttagatattttagtcatgttctctgttataagtcctactgctactacataatgtttccaccacacataaaaaacaaactcaataattcacacttatctgatccacattcattgtatataatcttatggcatttctggtcatttagtctcaagcaaaatggataagagatggagtctacaaggtatgactgctcttgtaaccggtgcagccagtggaatcgggttcgtcttaattctctgttctctatatcatgtttttggctcattgttcttcttgtatttctaaattgtcaagacttaaaggaatttttgtgtagtgtaggtatgccatagtagaggagttagcaagttttggagctataatccatatatgtgacatctctgaaactcttctcagtcaaagtttaagtgaatgggaaaagaaagggtttcaagtgagtggttcaatctgtgatgtagcttctcggcccgatagagaaaaactgatgcaaaccgtctcctcgctgtttgatggcaaactcaacattcttgtaagtaaatgatcttataggaaaaggcgaaaagccaagcatagttgtttaaagagagcttcttaacataaatcttatggaaatgcctaatcatatgtaggtaaacaatgttggtgtaatacgtggaaagccaacaacagaatatgtggcagaggatttctcttaccacatctcaacaaatttggaaccagctttccattttagccagctttcacatcttcttttaaaggcttcaggatttggaagcatcgtctttatgtcctctgctacaggggttgtatcagttcaatgtggatccatttatagtctaactaaaggtaaccaaagttgctactagaggtagttcattgcaagactgactaatcaaatatgttttttttttaaattgcttttttctgttgatttattttacaggagctttgaaccagttaactagaaatttagcatgtgaatgggcaaaagacggcataagagccaatgctgttgcacctaatgttgtcaagactcctttgtctcaatctgtaatataaaaaaagtcaacatttacattttagtttttattttttatgtgaatgtaacaatctcaattatattcctctaattaattctcaattgtgtgttcttgaagtatctcgaggacgtcggtttcaaggaggcattgttcagtagaactccacttggtcgcgctggagagccgaatgaagttgcatcactagtggtcttcttgtgtctaccagcagcttcttatattactggtcaaaccatttgtattgatggtggtttcactgttaatgccttctcttataagccacaggcttgataatggccttgttgtgttttgtctaaatgtcttatgcaaaactatgctcaatcaacttttgtgggattggattttaattgtggttcggtatgtggttcatatctttgtcacgagagagaaacacatgcaaatcgcctaaattatatgtgtggcaagctcaacattcttttatgtaaatcataatttaaagaaactaagcatacaatgggttaagctggctttaagtatttgaacaagaagatgtttctgataacaaagagtaagccaaaagcagatcacaacatgctttaaaatccctatgaaataattggagaaatgtcacaaaccatctttatatatataattcaaaggtgaacgcaaaagcttgatagttctttcctttattgtctgtttcactaaagatatcattacaaattaagtcaagatccatcatctcttacatcactatttgtcacacgaaaagtatgagagaaacattttcctatttgcttgccattataataagcttcatatagggaaggaagcaaggaaaaaatgagataaagagaaaagaatgagtattgggggaagtagtatagtagtagagagtcgtagaagagttatcttctaaggtcattagtgatgaagagttcatagttagtttactttgttcaaggtggataagcaatagggtttaggcctttgttattatcagacttctacttttggaagacactaaaaagttgttatctagccataagaaagttttggccaaaggttttgactacaaaatgtcatttttgccggggccactaacttagatatttttgtaatgttctctcttacggctacataatatttccaccacacatacaaaaacatactccacacttatctgatccatattcattgtatatatagtttgtggcatttctggtat

SEQ ID NO: 12025 - DNA, 3000 bp, Unknown
  misc_feature (1)..( 3000): cDNA_ID_2708166_gDNA_ID_2214528_Annot_ID_134213 3000 nt of promoter + ATG
ttcaaaggtgaacgcaaaagcttgatagttctttcctttattgtctgtttcactaaagatatcattacaaattaagtcaagatccatcatctcttacatcactatttgtcacacgaaaagtatgagagaaacattttcctatttgcttgccattataataagcttcatatagggaaggaagcaaggaaaaaatgagataaagagaaaagaatgagtattgggggaagtagtatagtagtagagagtcgtagaagagttatcttctaaggtcattagtgatgaagagttcatagttagtttactttgttcaaggtggataagcaatagggtttaggcctttgttattatcagacttctacttttggaagacactaaaaagttgttatctagccataagaaagttttggccaaaggttttgactacaaaatgtcatttttgccggggccactaacttagatatttttgtaatgttctctcttacggctacataatatttccaccacacatacaaaaacatactccacacttatctgatccatattcattgtatatatagtttgtggcatttctggtatatggtcactagaaaaatggacaaaagattatggagtcttcaaggtatgactgctcttgtgaccggtgcagccagcggaatcgggttcgtagttcttctctattctcttaagtttatgttctgcttcgatataacaacctgaatggtcaagattacatggaattcatatttgtggaatgttttagttatgccatagtagaagagttagctggttttggagctaaaatccacatatgtgacatatccaaaactttgctcaatcaaagtttaagcgaatgggaaaataaagggtttcaagtgagtggttcagtatgtgatgtaacctctcatcctgagagagaaaaactgatgcaaaccgtctcctcgattttcgatggcaaactcaacattcttgtaagtgaatgatctttatatagaaacaactaagcaaactctacaaaacaaaaagataacttaagagagaatttttgttcaacataggtaaataacgtgggggtacttcgcggaaagccaacaacagaatatgtggcagacgatttcacttttcatatatcaactaacttggaagctgcttaccatttttgtcaactttcacatcctctcttaaaggcttcaggctatggaagcattgtattcctttcctctgttgctggggttgtatcactaattgactgtggatccatttatggtctaacaaaaggtaaattactccaaatctgactaatcaacaaagagttttttaccaaaaaaaacaaaacaaagagttttctgcttccttattttgtagtgttttgttgacttcttttataggagctctaaatcaattagctagaaacttggcatgtgaatgggcaaaagacggcataagagccaatgctgttgcacctaatgttgtcaagactgctcagtctcaatcggtaaaataaaaataacttttacatctttttatttttgtggatttaacgacatcaatttctctaattatctctcaatttttgtgttaaaagtttcttgaagacgtcagtaaaaaggagggattgttgagtagaactccacttggccgtgttggagagccgaatgaagtttcatcactagtggtcttcttgtgtctacctgcagcttcttatatcacaggtcaaaccatttgtgttgatggaggtctcacggttaacggtttctcctatcaaccacatgcttgagaaatagtcttgtcgctctcaaagttctatatctaataaaagttctcattctatgagtttataaacgtaaacatcaatgagtttgcaattccatattggagatactaatctcgcacatatacaagattcggttacacccgctacgccaacaactcacaccaatgtgatctctcattctctctcataaatgaaatgttatactattttttgagaattgtagcattgataggatagattacagtctatatgtctctgattttaaatgttaattgtaacacaagatgattatattgtacatatttttgttgttgttgttccgtctattttgctgattatacttgtttattgttgttcttccgtgtctgtcgtgttttatctgtttgtcttaaactttgtattttatatcttgtgatttttgatactacacgacaaaaatgaccttgtcgtgttttatcttgtgaattattttattctttcgctattagattaatccattttgtgaataatttgcgagcaaggccctcacacacataattataccttttgagtcttgaatcaaaaggctgtcaaaaaaaaaaaaaaaaaaaaaaaatcttgaatcaagttgatagatacatatgggcttgcgtgatcttgagtcttgaattcataataggcgaatttgaatcttgaacgactaatcgataacaaacaaacaaaaaaatattatataattggttagagtagttaactctatcacgcttaatgagcattttatatttgtctttgaatgacaattcaagtaaatactttaatttcaaaattgatggatcgttttttcattgtacttttcttcgaataatattagagataatcttccacacttaaaatagattaatctcattgtctctcatcctacataagcttcttactttaatttgtctacatccctcttgtctcaattaagtattattattaacgcttcaaattcttactacctaaacacgtgaacagtagtctttcagtagtcttttaatttgcgagtgaagttaatgaaaaaaatacaaaatggtaagttttggtcaagattttgactattaaaattaatatttgctcttgaccactaagtatatttttgtcatctctttattatggctaaaaattgacacttatctaatactcattcattggatatatatatataatgtgtagcatttctggtcagtgaaaattgacatacaaggact

SEQ ID NO: 12026 - DNA, 3000 bp, Unknown
  misc_feature (1)..( 3000): cDNA_ID_2708169_gDNA_ID_2214528_Annot_ID_134214 3000 nt of promoter + ATG
ttatatttgtctttgaatgacaattcaagtaaatactttaatttcaaaattgatggatcgttttttcattgtacttttcttcgaataatattagagataatcttccacacttaaaatagattaatctcattgtctctcatcctacataagcttcttactttaatttgtctacatccctcttgtctcaattaagtattattattaacgcttcaaattcttactacctaaacacgtgaacagtagtctttcagtagtcttttaatttgcgagtgaagttaatgaaaaaaatacaaaatggtaagttttggtcaagattttgactattaaaattaatatttgctcttgaccactaagtatatttttgtcatctctttattatggctaaaaattgacacttatctaatactcattcattggatatatatatataatgtgtagcatttctggtcagtgaaaattgacatacaaggactatggataaaaggtggagtctccaaggtttgactgctcttgtgaccggtggagccagcggaatcgggttcgtctagattctcactatatcaactcttttacccattgttctgtttctaaaattcattctaaattgttaaagttttaaggagttttattatgtttatcgaatgtttagtcatgctatagtagaagaactcgccggttttggggccaaaatccatgtgtgtgacatatcgaaaactctgctcaatcaaagtttatccgaatgggagaagaaagggtttcaagtgagtggttcagtctgcgatgcatccaatcgtctcgaaagagaaacacttatgcaaactgtcaccacaatatttgatggcaagcttaacattcttgtaagttaatcttaatttaaagaaactaagcatatctttaagctatttagaaatgacatgaatatatactcttttctgttcaatataggtgaacaatgttggcacaattcgcacaaagccaacaatagaatatgaggcagaagatttttcgttccttatttcaacaaacttggaatctgcttatcatctaagccaactttcacatccactcctaaaggcttcaggcaacggaattattacttttatttcctctgctgcagggatcgtatcatttgatgctgcatccatttatggtctaacgaaaggtaaccatagtgaaaagtttaatactagaggaagttcattgcaagaatgaccaaatagtattgtggatttatatatgtttcattatgtatattatatatttgattaggataattttcaatcccatttaataatttcaaatgatatttgagaagaattgttttttttttttttttgtgcgtgaaatcttattttagtgtgctatgctaacatttttggtttcagaaatatataattcagaaggtcaaatatagggcattcatattcaataacatacaaaaacaaaactaatttataactatgcatgttatttatggataataaatctttttatttttatttagatggttcataaatatcgcattatgtctccgaaagctgattctaacggctaattgattgccctagtatcattcgtttctatttctaaattggtctatctttctttgggaatcctaatagatgtctctcatagtcatagtattattttttcttgtttgtgtatatgttcaggagctttgaatcagctagcacgaaatttggcgtgtgaatgggcaaaagacggcattcgagccaacgcggttgcgcctaattttatcaccactgctctggctaaacctgtaaccaatacaccctctcttttttttcttttttttccttttaaaattaacatcatcacccactcttattcttgttttttacaatcttgtaaacattcagtttctcgaagacgctggttttaacgagattttgtcgagtagaactccacttggtcgcgctggagaaccaagagaggttgcctcacttgtggcttttctgtgtctacctgctgcttcatatattactggtcagaccatttgtgttgatggaggtctcactgttaatggcttctcatatcagccataggcttgagccatgtcttgtcttgtcttgtgtgttgtggagtatggtcatatggtcagtatctccataatctaaatccatagatatgtgagttgtggagtagacacaatttttcaataatggaatatctatttaccagttccgtattatgcatgcattctccatgacaacgcttctcataacgaatataattacgtggatcataatactatgaggattgatatcattgagatggagtagacacagttattttcttcttcccttgccattagcaatttcaattgtatctatgcttgaaatacttaaatggcatttacttcttaactaaaaagcgaaaggagggaaagaacaagtcattacaagatactataataattagaaattaaaagagtataattacatcttcccaaatgtgtcaaatattcagcaaaaactctgtcaatagaaatgaacaaacggtattttaaagtaatacaatgggtaaactttagatattttgtaaaaacctaattagaaaaaaaatttggaaatcttagttgaagataactacccaaattatgaaaaaaaaaacatttgccttcttgttacctaactaacacgttgaatgttttacaaaaattttgttcaccagtctaactgacttgtcgtttcagttgtcatcttttgaatgaaattaatggaaaagaaagaaacaaaaatgagtaagtttagatcaagattttgactattaaaagtcatatttgctcttgaccactgacttgtatattttgtcatgttatttattatggctaatatatccaccacacatacaaacatactcattaattgacccttatcttttatttttatggtaagaaaattgacacttatctaatactcactaggtgtgtatatataatgtagcatttctggtcattgaaagtaacttacaagcaaa

SEQ ID NO: 12027 - DNA, 3000 bp, Unknown
  misc_feature (1)..( 3000): cDNA_ID_1030432_gDNA_ID_2214528_Annot_ID_134215 3000 nt of promoter + ATG
ttcttttctttttttatgtgaatgtaacaacgattttatgtgaattaatctaaccctctcttaattgtgtttctgcaagtatcttgaggacgtcagtttcaagaaggcattgttgagtaggactccacttggtcgtgttggagagccaaatgaagttgcatcactagtggccttcttgtgtctacctgcagcttcttatattactggtcagactatttgtgttgatggaggtctcaccgttaatggcttctcctatcagccagaggtttgagtatggtcatgtctcgttctttttgtttgtctagaattttcagtgttctctcaaataaaatatttcaaactatgagtatatgaataaaaaaataaatatatcataattacattatggatatacttacaatgtatctctcatacatgaaaatgttctattccatcttgtgtttactactaacttactaagtgaaaagaagactctgtttttatgctctgttttgttgtaaaccggtagacttagaaaagttgggacctcatagttgaacccaaaataacaaaagtgaatttcaaaactagcatatatataatagagactcaaaataaagcaatcacagagagataaacccaaaattcaatggatggcaacgagaaaaccttttgtgaccaactacatgatacattgatataccattttatgacatactattaattaataaatgctgtggtgtgcccataccggattcatataaatgtttatacgactgcatagcatttccactacagtttaaactctaccacccaaataccaatttttttttttttttgacattggtttcaaggaggcattgttgagtagaacttcacttcgtcgcgttggagagccgaatgaagtttcatcactagtggtcttcttgtgtctccctgcagcttcatatattactggtcaaatggtcaaaccatttgtattgatggaggtctaactgttaatggcttcacctatcagccacaggcttgagaatggtcatgtcgcgttctgtttgtttgtcatgaattctcagtgttctcttaaatcaaatctctcacactatgagtatatgaacaaaatcatatacaatatcacaattccattatggatattctcccaatctatctctcatacatgaaaatgttctatttcgatcttgtatttaaataatgttaatactctgttttaatttgtgtatcctgatttttttttctttttgaagttcaacaaatatatcaaaataactcagaaccattactattttttcttagttcatcaattctttactacacatagaaacgtatttatcttgtttgatctactttgactctatatatgtcatgtggcatctctggtcattgctagtcacaggtaaaagtaaaaattgatcaaagataaagagtctttcatggtaaaaattctcttgtaactggtggagatagtagatgtcaattcgtttgcaataacttacatttgcaataacatgtcagccatatttatttaaatttccatgcatttgatattattttctctctaatacatatatgatgtgttacggtcattctaaaaatccagttgacagcataatgaagctggtacaccatacatgcacttgattatatatggatgttactgccatgattgatgttttgatggaattagtgttaaaggatggaccctcactaacgcggttggaaattatgatcaaactcttcaatgtcacttatcaagagagctaatgactagcacgtttagttgttctgttgtttcttatggctgcttaatgtctccatcaaatatttagacattgtggctagtaaaatgccatctaccttaatcctatatataagtataactagataataatccatatttttgctgggtttagtagctgatacgacgtttatggttgttattgagtttgaatacaaaatatagagtattgttggagttatattgatttttgttcatattagttaacaaataataaaaaaattaagaaaggtttttgaaaatgcatcttctagaatatatgtatattcgaaaaagtcacatctttaattgacatatgttttgtttgtttgttttttttactggccacacaaattgacaacaatggtcatgcatgaaatgaaatgtttgttgtcaattttttttactaacttgtaatatcattatgaaatgaaatagaaggtatatattacaaaatattacctaaaagtagagcaatcttagaaaaaaaaaaaaaaaaaaaaaaaaaagaaaaagaaaaagaaacaagattacaatgcatttaaaaagagatggaaagaatccgagctatcgaatccaaagaagcatcagcttcctccatctgttcttgtatcgtctaccagagatggtgttccggatctctcgatcaatattcttaaagatggttgttggagggatcctttggctattatggagaacattattcgtttatctccagatgtgatagacaaagggctgtgtggcctgtgagaccgatggccacttaattattggttttttgtcaatggttgtgtatgcatagaaattcccacaaccgtttgtggcttaacacaatttaccaggggtttaagtggttaaattgatacatgtagatctaaagttttatgctaatataaattagttttaattatataaattttaactacgctcatgacacgtaaatggtagaccaatatgtggtgctctattaactaaggggtcttcattattaattcataaagactttctttactatacaagacttgtcaaaaggaaaagtagtattttcgtactacgtctacccctctcacggatatgtgtggtcgagcagtcattatcataatgtggaattttgaattgagcgaggtttcaaagttcaaaactatcacaactagtcttgatcaattctatataagatctgtgatcttggttgaagaaaagaatcgtcgtaggttgatatttaacaagga

SEQ ID NO: 12028 - DNA, 3000 bp, Unknown
  misc_feature (1)..( 3000): cDNA_ID_4257514_gDNA_ID_2214528_Annot_ID_134216 3000 nt of promoter + ATG
attttcgtactacgtctacccctctcacggatatgtgtggtcgagcagtcattatcataatgtggaattttgaattgagcgaggtttcaaagttcaaaactatcacaactagtcttgatcaattctatataagatctgtgatcttggttgaagaaaagaatcgtcgtaggttgatatttaacaaggaatggcaaaggaagggggcttgggagagaactcaagatggagtcttggaggcatgaccgctcttgtcactggtggctctaaaggcatcgggtcagtccccattgtgaatcttgactcccattttctatgctcttttattgtattgtcatgtttagttatggaagaactaactctgtttgtgtgtgtcatgaatagggaagctgtggtggaggaactagccatgttgggagcaaaagtccacacgtgtgccagagacgaaactcagcttcaagaacgcttacgtgaatggcaagcaaaagggtttcaggtcaccacttctgtctgcgacgtctcttctcgtgaccaacgagtgaaactcatggaaactgtttcctctctctaccaaggaaaactcaacatcctcgtaagtatacatatataagcttcgtcctcctcggtattgggatccacaagaacccaattatgttgtgttttttgttgtggatctatacatatgtaggtcaacaatgtgggaacgtcaatattcaagccgaccacagagtatacagcagaagatttctcttttgtaatggctacaaatctcgagtcagctttccatctctcacagcttgcccacccattgttaaaagcctctggctcagggagcatcgtgctcatatcctctgctgctggagtcgtgcatgtcaatgttggatccatctatggagcaaccaaaggtaccgtatataagtacatccttaacacaatatgttcccatgggttatgatgcttacacatatattaactcgttttaggagccatgaatcagctggctagaaacttagcttgcgaatgggcgagcgacaacataaggacgaactctgtttgtccttggtatatcacaactcctttaagtaacgatgtaaggccaaagtttatatttctccttcgtactatgaaaaacaaaaaaaatacgtaaatatgacttcgggctttaatttatgtgtgaaaatctcttagtttttcgatgaagagtttaagaaagaagcggtgcgtacgacaccaatggggcgtgttggagaagcaaatgaagtctcaccgcttgtggcatttctttgtcttccttcagcttcttatattactggtcagaccatttgcgttgacggcggtgccactgttaacggtttttccttcaagactatgccataaaacacatatgcatgtgtttggatcatattttcaataatttaaacttacgggttatatacatcgtcaatatgtaataaatgtaatttagatgtgtccacatgttctgtttctaagagattcttagatatttatgcttgcgtggtgaacaagagttcactctccggatggaccgcatccataatctatgaatttgggaattatattaccaatttgacggcagactagttggccaaacttaactcttggttctttccggttatatatgtttgcagtgtctaatatttctcaataaaactttcaaagatgacgacaaaaagtgtctttctatgattctctccacatgcgtataatactattcgtcacacatcgtgacttaaaaacttgtcgactagtatataagtgtatggaaattctccacttttgaactaacttttcgtgtgagttaggcccacacttagttaattcaagacttacctcttccttccatgcctttggttagcaccggtgggttgtgttattggcatgcttggttgggacacataatggatattttcagttttctaaactaacatcaagcgcaaactggtataattctagggcttcagtcaagagtaatccttccatttcttatgagatagttgtaaaggtttcatcaaacgaaacttgtttcacacccaagaaatgaaaccaaaattaattacatgagacgaaacaaaaataaatccagaataaactactattatgaataacttttttgattatttaaacagatctgtttgattgaatccaaacctgttatgttatttatttttgtttttatgaataccaaaaagttttggctcagagcccgaatatcctcggcccgaaaccattatgtaatattacttactagattttcattaactttaaaaagattcatcataatatatagctaaaccccttttgttttaaattggaagacgcatcataagttacgtcattaactcatcatgatcactttcccaattaaatatgttaacctaaactaattcagtcttatcattactttgagatctctaatttgtctcagccacaaagtcattaattacgatatatatcattccacaacttctttgaagattctcttaacctcgtatcatttattctaacccattttcccattatcatttgtcatcaaactagaagtcaagaacagaaacatccagaacaatggctaaagtagaacagagcagatggattcttcaaggcatgaccgctcttgtcaccggcggaacgaaagacattgggtttgtcttccatcatcactttccaagtcatctttcttgcgttccaagcaaccaaagaaaataaacccaactttgcttacacatttatattcttgatgaatctctcacctatgcaactaaaattcaggaaacctacattgctctcaaacaatgaacatgtctcgatctcatgtagttgggcctaacccttaatcgaggcccatttgtttgattaacctaacaaatacatgaaaaggcctttcttacactgtcattatcattcattcattatggatttttctctaccagacattcagatctccaagaaaagatctttgggttctgtggttcataatcagaa

SEQ ID NO: 12029 - DNA, 3000 bp, Unknown
  misc_feature (1)..( 3000): cDNA_ID_2711408_gDNA_ID_2214528_Annot_ID_134219 3000 nt of promoter + ATG
tgaaattcgtcagctttgtgctgtctccaaagaaatatttcttcaacagcccaatctgcttgaattggaagctcccatcaagatctgcggtcagatttttgttccctttagtttagaaagagtgcttttttggattggggttttagttttgattgatttttagaagcgaatttagtgcatgtttagataaagtatcaagctttgttcagtagtaatgagttgaattcttaaagctatgtacatatctaagtgactgaagaaaaaatgtgagattttgattgtcttttgagttcagaacaatgaaatcaagctaatgggtagtataaagtttgaatttttattactaaaagtcttagataggcttaggagttttgactggttctatgaggtttgattcattttatcttaatgttgactagtcaagttatgtgttttgattgggtctgataaaacatttcctgcaaaagtttaacgttgactagtagtatctgatatgccatgttttcttagatgtaatggttatattttgtcttttactttataggtgatattcatgggcagtattcagatctattgaggctttttgagtatggagggttccctcccgaagctaattatttgttcttgggtgattatgttgaccgtggcaagcaaagcttggaaacaatatgtcttcttctagcttacaaaatcaagtaccctgagaacttcttcttgttgagagggaatcatgaatctgcttccattaatcgtatttacggtttctatgatgagtgcaaacgcaggttcaatgtcagactctggaaaatattcaccgattgctttaactgtcttcctgtggccgccttaattgatgacagaatactatgtatgcatggtgggatttccccagagctgaaaagtttggaccagattagaaatattgcacggccgatggatattccggagtctggtttggtatgtgatttactatggtcggatcctagtggagacgtaggctggggcatgaatgatcgtggtgtttcatacacttttggagctgacaaagtcgcagagttcttggagaaacatgacatggaccttatctgtcgtgcccaccaggttttaacttgagttatatctgccatttagtttattatgaaaactgtgcaaccttaatttgagtgtattggctctgtttataggttgttgaagatgggtatgagttctttgcagaaagacaacttgttacagtattttcagctcccaactattgcggggaatttgacaacgctggcgcaatgatgagcattgatgagagcttaatgtgctcattccagattctaaagccgtcagaaaagaagtcgccttttctgtgacaccgattatccagtgaccaccattgcttcaaattaacaattctacaaaaggtaaaaacttttttatgctatggtagcaccacatttgtgtaaccctgattcaacattctctgcttcatgtttagcttgttcaccgtatctagcttttactctgagtggtacatacatatcagcctcaggaaaatgaaatggaaaacatgtattcgttaagctagttataatgggtttttttgagttcctgtcacagagatgagttcaaaatcacacaatagttttcttctcttacatttctgtgtaattagctcatgttgcttataatttgtcatcaagaaacagtgttaatctttgaggtttggtcactgtatgctgaatgttcttatgtggctcagcttttgattatcattttgcattttgttaatttgctgcagttgtatactggcaagaggatctagagacggaaactgctcaattgggaccttaatggtactgataatagagcattagacatgtagctgttgacagtgatggcatcgagcagaaggaacaagtcaagtctgtactgtgattttagcatctctcacatctatgtttgtctaaaatgtgtgtgtgtttttagtcttctctctgaataatattagattctcatttgtactctctatttatttaggagaacccaaattcaaaactttttttagtctcttcaccaccataaagccataatcactacgtattgttcacttcaaaaatttaacatggggtgccaattgtcacatgtaaaactatatggtcctaaaattaaaaatatcaagtaattaaggataataatgaaacatgtgtgtgcacgtgtgatggagagaaacaaacaaatcagctttagaattcagattccttcttgtcacacagttttcgtttctctttctctttctctcacactctctgcctatctccgccgcggagatccatcgtgttttctacttctgttggtatccatggattctctcgttgaatccggttggaaggtacttcgtattcctctatctcgtcgcgttcctttgtatgcgattcctacgttttttttttttgttttgttttcagagattgaatcgtgttttttgtttctcggtctctggcgacttgagtgtactgcatttatgatacaagtgtaggtacgggattagtatctgccgtgttaggttgattttgtgtttgtcgtctgtggtccatcgtattgtattgttgtggtccctttatgttgagattgaattggtttcgtgtcgattgcgttgtggtttcagatctggatttgactgttctagttacagattattactgatttcgtatgtgatctctgtttgtgcttgtatttttttttggaatttgagtgggatttatgtattgttgttggagcttggactagcttagaggatctgtgattgtgatacgtgttgataagcaataggttttccttgaacgtcttcttaacttgcttttctgcgtgagtgactggatggatggtgtcaatgatatacaattgccttcagttttcgtggaattgaacaaattttatctccctttggcaatcatgtttagctctttagtttgacagttctagctgtgacactgacccttctttgtggcgatg

SEQ ID NO: 12030 - DNA, 3000 bp, Unknown
  misc_feature (1)..( 3000): cDNA_ID_1808479_gDNA_ID_2214528_Annot_ID_134220 3000 nt of promoter + ATG
aggagatcgtcggggtaaaggtggttccggtggagaagttcccggagatacatagatgggttaagaatttgttgggtaatgatgttatcaagaaatgtattcctcctgaagatgagcatcttaagtacattagagctcgtatggagaaactcaatatcaaatctgcttgataaggttttataaaaattctaatgctcacagtatgtctcttttgttcttgtctcagttgctatgttctgtcacttaatgtttgctatattgaaacacgaaaatttgaactttctttcttgttctacctaaagatgttcttaagcaaataatacagaagaaactctcttttgtgctactctgattcaacctgaacagttgcatgataaatcccataagacttcctacagaaatttctaacaccagtaatgatctctttaggactagctccaggctctggtaagatatgacaggacaatacgattctccctactgttatctcccatacatggagatcataaacaatcttaactccatcgattcgcttaagtcctctttcgagcttctctatgtccatatcacgcggtacgcgttccatcagtattccaaatatgttcttgagaattggtagagtagcagcaagagcaaaagcagagaaaacaagagtgcaaatcaaatcaaccaaaacccattttggttttacccaaatgatacctccaccaatcataacacctagtgactgaatcatatcagccattgcgtgaagataagctccttgtatgttaatgttcatctcctttgaagacgatttctcaccttttaaaggattcatttcctcctcctcctcttctgccaccacctccttgtgatgatgttgatgttgatgtttatgattatgatgatggtgatgatggtcgtggtggtggtggctatggttatgtcctaaccaaaggaccataaccaagttcatgaaaaacccgaaagccgaaatcccaaacatgatttctccattaacctctctgcttctgctaagtagtctttgaatggcttcatggattatcactccagagacaagccatatgagctgaacagacaagaacgccgctaaaacttcaagccgtttaaacccgaacgagtttcgcggattagcttcccagctcgagaccttgatcgccaacaaagagacacacaaacccgccacatccgacaacaaatgcgcagcatctgtcataaccgcaagactattcgccttaaaacctcccacaatctgtacggacataacgatgaggtaaagaaaaataaggctgcttagtcttctagtcgattcttcgcgttctttcgtctcggaaacgcaatgttcttgtctcgtaaacgcgcaagacagaggaaccacgcctaaattttcctctgttttcgatggtgatggtgactccatttcttcctcatcatcgggtttcaaaatgcagatttgctccaattccataagctgtttatacgttacacaaactttcattagagatctaaatcaacatttgatcctctttctttaagtatttttatgattaaaagattcaaataaacccattttgtgtttcttttaagacaagaaacaaacctgagaatcagatggagaggcaaaacgtatatgaattccagagctgtcctcttcagaaatcttgagttttatcttatggttagagatatgaagacatgaacacaggcaattaaggatgatccagcaaatatgggaggagatgttttatagatgtggaattttcttttttgtatgggaatctaaaataagtcgttgtggcttgtgacgggtgaagaagaataatcttttttctttaataaggagaatcaaggaaaaaagaaataaatataaagattttgttttggtgattttgtgtttcttttggtgtgtatgagatttgtatgattgtattaccatacaaaggtggcgtttgcgtttcaggtgaacaaaatggactgactattctttgttcaaaataaggattgattcaactaatgttctttgatctttagcatgttgtttttttcgtctttttgttttctttcattatagaaatcaattataaacatacatcaatattattttaaattaggttaggaccgttaggtgatgtaatttgtccatgttgatatagtttatttttttcttttgataaaaatgttgttgatatattaacttgttttatcaaactacatagttattagttagcacttagcatgtaattaagaatgtgaattggtgatttttaacaaaagaatggtatttgcatacacgcatatgcatgttaatttgacacatcaaccagatggtgattatattagattaggtattaccgatcaaacactaaatcttggttgttttgtagtttcatggtaacaaatagattgttgttttgtagtttttgatggcaacactaagttttcagtaactaatttgctaattcaaactttttggcgttttaatttattagtcgctaattaagaatttaagaattaagattgatctaatctaccacttaattacggaaaacgaatatcatactaacatagtaacatttgattgttataattggtcactgatcattaccgatgactgctaaacaaacaacaaaacatattgttgatcactatcccccatcattactactgaatagtgaatactatattactatcgccaatcgttattactgatcgcgtagagaggctagaagaactagttttctaccgtttggaaatttgtataaaggaatcttctagaaagatagcccatttacaggcccaataaaacgtgtacatacccattaggttgatttcactcaggtctcgtaaataaattaaataaataaaaaatgaaccaatcaatattgactaatctcagagcacacaccagtcttcgggtctctcctcctcgcggctcgaaacgcaagcttcacgcttgaaaatctccgttcgttttctacctcgtttagatcggagatg

SEQ ID NO: 12031 - DNA, 3000 bp, Unknown
  misc_feature (1)..( 3000): cDNA_ID_1023980_gDNA_ID_2214528_Annot_ID_134222 3000 nt of promoter + ATG
caaattttcacacctgtggtctgtagatatgatttaaatatactaaattatccaatttaattataattgtttatgcaaaaaatttgatcatccgctttctgcattagctcttcaacacattattgtgatttctgaagtagggagcatatggatatgtaattatgtaccaccaaaaaaaaaatgcgcgattgaaaaatgaatgacacatgtgacatgtgttggatcttctgataaaactccaacgctaaaatcaacaccaatgtgatttttttgacgtaaaaaggacaatgatcaaaagcgttaagatgtgattgtttatgtattttaggtcagtttttttttatattatattttactccgaattccttattgtgaagcatagaatgcttatagtttatcataacgagattcgaatacgagatcacaaatcttgttttaaaacatttgaaaattggagaaattagtggctcacacatgacggagaaagatgaaccgcatgcctcccattaccaacgtgtatggtatcaatgtcctaaagtgaaattattatattcaaatgtcataattgaacgtgattcatggcattggcatctatatttatttaaatatttaaaacctcattgcccagtggccggcaaaaaagttgataaatcgtcgtcgtttgcaaaaacgacatttaacccttgggctataaatagaaagtgagccaattcagaattctaaacaaccatctatctaagaagaagcagaaagaaagaagatctaactaatgggcaaaaatgaggaagtgaagcttttgggaatatgggcgagccctttcagccgtcggatcgagatggctctcaaactcaaaggtgtaccgtacgaatacttggaggaagatttggagaacaagagctctttgcttcttgctctaagccctattcacaagaagatccctgttcttgttcataatggtaaaaccattatcgagtcgcatgtgatcctcgaatacatcgatgagacttggaaacacaatcccattcttcctcaggatcccttccaaagatccaaggctcgagtcttagctaaacttgttgatgaaaaggtacattctcttatttagtttcgatttttatttttttaatcgtttagtacatggaagtagtcatttctaataatctcttatattttcttctctttttttttttttaatctgatcaaaccttaacatgtgttaaccagttttctacgagctcaatactttaaacagttgaagtcaacaactatatattaatcagattaacggattaatcaatgctactaatcatttttaatcctttactaaaccgttgttaattgtctctaatattctagatagtaaatgtgggatttgcctcactggccaaaacagagaaaggaagagaagttctgattgagcagacaagagaattgattatgtgtctcgaaaaagaactcgccggaaaagattacttcggcggcaagacagtcggattcttggactttgtcgccggaagtatgatcccgttttgtttggagagggcttgggaaggaatgggagtggagatgattacagagaaaaagtttccagaatataacaaatgggtgaagaagctgaaggaggttgagatcgttgttgattgtattcctctaagagagaaacatattgaacacatgaacaatatggcagagaaaattagatctgcttaattcagaagataatgcatctttcatagctttggttccatattttatttaatttactactgtaatgaaagataaatcaaggacaaaactttatgattcagaaaataattagaaaacaaatcctttgaaaaagggtaaaaaaatacgtagacaatatccagcagaatcaaattaacataatcctagatttggtccaacaaaccctagctaatccggcaatagaaggcgagttgcacctgattcgattataaaatcagcgttctttggatcggtcctaaacttcatctcatgagagccgttggtgcactggatctgaaacctaaagattttaatcccaaggtacgtctcgccaatgacgtcttctacacggctagtgaatttagtgcccttactcatgatattatcacaattgttgcattgaagtctcatcggaaggcttaagtcggcgttgcgtgctgccatagcttcagaacacaagaacacgcgagaaaaaagatatttgatctgtctttccctaagacctatatttataagaaacaatctcttcgtgatttcctttttttttggtccaataaattagggttttttctttttatattagttttgcatttataatttttatgaaaaaataagggaaaggtggaagaaaatattaaaactaatataaaagaaaaggaaaaagtctaatttgactacattcacgcttttggatataatttgactacacaaatcctaaacttaaaatatatatttatcagaatgattataaaatatcaatatttgttgatgtaaaaaccatcattacttaaaataaaaaatagaaaacaaaatatttgggggtgggagggtaaggcgaggaaacggttaaccgcagacactaatctagtttcaacagaaccacctacgaaccaaacccaacctcctggtctactttttggagacgagcctcttatgtagccatcgacgttttttcattatttttcgggggaaacgccggcctaagacccccagtaattaattcccatagttaacatgagagggttcagggtttagcaatcaataagcagactcatctcctaggttcccacaccccttaacttatttgaccaaacctttcttcatttaaacaactcaacttcaatctctatcttccgatgtgggacaaagtgctttcttactgaagcatttattgtaacttgttcgtcactggtgacgtcaccattctttcttataaataaatcataacctattaaccttagtccataaagaagaagaagctaacgaaaaataatg

SEQ ID NO: 12032 - DNA, 3000 bp, Unknown
  misc_feature (1)..( 3000): cDNA_ID_1833226_gDNA_ID_2214528_Annot_ID_134224 3000 nt of promoter + ATG
tagttaagaagacaattggtttacaaaaaaaagggttaagaagacaattgaattttcatttaaaagattacgtttttggacaaactttatcaaaaaaagtacaaatcagttataagaaaacttttagaaaaaattaaagaagaaagagaaataatttgtaatccagaagagctttatcagctttataagtttttctattgacagttgtggtatttttatggaaaaacattagtaacaaatttaataatttatatgatatttttacgtatttaaattataaataatactgctaagtttgtgctaaataaaaaatataaaaaatactgctaagtgtaaaagtttaagaatgagaatttgatttggcttcggatgttgaggtcacgcatgctaaatgcgtcatgcatgtggcgttatttttgagatcctcgtatacattgatgagacttggaaacacagtcccattcttcctcaggatcccttccaaagatccaaggttgagtcttagctaaacttgttgatgaacaagtacttcctcttatttagattcgatttttgtttttaatcgtttagtatatggaagtagtcattttaatttttttttgaaaactggttatgattttgataagggagttcaattcaattttaaatcaacaaaaaataaataaaaattgacttaatttgatcattaatctatttagcatgtgttaaccagatttccaaaagctcaataatgtttgttcttaagggtgttaaggaagccttgggacctcgaactgtgcagattactattgcaagagcaatttcaactgatattgtgaaagccattgaagtttcttgttcgcttctagtgcggttgcaaggactactcgtgtactctcatatgaaagtttcggtacatttttttcttcagaaaagaggttcaaaactttgaaggttggatataaagacctcaacgactacacctatcaaaacctttgagaaaggctatgtcaacaacattttttattgcgatgaactgataatcagcaatatcaatgaatcaagaaccggatcaaaatatttgtctccaatagtttttgttatgtggttgcaatggcaaggttgatcatcctttttcaagtcaacgttgatcatcctttttcaagtcaaggttgatcatcctttttcaaatcatctttggttctctctcgagattgttattttatcttgttccaattaaagttttgatagtgaatgttagtggcaaaattttattcaaatattttataattatttttttgtagcaaatcaattttaagttaaattcgatttaaaatgattttttcaacaaatttcattaaaaaaatttatagatacaatcgcaaagttgtataaaattttatttaaaaaagaaatttttgtagaattattcaaatatgaatgtttttcattaagatgtccattcaaaataatataagaatataataattttaagtacactcttaaaacgataaaaaaaaaaaaaacaattaaaacaggattttttttatttttcttgaaaattgatgtcacgcatgctaaagatgcatgcatatgggacatgactttacttttgagagccgaaaaaaatggtgaagagctggtattgttgggttccacatcgcggtttcacattacacaattggaaacagttgaatatcccttagaacttaaaacaacccaagttaaaaacaacaacccactaagtttatataaaagtaaatattcgtaagaaaaaaccacggaactacactaaaaagaaacattaatacaaaatttagttttttttttctgtcaagtactgtttatttatttctttttctatttcagtaccacattgacatacctacaaagtatgatactcgtttttttttgtcaaaacaaattacaatattcgattattaaattaaactaatttgtgggctggtcgtagagacatcttctatcttcttgcgaatatcatgataatcaaatcttgaaaacttaatttttgtatgtatgaggaataataaaacacgttgttttatggtttaaaaaaaaaaaagctaaaaaaaaaataaagaaaataaaacacgttgttttatggtcaaaaataccaccttgtcaccacaataaacaatgtgaacaaatttatgtcggtgcgcatcatttcttctgatttcttatgatttctttccattttttatgtgttacaaaattattgttttgaacaaattttcacacctgtggtctgtagatatgatttaaatatactaaattatccaatttaattataattgtttatgcaaaaaatttgatcatccgctttctgcattagctcttcaacacattattgtgatttctgaagtagggagcatatggatatgtaattatgtaccaccaaaaaaaaaatgcgcgattgaaaaatgaatgacacatgtgacatgtgttggatcttctgataaaactccaacgctaaaatcaacaccaatgtgatttttttgacgtaaaaaggacaatgatcaaaagcgttaagatgtgattgtttatgtattttaggtcagtttttttttatattatattttactccgaattccttattgtgaagcatagaatgcttatagtttatcataacgagattcgaatacgagatcacaaatcttgttttaaaacatttgaaaattggagaaattagtggctcacacatgacggagaaagatgaaccgcatgcctcccattaccaacgtgtatggtatcaatgtcctaaagtgaaattattatattcaaatgtcataattgaacgtgattcatggcattggcatctatatttatttaaatatttaaaacctcattgcccagtggccggcaaaaaagttgataaatcgtcgtcgtttgcaaaaacgacatttaacccttgggctataaatagaaagtgagccaattcagaattctaaacaaccatctatctaagaagaagcagaaagaaagaagatctaactaatg

SEQ ID NO: 12033 - DNA, 3000 bp, Unknown
  misc_feature (1)..( 3000): cDNA_ID_1009988_gDNA_ID_2214528_Annot_ID_134225 3000 nt of promoter + ATG
gagtgtgatacatgtatccacagtggtagtataatttagtttgtacgagtatctagttctatctaattattgatatatgatcatattttctcataacatatttttgttctgtaatttagatgataaattgataaccaatttgtattattacgaagaaaaagaaaacagtttgaactattcattaaaaaaagttattgtttaaaaggtattttattagattaaaatattaaattaattgtaattcacttttggaccacgcatttagcatcacacgtataactttaacaaatcaggtaaaaccaaatttctttaattaggtaaagaaacagaagactgaaagaaaaactagtttggaaacaaaaaatggtatttgcaggaattgtaaggaatttgggatactagaaatgtatggatctaagttagaaaaaatcaacaaaaatttgttgaatattatttataaagttggtatgtttgaggaaattgaaaaagataaaatatatttgaatatatggagagatgatataatgtgttcacggttcattggatatttagcagtgaatgaatcaagagaaagcaaaatagttattttcttctttcccgtcgttttagtatacttttcaagcacgagaacggaatcacaaaaactagtcaaaaaaggcgttaaatcctatagaacaaaaacatataagctatggtttcgaacgggaaccaaaccataatatgcgatgcacttctaatagcaatcaaaaatttgttaatatgtacatatatatttttgttttattaaaaccgtatcatactttatctgcagttaaaccgcacatctttattcggagcctatatatctacactgcctatatatcaaccgaccaaacattcacgaaaacaaaccacataaactagtcaaagaagaatagatgagttacattataaaaaagttcaagtgagagaaagagaggtccaatggcggagaaagaagaggatgtgaagcttctaggtttttgggcaagcccttttactcgtagagttgagatggctttcaagctcaaaggcgtgccttacgagtacttggagcaagatatagtgaacaagagccctttgcttctccagataaatccggtttacaagaaggttccggttcttgtctacaaagggaaaatattatccgagtcacatgtgatcctcgaatacatcgaccaaatatggaagaacaatccaattcttcctcaagatccttacgagaaagccatggctttattctgggccaagttcgttgatgaacaggtaactttatcaactaattgcataggtgatttctaaaatatgactaacacctagaaccaccgatgactgtatgtaatttcattacattttgaatagtaaaatcaagattctgattctgatcgattggtaagctaggaaaggcagaattctaaaatgattctggttccataagaatgtctatgcaaaacaaaaattaattgcggttaattttctgctgaaatggttactatcttgtaggttggaccagtagcttttatgtctgtggcaaaagcagagaagggagtagaggttgcaatcaaggaggctcaagaactctttatgtttcttgagaaggaagtcactggaaaagatttcttcggtggcaaaacaattggatttttggacttggtcgcaggaagtatgatcccgttttgtcttgctcgaggttgggaaggtatgggaattgatatgattccagaggaaaagtttccagagctaaacagatggatcaaaaatttgaaagaaattgagatcgtgagagaatgtattcctcctagagaggaacaaattgagcatatgaagaaagttgtagaaagaatcaaatcagcctaagagacaacaatgatactcttcgatcagtagatgttaactatatgtttgtgtaatcttgttataatagtttgtatgaacaataaatgaaacatttgtatgaacaattagtgtttttactaaattctaatgtcaattaattattataaacattttaaatgtagtagtattcaatttcttacaaatcataagaaattggttcataaacctggagttttcatatgaaagaaaagtagataaaagctataatttagtcaaaccatccttcttaataaaaccacaactatgattaaatgtgaacatgtatttcgacacgtaagaagttgtgtaaacagaggaaagtacaacggacatgtgggtctatttgttgcggcacaatataacaaatttctttagtatatttttagtatcgtgaggtggtgagtcttgtaaccatagaaaattcaccgatactttataacattgttggaaggaaaattcagcaaacaagttcgtagatggagaaacggaaaaaccaacgcctattataacaacaacatttttaatatatgccaaaaggaacatcaaataacagattagtactaattctttttttatagctcagactatagagttgtttgttttcttgggcgtcaatataacaaacgagaatgacaaatggttttaaagctgttgatgtttcatacacagacaaaatggatcaattatgaagaaccacgataaagtgatgggtataattggggaagcagaagaaattcttgacgaagcatggggttgtcttcagaaaatgaatggatcaagtcaaggtacacatgctccagggataaggcaaggttaggaattaggacacatctccacttactaaaaaagagataaaaaaaaattataaagggaacgttataaatatgttgtaaagtcaacatctgtttccttctagactcttcgcatttacatcacactgccgaccatataaaacggcaaagttcgtcgtcgttttatcacaagaccatcaacaccataaggctataaatccaagctaaaaggtagtgattaactccacaaaaccagaaaaaactacatttctaacatatagaagaaacagagaaaaagagagagagacccctaatg

SEQ ID NO: 12034 - DNA, 3000 bp, Unknown
  misc_feature (1)..( 3000): cDNA_ID_1808515_gDNA_ID_2214528_Annot_ID_134226 3000 nt of promoter + ATG
ttggacatggttgcgggaagtatgatcccgttttgtcttgctcgggcttgggaatgtttggggattgatatgactccagaggatacgtttccagaattaaacagatggatcaagaacttgaatgaagttgagatcgtgagggaatgtatacctccaaaagagaaacatattgagcgtatgaagaaaattatagagagagctaagtctacgttctaaattaatgataacttcataactctgtgttctaaaataatgactatgtgcagcttgtatcgttttgttattgaaaaatttgaaacaaagaatgaatgtagctgcattggtagtggaaatcaattaatgggtgcaaagtgaaatgttgaaagctacctattataactataataacaaatattgatttatggtttagggaaaataaattgcaaagatggtaaatctaagttcgataggatgatgagttaatttgtttcatgatgtgtggtattgattacatgatgtttgataagaagttaagaacattaacgtatggttggttagtattggtttattgtgtattgttggttagtatttcagtttagtgatattctggttctattagtctatccaattttgtattagcattggtaactcaatttcttcaagaaatgaaataacaaatatttaacatatctctccaaaactaatacatcggaagtgaaagatgaaagacatgttcaaagaatatttatcaaaaaaaaaaaaaagagagatggtcaaagttagacataaatattgacttttgaggattcttaatattttgaacacatgctgaaatgtttaggcgtgaggataaatgatgaacacatttgaaagtgacggcaatgatgaacaactaccttctagatgttcttggatgatacacatgaatgatgtacatacattgaacttgtaattaagtgttcctcacaactctaattagaaaagtatgcttaattattggagtaaatggcctaaaaaagacttttccttttcctttatgcctttataatcatgcacaatttacatgagagtatatataaagattagttaaataaaaaataaaaaagagggaaagagattgattattcaatggccgagaaagaagagggtgtgaagcttatagggtcttgggcaagcccattcagtcgtagagtcgagatggctctcaagcttaaaggcgtgccgtacgattacttggacgaagattatttggttgtcaagagcccgttgctacttcaactcaacccggtttacaaaaaagtccctgttttggttcacaatggtaaaatattacccgagtcacaactgatccttgaatacatcgaccaaacatggacaaacaatcctattctaccgcaaagtccatatgacaaagccatggctcgattctgggccaaatttgtcgatgaacaagtaattcttaagacaaattcgtttattaactcattgcagatgttatttatagaaattatgagaaacacttataactaccggtcacattgaatatatatgcacataattctagtcatgaaacgtttgctatatatcgctaccgtgtaggtcacaatgatagggctcaggtcactggtgaaatcagagaagagaattgacgttgcaatcgaagaagttcaagaactaattatgttgcttgagaatcaaatcacgggaaaaaaattattcggcggagagacgataggattcttggacatggtcgtgggaagtatgatcccgttttgtctagctcgggcttgggaaggtatgggaattgatatgattccagaagaaaagtttccagagctaaacagatggatcaagaatttgaaagaaattgagatcgtgagggaatgcattcctgatagagagaaacatattgagcacatgatgaaaattgtaggacgaatcaaagcggtctaagagacaacatgatactctttgatccagtgatgttaagttgttaactaaatttgtattgtcttgttatttaaaagttttatgaacaatctactaaataaagatgagtgtgatacatgtatccacagtggtagtataatttagtttgtacgagtatctagttctatctaattattgatatatgatcatattttctcataacatatttttgttctgtaatttagatgataaattgataaccaatttgtattattacgaagaaaaagaaaacagtttgaactattcattaaaaaaagttattgtttaaaaggtattttattagattaaaatattaaattaattgtaattcacttttggaccacgcatttagcatcacacgtataactttaacaaatcaggtaaaaccaaatttctttaattaggtaaagaaacagaagactgaaagaaaaactagtttggaaacaaaaaatggtatttgcaggaattgtaaggaatttgggatactagaaatgtatggatctaagttagaaaaaatcaacaaaaatttgttgaatattatttataaagttggtatgtttgaggaaattgaaaaagataaaatatatttgaatatatggagagatgatataatgtgttcacggttcattggatatttagcagtgaatgaatcaagagaaagcaaaatagttattttcttctttcccgtcgttttagtatacttttcaagcacgagaacggaatcacaaaaactagtcaaaaaaggcgttaaatcctatagaacaaaaacatataagctatggtttcgaacgggaaccaaaccataatatgcgatgcacttctaatagcaatcaaaaatttgttaatatgtacatatatatttttgttttattaaaaccgtatcatactttatctgcagttaaaccgcacatctttattcggagcctatatatctacactgcctatatatcaaccgaccaaacattcacgaaaacaaaccacataaactagtcaaagaagaatagatgagttacattataaaaaagttcaagtgagagaaagagaggtccaatg

SEQ ID NO: 12035 - DNA, 3000 bp, Unknown
  misc_feature (1)..( 3000): cDNA_ID_2708221_gDNA_ID_2214528_Annot_ID_134228 3000 nt of promoter + ATG
ccagtttttagtaatattctattcaattcagcacgttatacaattgcttttaaagcccatggcccataatactcagacagccttaaatgcttcagattaacaaagaaaatgttttagattttatggatagtgtgattagagtccaattattttggaatttaattcggttaaccagtcgaaccggataatctgtagaaatccagttttttttttggaagactacatatttgtctaaagcccatgaaggcccattaaacccaacgaacacaaacaatcttcaaaatgctcctagaattttctggattcacctgatttttctcatagacgtcctctagatgtttctgtattccccataacaactcgagaagctcgagaaatttcggttagtacctttaaatagcttcaaaaatccttcgtgtgttctatcagaaatcgaaaaatcaaagttctcaagaagatatcaacaaaaaaaaaagtaaattctttaaaatgtcgatgattccaagtttcttcaacaacaacagacgaagcaacatctttgatccattctctcttgacgtatgggatccattcaaggaactaacatcatcatcactttctcgtgagaactcagcgatcgtgaacgcacgtgtggactggagagagacgcctgaggcccacgtgtttaaagctgacttgcctggattgaagaaggaggaagttaaagttgagattgaggaggatagtgttttgaagatcagtggagagagacacgtggagaaagaagataagaatgacacgtggcaccgtgtggagagatcgagtggacagtttacgaggaggtttaggttgccggagaatgtgaagatggatcaggttaaggctgcgatggagaatggtgtgttgactgttacggtgcctaaggctgagactaagaaggctgatgttaagtctattcagatctctggttgagtaatgggttcgagttttatcatcggagttgcttgtgtttttgtcatggttatggttcatgttttacttgagtgtgtgagtactctatctaaattataataatctccgattgagctatgaattatgatgtatcggatacatttgatcctaatgaagtatggaataaataataattattaacctttgtctaaattcaaaagaagtttaaccgacgagatgatttcgcttagagttcgatttcggtttaactaaaccaaatcaaccgataccgtgaatcaagacggaatcaaacccaaaaactgaaaaggttcacattatataaatgttatattttgatttagattattacatcatttctttcaaaatgattaacattttgtttgataactgaatatttcttctgttttacaatgtcattcatttcaaatgtttggcagacaatgaattggccaaaaaatagactcttcaaaacaaaaaaagttgtgtgttttacaaatacagtcgatacattaatctctcagttttaaacttttcaacatatgaatcttaaaatataaattgtagaacgtaatcatttggagatttgttatttcttggtcggctaattgactggagattagaaacactaagtgttggtcaaatatcttaaaacactaagacgaatgacgttggcaatgacgtgcataccttaaaatataaatcagtccttttctggtgtgatcttcaagatatccttggatacaaagacaaagagaaagcaaaatggtccttttatttatttgtttatttcaccacccataacttcatttgtgtatagaatatagtaaactcaagtaatcaagcaagtaaacgaaacataaaaaagaaaagtagtgcaagaaacagaggagttagataccaaaaagtgagagatatcgaatggcggagaaagaagagagtgtgaagcttctagggttttgggcaagcccttttagtcgtcgagtcgagatggctctcaaactcaaaggcgtgccatacgaatacttggaagaagatttgcccaacaagacccctttgcttctggagctaaacccgcttcacaagaaagttccggttcttgtccacaatgacaaaatattactcgagtcacatctgattctcgaatacatcgatcagacgtggaagaacagtccaattcttcctcaagatccttacgagaaggccatggctcgattttgggccaagttcatcgatgaccaggtatactaatattgatttgcagattaattagttgattctatgcagaacaatattatattattcgcttgtttatatattgttctttacttgcagatcctaacactagggtttaggtcccttgtaaaagcagagaaaggaagagaggttgctattgaagagactcgggaactgcttatgtttcttgagaaagaagtcactggaaaagatttcttcggtggcaagacaatcggattcttggacatgatcgcaggaagtatgatcccattttgtctagctagactttggaaaggtattggaattgatatgattccagaggagaagtttccggaattaaatagatggatcaagaatttggaagaagttgaggcagtgaggggatgtattcctccaagagagaaacaaattgagcgcatgaccaaaattgcagagacaattaagtctgcctaaattaaagatacttcttgcctacgaaaatatttgatttatatgcttgcatcgttttttatttatatttttattttttaaagtttttcgaaaaatagaatgacctaatatttaagtaaaaagatcaaaaacctatttgaaagttacagcaatcaaataacgtggtgtgtctggagattgtaaaagccaagactagaaggaaataagaataaaataaccaaagtgacctcagcagtgacttggttaccttactgatgtctttttttttttttttatcttcaagataagcttgagagttgagactacaaaaaaaagcacaatattgtttttaaagtgacagagagagtcagagagagagatctaatg

SEQ ID NO: 12036 - DNA, 3000 bp, Unknown
  misc_feature (1)..( 3000): cDNA_ID_2708189_gDNA_ID_2214528_Annot_ID_134229 3000 nt of promoter + ATG
gtttatcgtctctaaacttatccggtgtaaatgcctttgagctttccttagttaataccttcttctcagcagctacaaatggtggtctatcacaagaacctttcttcaactccaaacgacactccatctgtttccaaagttccaaacgtttcactcaaatgactcctcagtctcccattaaactgcagaagcttgaaacgctcaacattttttttcactgtagaaacaaaaaaaatggtaagtcataacaaataccaaaaaaaaaaaaaagtacatctttcttatccacacacaatgtaatagaattacaaaacgaatcttcatagaccttatagatccttaagaatccgtaagatctgattagaagaatctctacaagattaaagctgaggaaaaaaagtaaaactaaagtatcaaaagaaccaaaacaaaatcacattcttctcaaactttcttaatttaccaaagaagtactaaaaaacaagattagtaacaggaaaggcctaaagcgtacacacacaaagcaggaatcgatgaattcacataacactaacaccaggactaacacgagagtgttattggcagtgtcagagagtgaaaaagcttggaaaaaaatcgaaccgtacctgaacggaatcagttcgtaacacagagactgaagcagattagagttgaatcagatcaggagaggaaaaaagaagaaggaagaacagatctcaaatcgtccgtgaaatccggcagaaatagcgccgacgaagctgaccctatcagctacagaggtagagagtaagagaagagagagattgagctttgttaattgtgtgtagattagagagtgacaagtagagagagatagagagttgttgaagcgagtgtgttttgttcgccgagtctttcgtcgaagttgttttttttttttcccaaaaaaaaaaaacatatctttttgtggccgacggatttagtaaaaaaaacagtataatttttataaagatgggcccaatagtagaatcgtacgctcaagattccgtaatgaacgcgggaagttacgtcattgtgaccctacttacttagtggagctcaatgtccaatatacaccgttggatttgtttaatcctcctttagatgggcccagtttttagtaatattctattcaattcagcacgttatacaattgcttttaaagcccatggcccataatactcagacagccttaaatgcttcagattaacaaagaaaatgttttagattttatggatagtgtgattagagtccaattattttggaatttaattcggttaaccagtcgaaccggataatctgtagaaatccagttttttttttggaagactacatatttgtctaaagcccatgaaggcccattaaacccaacgaacacaaacaatcttcaaaatgctcctagaattttctggattcacctgatttttctcatagacgtcctctagatgtttctgtattccccataacaactcgagaagctcgagaaatttcggttagtacctttaaatagcttcaaaaatccttcgtgtgttctatcagaaatcgaaaaatcaaagttctcaagaagatatcaacaaaaaaaaaagtaaattctttaaaatgtcgatgattccaagtttcttcaacaacaacagacgaagcaacatctttgatccattctctcttgacgtatgggatccattcaaggaactaacatcatcatcactttctcgtgagaactcagcgatcgtgaacgcacgtgtggactggagagagacgcctgaggcccacgtgtttaaagctgacttgcctggattgaagaaggaggaagttaaagttgagattgaggaggatagtgttttgaagatcagtggagagagacacgtggagaaagaagataagaatgacacgtggcaccgtgtggagagatcgagtggacagtttacgaggaggtttaggttgccggagaatgtgaagatggatcaggttaaggctgcgatggagaatggtgtgttgactgttacggtgcctaaggctgagactaagaaggctgatgttaagtctattcagatctctggttgagtaatgggttcgagttttatcatcggagttgcttgtgtttttgtcatggttatggttcatgttttacttgagtgtgtgagtactctatctaaattataataatctccgattgagctatgaattatgatgtatcggatacatttgatcctaatgaagtatggaataaataataattattaacctttgtctaaattcaaaagaagtttaaccgacgagatgatttcgcttagagttcgatttcggtttaactaaaccaaatcaaccgataccgtgaatcaagacggaatcaaacccaaaaactgaaaaggttcacattatataaatgttatattttgatttagattattacatcatttctttcaaaatgattaacattttgtttgataactgaatatttcttctgttttacaatgtcattcatttcaaatgtttggcagacaatgaattggccaaaaaatagactcttcaaaacaaaaaaagttgtgtgttttacaaatacagtcgatacattaatctctcagttttaaacttttcaacatatgaatcttaaaatataaattgtagaacgtaatcatttggagatttgttatttcttggtcggctaattgactggagattagaaacactaagtgttggtcaaatatcttaaaacactaagacgaatgacgttggcaatgacgtgcataccttaaaatataaatcagtccttttctggtgtgatcttcaagatatccttggatacaaagacaaagagaaagcaaaatggtccttttatttatttgtttatttcaccacccataacttcatttgtgtatagaatatagtaaactcaagtaatcaagcaagtaaacgaaacataaaaaagaaaagtagtgcaagaaacagaggagttagataccaaaaagtgagagatatcgaatg

SEQ ID NO: 12037 - DNA, 3000 bp, Unknown
  misc_feature (1)..( 3000): cDNA_ID_2708225_gDNA_ID_2214528_Annot_ID_134231 3000 nt of promoter + ATG
tcttgttgggcaaatcttcttccaagtattcgtatggcacgcctttgagtttgagagccatctcgactcgacgactaaaagggcttgcccaaaaccctagaagcttcacactctcttctttctccgccattcgatatctctcactttttggtatctaactcctctgtttcttgcactacttttcttttttatgtttcgtttacttgcttgattacttgagtttactatattctatacacaaatgaagttatgggtggtgaaataaacaaataaataaaaggaccattttgctttctctttgtctttgtatccaaggatatcttgaagatcacaccagaaaaggactgatttatattttaaggtatgcacgtcattgccaacgtcattcgtcttagtgttttaagatatttgaccaacacttagtgtttctaatctccagtcaattagccgaccaagaaataacaaatctccaaatgattacgttctacaatttatattttaagattcatatgttgaaaagtttaaaactgagagattaatgtatcgactgtatttgtaaaacacacaactttttttgttttgaagagtctattttttggccaattcattgtctgccaaacatttgaaatgaatgacattgtaaaacagaagaaatattcagttatcaaacaaaatgttaatcattttgaaagaaatgatgtaataatctaaatcaaaatataacatttatataatgtgaaccttttcagtttttgggtttgattccgtcttgattcacggtatcggttgatttggtttagttaaaccgaaatcgaactctaagcgaaatcatctcgtcggttaaacttcttttgaatttagacaaaggttaataattattatttattccatacttcattaggatcaaatgtatccgatacatcataattcatagctcaatcggagattattataatttagatagagtactcacacactcaagtaaaacatgaaccataaccatgacaaaaacacaagcaactccgatgataaaactcgaacccattactcaaccagagatctgaatagacttaacatcagccttcttagtctcagccttaggcaccgtaacagtcaacacaccattctccatcgcagccttaacctgatccatcttcacattctccggcaacctaaacctcctcgtaaactgtccactcgatctctccacacggtgccacgtgtcattcttatcttctttctccacgtgtctctctccactgatcttcaaaacactatcctcctcaatctcaactttaacttcctccttcttcaatccaggcaagtcagctttaaacacgtgggcctcaggcgtctctctccagtccacacgtgcgttcacgatcgctgagttctcacgagaaagtgatgatgatgttagttccttgaatggatcccatacgtcaagagagaatggatcaaagatgttgcttcgtctgttgttgttgaagaaacttggaatcatcgacattttaaagaatttacttttttttttgttgatatcttcttgagaactttgatttttcgatttctgatagaacacacgaaggatttttgaagctatttaaaggtactaaccgaaatttctcgagcttctcgagttgttatggggaatacagaaacatctagaggacgtctatgagaaaaatcaggtgaatccagaaaattctaggagcattttgaagattgtttgtgttcgttgggtttaatgggccttcatgggctttagacaaatatgtagtcttccaaaaaaaaaactggatttctacagattatccggttcgactggttaaccgaattaaattccaaaataattggactctaatcacactatccataaaatctaaaacattttctttgttaatctgaagcatttaaggctgtctgagtattatgggccatgggctttaaaagcaattgtataacgtgctgaattgaatagaatattactaaaaactgggcccatctaaaggaggattaaacaaatccaacggtgtatattggacattgagctccactaagtaagtagggtcacaatgacgtaacttcccgcgttcattacggaatcttgagcgtacgattctactattgggcccatctttataaaaattatactgttttttttactaaatccgtcggccacaaaaagatatgttttttttttttgggaaaaaaaaaaaacaacttcgacgaaagactcggcgaacaaaacacactcgcttcaacaactctctatctctctctacttgtcactctctaatctacacacaattaacaaagctcaatctctctcttctcttactctctacctctgtagctgatagggtcagcttcgtcggcgctatttctgccggatttcacggacgatttgagatctgttcttccttcttcttttttcctctcctgatctgattcaactctaatctgcttcagtctctgtgttacgaactgattccgttcaggtacggttcgatttttttccaagctttttcactctctgacactgccaataacactctcgtgttagtcctggtgttagtgttatgtgaattcatcgattcctgctttgtgtgtgtacgctttaggcctttcctgttactaatcttgttttttagtacttctttggtaaattaagaaagtttgagaagaatgtgattttgttttggttcttttgatactttagttttactttttttcctcagctttaatcttgtagagattcttctaatcagatcttacggattcttaaggatctataaggtctatgaagattcgttttgtaattctattacattgtgtgtggataagaaagatgtacttttttttttttttggtatttgttatgacttaccattttttttgtttctacagtgaaaaaaaatgttgagcgtttcaagcttctgcagtttaatgggagactgaggagtcatttgagtgaaacgtttggaactttggaaacag

SEQ ID NO: 12038 - DNA, 3000 bp, Unknown
  misc_feature (1)..( 3000): cDNA_ID_2711401_gDNA_ID_2214528_Annot_ID_134232 3000 nt of promoter + ATG
ttcccatcgcctaaggtgtctgacactgttgtggagccttacaacgcaacactatctgtgcaccagcttgttgagaacgctgatgagtgtatggttcttgacaacgaagctttgtatgacatttgcttccgtacactcaagcttagcactccaagttgtaagtattccaatgttcttcgattatgagtcaatgttgttactgtatctgtctctgtggtttattgtttcaggcttagttattgattagtattgaaacttcactcacatatttttttgtttgttttctgaattgtgcagttggtgatctgaaccacttgatctctgcaaccatgtctggtgtaacctgctgtcttaggttccctggtcaactgaactctgatctgcgaaagctagctgtgaatctgatcccattccctcgtctccacttcttcatggtgggatttgctcctctcacctctcgtggatctcagcagtaccgtaacctcactgtcccagagctcactcagcaaatgtgggatgctaagaacatgatgtgtgctgctgacccaagacacggtcgctacctcactgcttcagccatgttccgtggaaagatgagcaccaaggaggtcgatgaacagatgctgaacgtacagaacaagaactcctcctactttgtggaatggatccctaacaacgtcaaatcaaccgtctgtgacattccccctactggtctgaagatggcttcaacgttcattggtaactcaacttcgatccaagagatgttcaggcgtgtcagtgagcaattcactgctatgttcaggagaaaggctttcttgcattggtacacaggtgaaggtatggatgagatggagttcactgaagctgaaagcaacatgaacgatcttgtctctgagtatcagcagtatcaagatgcaacggctgatgaagaaggagaatatgaagaggaagaagctgagtacgagcaagaagaaacttattgaagaaacagatgataagaacacctcaacttccagttgctgtttacttttaaaactctcttctattaagttcttatagtttctgtaactatcgcttgcgttattagtagttatgatactctgcgtaggctaagaggatttatcaatcaatattcaaacaatctattttgctaaatcaaaatccatccatagtattttttttctttgtttcattatataaccttttgttaattttgactatgtgaattcggtgaagacttcaccatctttcaaatataagaagcagagtagtagtgacaatggttataagcaatataagaatcttcttggttaaattttggtgtggattatgaatttgacgagtcaatttgaaggacgaatctggatttaagataaaaatagtataaactccataggagaatacaatggttatcagttgttttcaatgtccatggacccaaatagatccctctgcctcttaagctcttcttcttcagcctcctccttacgcttttgttcatccttatactcagcaacagccttatcaaaaacgcttctcacatgtctgttcatttgcatgagctcttgacatgcatctttaaaaacctctcttgctggatcacctaaaagccacagagccaacacgttttatgttgttagacacacagacaaagaactcggataagagttatccaaaaagaacatagcttaactctgatgaacagagtttttgaaaaacagtacctgttgtctggacccggatattgacctgttcaagggaaggatgtgggatggtgtatgcagccacggttactctgggactgcagaattgaaaacagtactggttattgacataatcatcattgtctacacaccagcatatcaactccatcaacctcaaagataagataatgtgacattcattgaatacaatgagaatctctaacaacataacatgaatgtaaaccaacatttaatcgaactctcaagtttcacaatcacaatataatggcgaacttaatggaccaaactcatccaacgaaagatatcggaacaataatgcctcgtcactgctgtctctatctaagagctaattctagactatcttttctagtctctaaccacagaacatgaatctgaatcgaactcaaccttcacaatcaccttataatggcacaaacatacaatgtgcacactgattattcaaacaaaatttgattatcttcacaataattctaaccaaaaacaaaggtaaagacaggtaagagattcattcctaatgagggaaactatgaactcaataatcagaatttgagagtgtcacgaactaagtatgagattataaagctaaagcctttctctgtgaaagtgtatagcttcttctatatatatacataacagattcaaaaggattgaaagaagaagatacttactcttggtttaagacgaatctaacagcattagcaagtgtgtgatcttcttccgataaagtaaacgaagcatgactaacattcgtgaacgaaccgtgctccatatctcaccttcttgctactcaattccttaactcaaaatcaaaaatccaccaccaactagaaaacacagaaagagaacgacttcaattgaaagctttgaatagctaaacaaacccacaaagaaaaactcgaaattgaagaaaatttcagcaaaaaaagttgagagagtaagaaagaagatacctccaatagaaatttgctaaaaccctaaaagcttgattagtcggcgacttttagtcgtggagaagctcagatactttagcgtaattacatctataccctttcgtttgatgacgtggcgtgtaatgtctcttaaaccctaattcggctgtgtagcaaaagagaagcctttgttgtgttctttacctctcttcacgaaatcccatttgagaaagtaaggatttatgatcttcaaattcaagtatgaattataaagtttcgatttttacgaatcattaattttgtattcaggtactgctaaaaaaatg

SEQ ID NO: 12039 - DNA, 3000 bp, Unknown; identical to SEQ ID NO: 12032
  misc_feature (1)..( 3000): cDNA_ID_1833226_gDNA_ID_2214528_Annot_ID_184840 3000 nt of promoter + ATG

SEQ ID NO: 12040 - DNA, 3000 bp, Unknown; identical to SEQ ID NO: 12031
  misc_feature (1)..( 3000): cDNA_ID_1023980_gDNA_ID_2214528_Annot_ID_184838 3000 nt of promoter + ATG

SEQ ID NO: 12041 - DNA, 3000 bp, Unknown
  misc_feature (1)..( 3000): cDNA_ID_2990754_gDNA_ID_2214528_Annot_ID_184837 3000 nt of promoter + ATG
gctcatcattgcgccagcgttgtcaaattccccgcaatagttgggagctgaaaatactgtaacaagttgtctttctgcaaagaactcatacccatcttcaacaacctataaacagagccaatacactcaaattaaggttgcacagttttcataataaactaaatggcagatataactcaagttaaaacctggtgggcacgacagataaggtccatgtcatgtttctccaagaactctgcgactttgtcagctccaaaagtgtatgaaacaccacgatcattcatgccccagcctacgtctccactaggatccgaccatagtaaatcacataccaaaccagactccggaatatccatcggccgtgcaatatttctaatctggtccaaacttttcagctctggggaaatcccaccatgcatacatagtattctgtcatcaattaaggcggccacaggaagacagttaaagcaatcggtgaatattttccagagtctgacattgaacctgcgtttgcactcatcatagaaaccgtaaatacgattaatggaagcagattcatgattccctctcaacaagaagaagttctcagggtacttgattttgtaagctagaagaagacatattgtttccaagctttgcttgccacggtcaacataatcacccaagaacaaataattagcttcgggagggaaccctccatactcaaaaagcctcaatagatctgaatactgcccatgaatatcacctataaagtaaaagacaaaatataaccattacatctaagaaaacatggcatatcagatactactagtcaacgttaaacttttgcaggaaatgttttatcagacccaatcaaaacacataacttgactagtcaacattaagataaaatgaatcaaacctcatagaaccagtcaaaactcctaagcctatctaagacttttagtaataaaaattcaaactttatactacccattagcttgatttcattgttctgaactcaaaagacaatcaaaatctcacattttttcttcagtcacttagatatgtacatagctttaagaattcaactcattactactgaacaaagcttgatactttatctaaacatgcactaaattcgcttctaaaaatcaatcaaaactaaaaccccaatccaaaaaagcactctttctaaactaaagggaacaaaaatctgaccgcagatcttgatgggagcttccaattcaagcagattgggctgttgaagaaatatttctttggagacagcacaaagctgacgaatttcaccttcactgagatgaacttgcttccccgatccaggtctcgtgttccgaaactcaaccaaacgacgaataatatcgtcgagaactgcaggttccatcgctcgcttctgctcttgctcttgcgccggcttctccgccatctccgatctaaacgaggtagaaaacgaacggagattttcaagcgtgaagcttgcgtttcgagccgcgaggaggagagacccgaagactggtgtgtgctctgagattagtcaatattgattggttcattttttatttatttaatttatttacgagacctgagtgaaatcaacctaatgggtatgtacacgttttattgggcctgtaaatgggctatctttctagaagattcctttatacaaatttccaaacggtagaaaactagttcttctagcctctctacgcgatcagtaataacgattggcgatagtaatatagtattcactattcagtagtaatgatgggggatagtgatcaacaatatgttttgttgtttgtttagcagtcatcggtaatgatcagtgaccaattataacaatcaaatgttactatgttagtatgatattcgttttccgtaattaagtggtagattagatcaatcttaattcttaaattcttaattagcgactaataaattaaaacgccaaaaagtttgaattagcaaattagttactgaaaacttagtgttgccatcaaaaactacaaaacaacaatctatttgttaccatgaaactacaaaacaaccaagatttagtgtttgatcggtaatacctaatctaatataatcaccatctggttgatgtgtcaaattaacatgcatatgcgtgtatgcaaataccattcttttgttaaaaatcaccaattcacattcttaattacatgctaagtgctaactaataactatgtagtttgataaaacaagttaatatatcaacaacatttttatcaaaagaaaaaaataaactatatcaacatggacaaattacatcacctaacggtcctaacctaatttaaaataatattgatgtatgtttataattgatttctataatgaaagaaaacaaaaagacgaaaaaaacaacatgctaaagatcaaagaacattagttgaatcaatccttattttgaacaaagaatagtcagtccattttgttcacctgaaacgcaaacgccacctttgtatggtaatacaatcatacaaatctcatacacaccaaaagaaacacaaaatcaccaaaacaaaatctttatatttatttcttttttccttgattctccttattaaagaaaaaagattattcttcttcacccgtcacaagccacaacgacttattttagattcccatacaaaaaagaaaattccacatctataaaacatctcctcccatatttgctggatcatccttaattgcctgtgttcatgtcttcatatctctaaccataagataaaactcaagatttctgaagaggacagctctggaattcatatacgttttgcctctccatctgattctcaggtttgtttcttgtcttaaaagaaacacaaaatgggtttatttgaatcttttaatcataaaaatacttaaagaaagaggatcaaatgttgatttagatctctaatgaaagtttgtgtaacgtataaacagcttatggaattggagcaaatctgcattttgaaacccgatgatgaggaagaa

SEQ ID NO: 12042 - DNA, 3000 bp, Unknown; identical to SEQ ID NO: 12030
  misc_feature (1)..( 3000): cDNA_ID_3023716_gDNA_ID_2214528_Annot_ID_184836 3000 nt of promoter + ATG

SEQ ID NO: 12043 - DNA, 3000 bp, Unknown; identical to SEQ ID NO: 12029
  misc_feature (1)..( 3000): cDNA_ID_2711408_gDNA_ID_2214528_Annot_ID_184835 3000 nt of promoter + ATG

SEQ ID NO: 12044 - DNA, 3000 bp, Unknown; identical to SEQ ID NO: 12027
  misc_feature (1)..( 3000): cDNA_ID_3023719_gDNA_ID_2214528_Annot_ID_184832 3000 nt of promoter + ATG

SEQ ID NO: 12045 - DNA, 3000 bp, Unknown; identical to SEQ ID NO: 12021
  misc_feature (1)..( 3000): cDNA_ID_3023723_gDNA_ID_2214528_Annot_ID_184831 3000 nt of promoter + ATG

SEQ ID NO: 12046 - DNA, 3000 bp, Unknown
  misc_feature (1)..( 3000): cDNA_ID_3023747_gDNA_ID_2214528_Annot_ID_184822 3000 nt of promoter + ATG
atataatatttttttgtcattttcctaattaagaaatcctactatattatttaggaagtacattttaaatataaccttattttttgtaagtaattacataagtatgccattagaaataaaatttaaagagtacattaattcatctctttaataattaagtcaaatactaatttaattaattaaatttaattaaaaaacaaaatacattattaatttccaaaaaagtaaccaattaaaatcaacaaattagatttgatatctaaattatcatattaattttttattaattattatagttcacctctcatctttatatgattctattttggcgaaaaaataatatcatcgttataaaaaaataattagagttttttcgcatatgccataatttgaatttttaaaaactaatataaactgttcaatacatgaaaaaatattataacgggtcaaaaatagatttaagaaaattttctactgaatactgggtcataatttgaatatttatattcaatttcatacatattattttaaaaatttataatcttatatactacaataattaataacatattagatttttttatgtgtatgatgtgattcaatttttaatacaagatagaaaatcctagaattgacgggtttaaatcgatattaatacaagatggtatactacatgtgaaactctaaaattaacaatcaaaatacaagtgtataattttaaacactaaacaatataaataatatcaacaaaacatatacaactcgcagtttactatacatttaaaatcaaataaaataatatcatatatttataatcatctttacaataaaaatttttagtttaaataaaatataagcctacatgtggtatactgcaagttaaaattataaataagcagattaccatcacgatgtccgtaccttctcacatacacacttatcaaaaattataaataagcattttaaatgtaaccttattttttgtaagtaattacataggtatgccattagaaataaaaacttaaaactttttaaaacctcttggtatatacaaattaggattcttcattcataaaatcattattccaagggttttgggatgtcttatgaaatgattttggtagaagaggatgtacatttttttgaataaaaagtagtcagcaaaacatatgttttttttgggagtttttagataattaaatcagagaatagggttgggcatacgagtaacccattcgagttctggtagaacccgttcgggtttgggattaatgggtatatgatttactatccaatagaataattctaaatatttggttctggttcgggtcggatccagttgggtttgggtcagtttggataaaaagtttcagaccctaaaaatatccaaaaaaaaatagaaactggaaatttgtatgtacatagcgggtctccaaacaaaaaaaacttttaaatttgttaagttttaataaatttaattatatttgaatatattttacaaaattttgacaaacataacaaatcatttttgaatagtttagttgttttggatatttaggtccaaaattaattgacatatttaaatttataattataatcttagataattagataatattacgattaaatataattaatattttggatattaaattaatgtttgggtttttgaatactttgttttgtaccaggtaatttccagaccaatcggatatccacgggtttactaaaactctacccaataaggaaatttcctaaaattttaacccgccctaacccgtttttttggttcgggtattgagttggttattgggtccgttttttcgtcagccctatcaaagataatctaatataggcctcaattaggtccacaaatataatccaaatactatacaaagactaattctaagttaggccaaaaattagaccctttaatacaaaggaaacatgtttcttaccaaaacaacttgtatacaaattttacacatttacttaaaactacatatgttgtatttattataaaaataacatttttaaacaaagtcaattcaatgcagcattatatgcaaatagtaaaaacattgaaaaatattatggcatcacttttatattatactatttcttatgtaattcaaacaaagtatacaatttaatttatacaaaatattaatgttcgtgctgtacagcacgagttatgatctagttctcttttattattgagcgcgctaatttattcctttttaattatcataaaatctttaaaattttaaatagccccaaaaatgttgggtttaaaaagtgtataaaattttagaaacaagtcatatttgatttaggaacatttccacctaaaaaaattagaaacttttagtaaacataaaactttaaggtactttgagaaatgttccaaaattgtggtattgataaaacaaataaagttacacaaaaattaatctataatatactaattttgaactaaaataaaaacctaaagatccttgtcatctagaagtgttgtactttggtaaaggtctctgctctaaaacccaaactgaaacataaagccaaaagatctcaaaacagttccaacgagaaaaataaggtttgttatcttccaattttcataatgtttttttatattcctttgtgcaatcgctaagtcaaaccaaccctaatattatttcgccgtaatttttaatttccaaagataatcataaaaaaaaaggaacaaaaaccctaaggttcttgcatcgccgtcgtattattccgtcaacactataaaacccacattttcctatctctctcaatctaaagtctttgttagggttctttatttttaaaacaaacagtaaccagaaaaaataatcaaatcatcgaatgggtttgagtatcgcttaataaagttttgatctttgggtttagttctaaaaacagagaattttggggattgtatatatttgaggtataaagttttgatctttatgattttttttcgtaatg

SEQ ID NO: 12047 - DNA, 3000 bp, Unknown
  misc_feature (1)..( 3000): cDNA_ID_2708229_gDNA_ID_2214528_Annot_ID_184854 3000 nt of promoter + ATG
catattgtatgtttactgcctaagaacgacaaagacataatgtgcatacggtgatacaggtgaatcagattggtacagtaacagaagccattgaagtagtgaaaatggcaagggatgcccagtggggtgtggtgacatctcatagatgtggagaaacagaggactctttcatctctgacttatctgtgggtctcgcaacaggtgtgattaaagctggtgctccttgcagaggagaacgtactatgaagtataaccaggtctggatctttttccaaactaatatcctcagtaccccttatgcaattacactagaacaatctacattacgtggagtaacctgcattggaattttggatcatagctctttcatcagattatcatcagcttctttttagcttttaagtagctgagttatgttgtggtatgtgaatctttagcaacctaggctaagtttcagtttcttcaacttttggctaatgcagcctcagcttatagatccataatgattgagtttggagcagccatgtacatttagttgctagatagtgttctcatttcattgtagaaactactttattaaaaagctgaatcactgttgaaatgttcctgcagttgctacggatagaggaagagcttggggatcaagcagtgtatgctggagaagattggaagctatctctctaaacaaaatgcacatgtgatattaattgttacacttctcgtcttacttcattgttctcgagtctatttctcacgcagacaaattcttgtgtcttgaaagttcaaattttttgttgtttttgccaaatttaagaacaaacagaagtaaagagtgttaaacatgttttttacaaattgtaaaagcatccaaaaacatcaatcaacactagttcgtgaggttgcagaagccacaaacaaacgtgttttagggcttcgtgtcttctttttcttcaatgtttaacaaacagatgaaaagtgttataaacaagcttttccaaatttcagaaagacaaacatcatacgattatctagtttagcattgccttaagatagtaaatccagaaaacaactgaatcaagacagacatttcaacaaaggactcgaacgaagactatcaaacattcatcattattctggtttggtgtcttcttcttcttcaatcttaggcgccagatagtatcgaatgtaacccatctcagccaccttgtactccaccacgaccggtaactcagaggacaaactgatggtcacagtttccgacaatggagtagcctttgtgaaggagttcatgtacctcaatgcaaatgaaagcgaaacaggctcgttcatctctatcacaatagcatcttcaggctgcaaaacacacatacaaacataaggtcacttcaacattgtattggacagattattaaacaaatctctctagatgactagtgattgttcatactttgtcgacggtagtattctgcctgagcacaatgtttgctgtcccgatatcacctgctgttgaaaacttcaccccttcttttgttaccgagatcacaactgcaaaatcataacatcaaaaccagaatcatgattagagaatcctcgcagtgatacaccaaataaacaaacagttcatttacctgtgtcaccaatgctactgagatctttgcatatcctggaaaattcaccagaaggcattctcacaatcgagtggtactcagcatcaggaattcctaaatgctcactgtcgatatccatcagcttcatctcaaaatctgcaatcttgtcttgtgctgcatcatcaacaccatttaaataatgagattaacaccacatagtcaatatcaaacaaagttcctctgttaactttcactaaatcaagaaactctattcactttcaaactatagtctttaagctagagactatacctattctgaaaacaaaaatggaaggactcattctcatcaagcaagttctagtttctgtcaaatgaaacctataaataacagttcagatcactaataacatcattaactacacaaaaacaaagccatatcaaaccttattccaaaccaaaaaccctctattaacatagattttatcttctctttcatctcttacaaactaaagctttcaagaaatggactgaatcattctctacaatcatattctagcttctggcaaatcaaacctataaacacagaatcaggtcaccaatagcatcaacattgacaacaaaaccaaagccctaacaaacaaaaatcgatttgaagaacttactgggactctcaaacatgaaagtaacagtgtcgctaccatcatcagctttgatggtgatgatatcatcatttccagcacatttcagcatcttagacatattaccaagattcattcccatagagaggttcctatcgcatctatagtgctcgaaaccttcagatctaagcaaaagagacaccaacgcgacatggctcgaatccatagcttgaagcgagaaccctgtggtcgaacagtcgaagttcgcatcgttcaccagatctttgaccgcttctagaaccttcttcagtagagaaccttgaactaaacgaagctccaacatcttctgggaaattatcgaaaggttagagtgtgaatcgaaacggttagggtttttagagctgttgaaatttctgggaggagattgcaattgttagcgggaagtgatattataagctgagattttgtggcgccatttagcgattttagggtatttttgttcccgcctgtgtgtgacgatgaattatcatctgtgtgagtccgtattgtttatttcagtacaccaccatcactttaagctttcttatttcatgggtttaaattgggccaaacaaacattcggcccaacagcagctgtaatattaaagattcccgaaaaaatcgaaacgagagcaaatctgctcttcaaggtaatcttcgtgttcgagactgaagaagaaatccagaaatcattgaggaaggaagagaattaggaa

SEQ ID NO: 12048 - DNA, 3000 bp, Unknown
  misc_feature (1)..( 3000): cDNA_ID_2781831_gDNA_ID_2214528_Annot_ID_184852 3000 nt of promoter + ATG
taggtgatccagcaagagaggtttttaaagatgcatgtcaagagctcatgcaaatgaacagacatgtgagaagcgtttttgataaggctgttgctgagtataaggatgaacaaaagcgtaaggaggaggctgaagaagaagagcttaagaggcagagggatctatttgggtccatggacattgaaaacaactgataaccattgtattctcctatggagtttatactatttttatcttaaatccagattcgtccttcaaattgactcgtcaaattcataatccacaccaaaatttaaccaagaagattcttatattgcttataaccattgtcactactactctgcttcttatatttgaaagatggtgaagtcttcaccgaattcacatagtcaaaattaacaaaaggttatataatgaaacaaagaaaaaaaatactatggatggattttgatttagcaaaatagattgtttgaatattgattgataaatcctcttagcctacgcagagtatcataactactaataacgcaagcgatagttacagaaactataagaacttaatagaagagagttttaaaagtaaacagcaactggaagttgaggtgttcttatcatctgtttcttcaataagtttcttcttgctcgtactcagcttcttcctcttcatattctccttcttcatcagccgttgcatcttgatactgctgatactcagagacaagatcgttcatgttgctttcagcttcagtgaactccatctcatccataccttcacctgtgtaccaatgcaagaaagcctttctcctgaacatagcagtgaattgctcactgacacgcctgaacatctcttggatcgaagttgagttaccaatgaacgttgaagccatcttcagaccagtagggggaatgtcacagacggttgatttgacgttgttagggatccattccacaaagtaggaggagttcttgttctgtacgttcagcatctgttcatcgacctccttggtgctcatctttccacggaacatggctgaagcagtgaggtagcgaccgtgtcttgggtcagcagcacacatcatgttcttagcatcccacatttgctgagtgagctctgggacagtgaggttacggtactgctgagatccacgagaggtgagaggagcaaatcccaccatgaagaagtggagacgagggaatgggatcagattcacagctagctttcgcagatcagagttcagttgaccagggaacctaagacagcaggttacaccagacatggttgcagagatcaagtggttcagatcaccaactgcacaattcagaaaacaaacaaaaaaatatgtgagtgaagtttcaatactaatcaataactaagcctgaaacaataaaccacagagacagatacagtaacaacattgactcataatcgaagaacattggaatacttacaacttggagtgctaagcttgagtgtacggaagcaaatgtcatacaaagcttcgttgtcaagaaccatacactcatcagcgttctcaacaagctggtgcacagatagtgttgcgttgtaaggctccacaacagtgtcagacaccttaggcgatgggaacacagagaaagtcatcatcatacggtctgggtactcctccctgatcttagatatcaacaaagttcccattccagaaccagttcctcctcccaaggaatggcacacctgaaatcctgtaaatccaaacaaccaaaaccataagcaaacaacgaatacaaaaccgaatccgtattccacagttcaaaatcagaaatctaaacctaaaaacaatcatacactaccaatacccaacctaaatttacagatccaaaaacctaaatagacaaaaacctaaataaggaagacggatttcaaataccttgaaggcagtcacagttctcagcctctttgcgaacaacatcaaggaccgaatcaataagctcagcaccttcagtgtagtgacctttagcccagttattcccagcaccggactgaccgaagacgaagttatccggtcgaaagatctgaccgtacggaccagatctgacactgtccatggttccaggctccaaatccatgagaacagcgcgaggaacgtaccttccacaactcgcctcgttgtagtatacattaaccctctcaagctgtaactcggaatctcctacataccgtcccgtctgatcaatcccgtgctcgagattaaccacttcccaaaacttggaaccgatttggtttccgcattgacctccttgaatatgaagaatctcacgcatcttcgctcacagagaagaaaaccctaaaactggatctaaaaagagagagagagagagagattttgaaaaagggaaaggagaagcagagaggatcttttgttttatgagagagagaagaagaggagggtccatttataaagaaaaggaggttttaacggctaatatttggtaattcgaaatcgaatcgacggtttagataatgccacgtaaatcgaggtggcaacgggtggcaaaattcaaaaattaatggctcgtgataaaaagtttttttgaatttcgtaaaaaaatatgttcgtgtgaatgacagctggattccattaaggagagcagttactaaaacatcgtcgcactcgcacgtgctttatgagagataaaaaagcggttccaacctggcaatcgcacgtgagagacttcttattgggcctaaaatgggcttttactcttttcatttcaaatctgcatgacttaaaacggagtgatgtgcactagcaaaatcctcagacggcaagcatgtgtttgtaaagtgaaactcatcgttttaatgattgaatatgcttattggatcctgaaccggagcctgaaccggagcgtgaaccaaaaaatacagtcaatcggaaaatgaatttcagattcaaacttgttcatcgaaattttgcttgaagattcgaatcgagaagtccgtggaagaggaagaagaagaag

SEQ ID NO: 12049 - DNA, 3000 bp, Unknown
  misc_feature (1)..( 3000): cDNA_ID_2711397_gDNA_ID_2214528_Annot_ID_184851 3000 nt of promoter + ATG
atggcacgctcaactcgttttgaatttgacatcaacaaatcgtcacctaccacctacaagagtttaacactgagaatttagacaaggaaaatgattgtacaagaagatttaagggtctctctctttagatatttgactctgagaaaagaatcagaagacagtgtgatctgaaagaacacaaaatctatgtgaaccgttaatagtaggggaaccgagttggacctgacatattccaagactcgaaaaatacttggtgtgttcccagtcctccttgtcaaaagggtcttctatagacacaattggataatctaaacccacaaggagaccaaacagagaatctggtcgttacaatactgcaagagtactaagatagacacaaaaaatattgttcagacgagccagacataccattacaaatttctttgtacatatctatcatatcttccgctgacttgaaattttgcccagatttatttggagacttgatatctaaatcatacttggtacctgttcaggaaagaacagttccacaaggtaagaaataatacacaaaaacgtataacatagttgaaacttgcaagagcaagatattgataggctacacatttgatgatttaacatcttattcgtctcactagccaattgtgaatgacaatgccgagaaccaaaccaagactatccatgactacaagaagccgcaaaaaatcagttagccaggaagcagaaaattacctaaacaaaaattagtggcggcaatatcaatggctatctttatcttatcattgtaccctgttcggttgatagcttcttttacaagctccaaaccttccttgaggctgcatacagttgcaattacacatattaggcactaagccatcaaaccataacatggttttctcagtttcgacaatctacagatgcaagcagattagcatcagagaggaaaaatatatgtacctcgagatatctggagcaagaccaccatcttcaccaacattacatcccaaaccaccattcttttctgaaatgacagcctgccataaacagcaatagatcattctcaccttatacacaaatttacggatgcaattagaaaggtaacttctagaaagccatatatctttgaaaattgacctttaaatgatgatatgtctcagatccccattgcagggcctcctcaaatctacttgctccaattgggagaatcataatttcctaaacaaattatgaaaacacaacaatcattacatatgtaaatgaaattacttgaaaaccaaaagatttcttgaagaactttgagaaacagaaacgttaatagtgaacttaatgtagaatacctgaatggcaaaagtattcgaagcatgcttcccaccactcaaaacagtgaacgcaggtacaggtaacaccatgtttgctctgccactaagatcagaaagatgcttgcacaaagggacctgataataacttcaatcaaaatctcctaactaaagtaggcataaaatacataggataagagaaaatgttatcattcatacctctttctcagcagctccagccttgcatgccgcaattgacacagcaagtatagcattagcaccaagttcactctgcaagatattcaaatcaaattaatcatgaggagcaatgatatatgaacttgttacaatcctaataaaagttcccacctaccttcttttcagttttatccaaatctatcatagcctgatctatctgaccctgaagttttgggtccataccaatcaacgcctcagaaattttttcatttatgttcttaacagctttagccacactgtttccaagatacattcctttgtctccatcacgtagctcaatagcttcataccttgagaatcagtaaaccaatctcctcatgtcaggcttatcatattagagaattgtatatcaatcagagtaagaataattctcacgttccagaagaatcaccactgggaacagaagcacgaaaaacgcctttgttcgtgtgcagatcaacttcaactgttggaattcctctgctgtcaaggatctgtcgtgctttaaccttcgttatcacagatgatacagctttcttcagatgattagcctgcacttttccaattgaagattcaatgagtaatgtaacataatttcacttcgatacatgtaaatcaaaattcgaaggaaacttacgatgaagagaacgggatctgaggttttagcccttacggcggcattaacggcgtcttcgattttccgagaaagcatatgcttgtctaaatactcttgcacagacatcttcttcttcttcctcttccacggacttctcgattcgaatcttcaagcaaaatttcgatgaacaagtttgaatctgaaattcattttccgattgactgtattttttggttcacgctccggttcaggctccggttcaggatccaataagcatattcaatcattaaaacgatgagtttcactttacaaacacatgcttgccgtctgaggattttgctagtgcacatcactccgttttaagtcatgcagatttgaaatgaaaagagtaaaagcccattttaggcccaataagaagtctctcacgtgcgattgccaggttggaaccgcttttttatctctcataaagcacgtgcgagtgcgacgatgttttagtaactgctctccttaatggaatccagctgtcattcacacgaacatatttttttacgaaattcaaaaaaactttttatcacgagccattaatttttgaattttgccacccgttgccacctcgatttacgtggcattatctaaaccgtcgattcgatttcgaattaccaaatattagccgttaaaacctccttttctttataaatggaccctcctcttcttctctctctcataaaacaaaagatcctctctgcttctcctttccctttttcaaaatctctctctctctctctctttttagatccagttttagggttttcttctctgtgagcgaagatg

SEQ ID NO: 12050 - DNA, 3000 bp, Unknown; identical to SEQ ID NO: 12038
  misc_feature (1)..( 3000): cDNA_ID_3023706_gDNA_ID_2214528_Annot_ID_184849 3000 nt of promoter + ATG

SEQ ID NO: 12051 - DNA, 3000 bp, Unknown
  misc_feature (1)..( 3000): cDNA_ID_3023710_gDNA_ID_2214528_Annot_ID_184848 3000 nt of promoter + ATG
tgaagacaagagtgttaaagctggtggtgttattggttcacaggagctaaggaatatgcaagggattgataaactgatggataagcatacgaggtcttccttgtctaatacaagtacatcgtcttctctctggactgatgagtcatcgactgattccagtagaggtctttgtgcttctccttttcgtaaaaagatcaatcaccctcctttgcagtattatctcatgtcttctaagcctggagataattttcaagatttggagccacctcaagataacggtgatacttctcacagtcatagaagagatgggcagtttcatcagacccctcgtgcaactgcggtccaacagaatgagaagaaagatactgatgttaagattgttccaaagacaagaactctctttagtccatcgaagccagatagtccttcttgcacaaggataatatcaaagaatctagccgaggattttaagaagaaaggagagaagttggaagagagaatccgaaatcctcgtgttcatgatctctttggaaaagaaaagcctgctgctgtatttgtaccagggattgtttctcagaaacagtttattggtttgtccaagttctatgattcgaaagtgttactagctgagcgattggcggaaagtaaccgaaaggggttcacagagaggttagcgcatgggaaaactgcagttcttgactctgatgtaggtcctttccgacgtgaagctgatggaggaagtaagccattcttaaaacgtatcagcttcttatcagaaagatcatgttcagctccacgatcaagaaaggctgaatctagtccctctagaagcaggactctagatagaaggtcaacagaaacattacctaaacagtcagatcagaaaccagctaaagtcttatcagaaagagctaggagcatttcaccatttcgccgactcagcttcagcattggaaagtccagtaaaaactccaacaccgaagatgctaagactcctccacacttaagcacagcacttatttcatcacgagctggtttagacaatccatctgcctcttctttcagtgacagctcttcttttgataaaaccagtgcagcaaacagaggcaggtctagtccattgagaaggttactcgatcctttaataaaaccaaaatcaagccactcatgtagatctcctgagccatcactaaaggaagcaccttcaagtcaaccatcttcgtcatcctttctgtcgagaaatggaaaatcttcaactgttcaggctctatttcgtgtgacatctaagaatgatcaaccactcttcacttttgcggttgaaaaggaacaaagtattacagcagctacaataagaaaacagactctcccagagaaggaagactatggacacaagtatacttttttcactgttcaagaagtacagaagaaaaatgcaaaatggatgaacaacagcaggaaagtccaaagccaagagtacacatccaacattgtcgctcagatgagagtctcagatcctaagcctctatttctcgctggagaaagatctgcggaaaacctcttaactagagagtttgtacttgttgcatctgaatcgcagcggactaacgagctagctgccatggtgatcaagataccaaaacttacagacacaacaagctcaaccactcttggagattactttgcagaggttaacgcaacagtggtacttccaagtggagttcacagtctcccgcacaaaggagggccgtcatcactgatccaacgatggaaatcagatggatcatgtgactgtggaggctgggacacgggatgtaaccttagaatcctcacaaatcagcataataaacccataaacccttctccaaccacttcagatgccttcaagcttttctttcaggtttgttatataacatctcaaaactctgaatactaagaccaacctttggcttaaattatgaatctcactaatgtgagttttgttgcagggaggagtacaggagaataacaaccaaccatacttgagtttcactacatacagagaaggtgtttacgcggttgagtacaatacatcgctctcactcttgcaagcattctccatttgtatagcggttaacgagggacgaaatccgttaataaagaccaccgtggaacccaacacttcacgtgtagagaagaaagcttatggaggagagatgtcatcgattcaaaacgagaatttgaagtcattttcaggtcctattgaagctgaggctccggctaggtatctctcacaccacccacctttgtctcctgttgggagggtttagttgcttcttcaaataatcttgttatatatatttttttcttttcttttctcttctgatggggttcgtattttctgtgtaattacggcgtggaagtagattacgttaaatagagaaatttgtgaaacttgttgtaatcgaatatccacatttaagctaataaaaactcttatgttcttgacttctttcttcttcaattacaattaccatgatcatgtaacataaactctgtcgtgttagttgttactttagtagtttagttagcattgttaaaaccataaaatgcaaacattaagcaaaaaaaaaaaagaggaaaaagatggtgctgcccaggatcgaactggagaccttttgcgtgtaaggcaaacgtgataaccactacaccacagcaccttgctgttcaagattatcatttaattctatataaagtttagaatacagaattggctttggtttgcgtagattgcacaaaaaggtgagtcctttctccgacaacgcaaagactcatttgaatcggttccttcaaaattattgatttgggaatatattcttgtcaattcaggtgaatcaaactggtcggtgcaattcaagattgccctcgtatttgtgtcggggaatgaaactgttctgtctttcttacaaaagcagttgcatttgatcttgctgcagagattaatgttcattctcaatcttaacc

SEQ ID NO: 12052 - DNA, 3000 bp, Unknown; identical to SEQ ID NO: 12037
  misc_feature (1)..( 3000): cDNA_ID_2708225_gDNA_ID_2214528_Annot_ID_184847 3000 nt of promoter + ATG

SEQ ID NO: 12053 - DNA, 3000 bp, Unknown; identical to SEQ ID NO: 12036
  misc_feature (1)..( 3000): cDNA_ID_2708189_gDNA_ID_2214528_Annot_ID_184845 3000 nt of promoter + ATG

SEQ ID NO: 12054 - DNA, 3000 bp, Unknown; identical to SEQ ID NO: 12035
  misc_feature (1)..( 3000): cDNA_ID_2708221_gDNA_ID_2214528_Annot_ID_184844 3000 nt of promoter + ATG

SEQ ID NO: 12055 - DNA, 3000 bp, Unknown; identical to SEQ ID NO: 12034
  misc_feature (1)..( 3000): cDNA_ID_1808515_gDNA_ID_2214528_Annot_ID_184842 3000 nt of promoter + ATG

SEQ ID NO: 12056 - DNA, 3000 bp, Unknown; identical to SEQ ID NO: 12033
  misc_feature (1)..( 3000): cDNA_ID_1009988_gDNA_ID_2214528_Annot_ID_184841 3000 nt of promoter + ATG

SEQ ID NO: 12057 - DNA, 3000 bp, Unknown; identical to SEQ ID NO: 12013
  misc_feature (1)..( 3000): cDNA_ID_2708154_gDNA_ID_2214528_Annot_ID_184817 3000 nt of promoter + ATG

SEQ ID NO: 12058 - DNA, 3000 bp, Unknown; identical to SEQ ID NO: 12049
  misc_feature (1)..( 3000): cDNA_ID_2711397_gDNA_ID_2214528_Annot_ID_134234 3000 nt of promoter + ATG

SEQ ID NO: 12059 - DNA, 3000 bp, Unknown; identical to SEQ ID NO: 12048
  misc_feature (1)..( 3000): cDNA_ID_2781831_gDNA_ID_2214528_Annot_ID_134235 3000 nt of promoter + ATG

SEQ ID NO: 12060 - DNA, 3000 bp, Unknown; identical to SEQ ID NO: 12047
  misc_feature (1)..( 3000): cDNA_ID_2708229_gDNA_ID_2214528_Annot_ID_134237 3000 nt of promoter + ATG

SEQ ID NO: 12061 - DNA, 3000 bp, Unknown
  misc_feature (1)..( 3000): cDNA_ID_1383470_gDNA_ID_2214529_Annot_ID_134240 3000 nt of promoter + ATG
cttcggtatctcaattccgagctcgaaatgaacttggtgtcgtcggcaatgtttgcaagttaaaacatgttcgacactcctgaccttttgcgtgtattagcattatgatgtaatcgacatccttttcttagccaccaaccttgtagagttctagtctttagagaactgatcattttcagtagctgagacgtgaaaaccttctatatttgagctctgcgatggctttcttttggtcgtaaagccaaagcaacattgatgcaactgcttccggtagccatcaccgatgcaggataagacttttggtaattgaatagaattgctcagacaaaggtaggaaataaactctagttctcatttctcttcaaagtttacatttttttttttttatgtttttacatttttgtgatagcaagtttgagaatgaacatcataaagatacaaagttacagatttttgttgtggaagcaaatactaaaaattacaaaggtacagtggtggctaaagatacacagaccgaactgctctgacttctctgactagttaacaacatatctcttcagcgaggctggtggatgtttctcggagcagcagcaaccctctggtttccccatttcgctggcttttccgcatacttagctggttccacaatcgatctcgggctcctgtttccacttgatttcttaaccatctcaccattctttccaaagcctgatgatatatataaacaacaattagcctccacaaatctactgatcttggatggttctatgtatcaggggaatgaaaccgacttaccaaattcggaaggtgcttggtaatacattcttccatcgaatccttgatcaaactcagcagcatcagtgtcaaagaaatcttccatatcatcaaaatcaaatgattctggaagaagatcagctacatcgatatgacctccaccattctcattctctccgttgtcatagaaaccatccgcgccttgctgctgctgactgatccagtaatcagggtaccaagtcgaagttgtcaccaattgccaccactccggtgagaaatcttccacttgtcgtacagctgccggaataaaaagaggtgcgtcggggtttagagtagatcgtcttcctgataccatcgccattctcaaaactctagatctgcacacacaaacaaacaagctcagttcaaattcaaattcaaatctaacaactcaatcacaacatagcttaatccttagatcaatagatctgtacgatcagtaaacatagcaacaataagtttccgattagatcacttgaagtaggacaagtacaagtttgaaatcgagagaactgaagataaatcaagttttaagatagatcaacaaccatcacagagatctaataccatggaaaccaatcaaatccttcaaaatccacgaacttcaaatatagaaattgatcgagtagagaagaagacaacatcagatctttaccttggccgaggaaaatatctgctgcaacttgctcaagttgatcaagttgataaatatgtcttcttatttttttaaaagctaaacggattaggatcattcaccagaacctacgttgcgagaagatgagaagaagaaggactaatatataaagtaaggttcggtgacgaagctggggttcgtaacgtcgaggcaggattaaaggtgagacacaagtgggtaggtctggacccatagctaacatggttctgagtaatcaaccgtccacgtgtagacgcgttactgttggcttttattgactttctttttcgttccaatcctgttggctactcacactaaaaagttaaattattattctttctataaaatatcttaaatttggtcggaaagaggataaggtaggaggaaactaatccaatataagcccatttatgaccgtatgggcctaacccactcatgattttgttttacatcatcattttgggcctaatcctagaatctacttttggtacttacgttttcggtattgtatcgtgtaagtaccaaaagtagattctaggatttacgtaatgtctgagatgtgcatttttataggacatcaagtttgaaaagctaaccaatgacaatgaagaaccaaattctaaggtaatctatacaaggacaccaagatcattaaggtgtcgaacaactaggattatcgaaatgaacatacataattttctgcttcattgttatgttgcaaaacggaatgactgatcatattttcttctttgcatcaaccacttacggtcagttttagaatagcagtggcaaaactagtagatgaagtagctcaaagagaacgatgtgtaattggcgggaaggaaaatgttgtagtgaagtccaggccattgctactttcacaatgtgattcagcaagccttttcaagagattggaaaccttaaaatgtatatatgtacatgaatatctcctcttttttagtatacattggaagtaggtaagtggggtttagaatgtagacacttttactttatctattgtgtacatctatttatcatatgttgtaatgtgtcttaagtcaatcgactcgataaaacaaaatgaatttctatattctaaggaaatttgaagtaagatacaaaaagaaattaagcatcactagatttcatacagaacattagaaaaaacaacagaataaacaaccaatcaataatctttgttctccaattaattaagttctattaaacaaaaaaaaaacagaaataatatcgctgcaaaaggcagaaaccgcgtgaatcttgttttaatttaaccttttttattggtagtttcattttaattcatcgtattgaacgctagcctaaagttatggataaaaacaagaaaaatcaaataactgcaaaacgcgttatacttaaaacactctcctcttttccttgtccttctctatcgcttctataaactttttcgatctaaggttcgtgatctccttcttctctacgaagtttacactttttcttcaaaggaaacaatg

SEQ ID NO: 12062 - DNA, 3000 bp, Unknown
  misc_feature (1)..( 3000): cDNA_ID_2708249_gDNA_ID_2214529_Annot_ID_134241 3000 nt of promoter + ATG
accaaaaccctcttacaaataaatcccgaagctttatgcagagagagagagactccaatcagaagcaagcatccaagagacagcaacaacacagagcagcaagactgcaaaagcaaaaacagtgtttacatttcacaatcagtattaaaaacaaatccagttgctttaagacatgcaatgtagtaagcagtagctagatcatgcaaacaatcaaatcctaaaagatgcacattcatcaaaaacaacatccgattcacactgttaagtaaagccatcaaagaacaacaattatcctgtattcagtgaaggaacagagaacacaaaaaggatccatcttgctaagccaatttacttatcaaaacttgtacaagtatagtttcaagtactcataaacagttaaacactaccaaaccaataacgacaagaacacaatcacaattctagtttctttaaagcatgcaatgttgtagtaaccagtagctagatcatgcaaacatgttaaatcctaaaagatgcaaattcattaaacacaacaacaattgtcctgtgatcagtgaatgaacagagatcacaaaaagtcaacctctacagaggaatattctagctaaaaccacatgaccttttgttcaaagaatctctagaagaaatatttaaaataaggaatatagtcaaattcaaactatacacaaaatctaattagtaaaaacagattaaatataatggagtgtgtttattgactaaccatccttctagaaagccaggactgctctgttgttgctgatgctgcggtggtggaggatattgaggcgcgtacggtggaggatatccttgctgaggataaccttgttgaggatatccctgaggtggatagccttgctgaggatatccctgaggaggatatccttgtggtggataagcatcttttggatatccctccggtggataacctattgatacaatttcagcacaaacaaaattcagatccgtcgtacaaaaacaataatcagtaccaaattaagcagatctaagaaaaaattacaaatctaaaaaccgaaacttctaaaagtaatcgaaaatagaaggaaagaggaccttgaggaggaggaacaccaacgggaggttgattgtactggctcattgtttcctttgaagaaaaagtgtaaacttcgtagagaagaaggagatcacgaaccttagatcgaaaaagtttatagaagcgatagagaaggacaaggaaaagaggagagtgttttaagtataacgcgttttgcagttatttgatttttcttgtttttatccataactttaggctagcgttcaatacgatgaattaaaatgaaactaccaataaaaaaggttaaattaaaacaagattcacgcggtttctgccttttgcagcgatattatttctgttttttttttgtttaatagaacttaattaattggagaacaaagattattgattggttgtttattctgttgttttttctaatgttctgtatgaaatctagtgatgcttaatttctttttgtatcttacttcaaatttccttagaatatagaaattcattttgttttatcgagtcgattgacttaagacacattacaacatatgataaatagatgtacacaatagataaagtaaaagtgtctacattctaaaccccacttacctacttccaatgtatactaaaaaagaggagatattcatgtacatatatacattttaaggtttccaatctcttgaaaaggcttgctgaatcacattgtgaaagtagcaatggcctggacttcactacaacattttccttcccgccaattacacatcgttctctttgagctacttcatctactagttttgccactgctattctaaaactgaccgtaagtggttgatgcaaagaagaaaatatgatcagtcattccgttttgcaacataacaatgaagcagaaaattatgtatgttcatttcgataatcctagttgttcgacaccttaatgatcttggtgtccttgtatagattaccttagaatttggttcttcattgtcattggttagcttttcaaacttgatgtcctataaaaatgcacatctcagacattacgtaaatcctagaatctacttttggtacttacacgatacaataccgaaaacgtaagtaccaaaagtagattctaggattaggcccaaaatgatgatgtaaaacaaaatcatgagtgggttaggcccatacggtcataaatgggcttatattggattagtttcctcctaccttatcctctttccgaccaaatttaagatattttatagaaagaataataatttaactttttagtgtgagtagccaacaggattggaacgaaaaagaaagtcaataaaagccaacagtaacgcgtctacacgtggacggttgattactcagaaccatgttagctatgggtccagacctacccacttgtgtctcacctttaatcctgcctcgacgttacgaaccccagcttcgtcaccgaaccttactttatatattagtccttcttcttctcatcttctcgcaacgtaggttctggtgaatgatcctaatccgtttagcttttaaaaaaataagaagacatatttatcaacttgatcaacttgagcaagttgcagcagatattttcctcggccaaggtaaagatctgatgttgtcttcttctctactcgatcaatttctatatttgaagttcgtggattttgaaggatttgattggtttccatggtattagatctctgtgatggttgttgatctatcttaaaacttgatttatcttcagttctctcgatttcaaacttgtacttgtcctacttcaagtgatctaatcggaaacttattgttgctatgtttactgatcgtacagatctattgatctaaggattaagctatgttgtgattgagttgttagatttgaatttgaatttgaactgagcttgtttgtttgtgtgtgcagatctagagttttgaga

SEQ ID NO: 12063 - DNA, 3000 bp, Unknown
  misc_feature (1)..( 3000): cDNA_ID_2711427_gDNA_ID_2214529_Annot_ID_134243 3000 nt of promoter + ATG
aaaaaaacatatttacaattattaatttatatagttaatttttaattttcttaactaaaatagaaaactaacaataagatataaattttaagatataaatttatttaaatatttattgataatatttaaaataatatggaaaactaacaataagatggaaaacatatatatatatatatatatatttcgaaacaaatgtaaaaaacagaaaaaggaagtaagtgtaatgtaactttttccgttttccattacaatttggggaatttttttatttttttttgggttaaaaataaggtttgccttggataacaagaaattgcttttgctttctatcagatattaactttgggtttccttcgatccgattagaaatctcgagaatggggagaggaaggattaagatgaagttgaaagggaggcgaagagatttgacgaagaagaaggtgagagagctctgcgattattgcggattctctagcggcatcattaggtaaactcgctgaatcaattattattattagcttcgcttcttgcggaaagggttctattttatagggttttgttgttgaaatagttcttaattaggttattgagatgtagaacacgttggttatgagttacataccctagccatcgcaagatctggttctgcaatttttgattcatcgtttcgtttttctgggctagagctattactgttgggtttggtagaattatttggatctcatattaatatctcttttttctgcaacataactatgcttgtaatcacctaaacaacagtttaaaccaaagccctgactttcttctgtgtttgcaaactctttctaggtatgatgaacaaaggccacacgaacgagatcacgaagcagtggtatgtatcttgtatggactttgatctctctgtatatcttatttttgctcacaaattgtttttcacacttcttctagtctatggagaatgaactcaagagattacggcttttaaccaggtctaactcattaacatttcccatttcttgttctgaaaagttatccctctcctctctttgctttgtgattcttatgatgtatatcctttattcccaggagaatgacttgtaaggatctcgatggtctgactttccccgagctgctatcacttaaaagccatctacagactgccttgctcattgtgaaggaccaaacggtgagtaaccaaaatttaaaatcggggaaaaaataagaaataatgcatcttacttctttcttctatcattcaaagcgttaaacaaaccacctttttttttatttattttttaaactgttacagaagaagatagagcagctgcttaaagaagatgatgggtggatgcttatacgggtaaacatttcctaggcacttcatctgccctatgaaattattgtttgtgaatctgctaggagctgctgttcatgttgattcttgtaatatcttccatgtttgaagctttcttacattttttgtagaggaaggacgcagaggatggtatggggagagaggtttctgttccctgcaaattctctaccagcaggttgtctcctccttcctagcttaagtaggaatttttggttctaagttgtagttgtctggtgccccattaaagcctgatttggtcttggtatatctacagcacgggtgagagacaaggtgatgaagcaccagcaccaccgctggtatgtatattaatattctttcacagtcctgcatgcctctctctttaccccacattgtcttgttatacttgtgcatcttttattgcagtcgcaactgcagctacaattcgagagacgaaatgctgaacccatgatgatcgaatacgggagattatggctgttgaaggagtaaatgcgtcgccatcccacttgttgctctctacagagtcgatgtcagtttcactttgtttctgatggtttgtttctttttccttcttttcgtgaaaactgacaggagaatgaacggtagacagctcgacggtatgaacaatgccgagctggccttacttcaagctaagatagtacatggattgcaggagttgcacgagcatatgtatgcaccaacaatggaaaaaatcgctaagaagcgcagatatctgttaagagaggttcccggccggagctgagcgcgagggacgatgaaagctcagaaggccacacccggccatcaaatctttctatgagactcttaagtgacttctggtttctctatttctattttagtttatcgtcaatcctgactttcctcatgtcgggcctctcttagttgattttaatatgtcttaagtaaatttactaatctattatcatagtcgtggcatgttacagatttctgttatatcatttttttgcttcatacttagaactttccgacctcttctatcaacatcaccttgatcctcaaaattaggcgtgggcgttcgggatcggttcttttttttcgggtatcgggtctattcggataggaggttgagaactattcgggtattctaaaaatttggttcagattcgggtcggtttagttattttagtaaaaatataaaaataaccaaaaatatccaaaatattttcgggtttgggtcggattcgggattttttactcacatatacttaaatctacccaaaatacccgattatcagtaaatatattggttactttttatccaaatgtaaccaaaatacttaaattacctaaaaaaacctataacattcgggttttttcgtttgatgcgaaaagtctcgtcttgactcttgaagatttggttttttgactccacaagtcgtcgatttgacattcgaacaaatgattagtcagacgatcagaaacgctccaaaacgcagcgctttggctagaacagagctttaagacacctatgttaatacgaaaataccctctgataaacttatttatacactcgacgtttcgtttttttttccagttttctgaaaagtaaattatttgaaatcccgctctgaatttttaca

SEQ ID NO: 12064 - DNA, 3000 bp, Unknown
  misc_feature (1)..( 3000): cDNA_ID_2708245_gDNA_ID_2214529_Annot_ID_134244 3000 nt of promoter + ATG
aagtcaaaggtctgaaattagattaccaaatatccccattcccaattaagtaacaatcctccattattcttcaataaataagcgggaagcttgagtagattacaagaatgacccaactgataaaaaaaacggctcctttaaatgcaaaaaaactcctttcagtttcaaaggtatcgtctccctcaaaatcacaagctctacatacaattcctgctcacatcatcacatggcttcatcagattcgtcttactctcggaaattcttactcatcacctttcttcctctttccttggcctgcttggccttcctcctccaatggcgaagcggagtcaacgattccgttacgcagtggtttgatgataactatccgttcccaggaatggccactgtctccgagaaacgttctcttcgttctgattcgagctgcgtttctcttctgggtcagagccgtacgcaagcgtttccttatctccgagatttgaagcttgatcacaagcccgatcttaaacctagggttagaaatcttggttttcaatttgatgggttttgagaaatgttaagacttgattcatttgatgatgtaaaaatcgatttttttttgtagatatgtataacgacgagcacttctgctgggttagagcagacattgccatggatattctatcacaaggtcattggagttgaaactttttatctatttgttgaaggcactgctgcttccccaaacgtttctcgagttttggagacaatccctgtgagcttttacgagtcttgttttgttatagttgctctgttcatgaatcctgatgtttggctttatgttaccttctaattctcagtgatgatatttgtttgcagggtgtaaatgttatatacaggacaagagagttagaagaagaacaagctaaaaggtattcttgtgttttgtctgtcattaagttatggatttagagccatgtagattagaaaaatggaggatttgaaggaaccacctctggttatttagacatacctagatatattggtgtctcattggtgtgctcttgtgttatgcttctttgcatcttgttcttcaaaactgaaatggttctttgcatcttgttctttcaaaaaagatcatttcatttgaagttttattacattttctttggtttatagccggatatggaatgagacttggttggagaagtttttctacaaaccgtgtaattacgaattattcgtcaaacaaaacttgaatatggaaatggctatcaccatggcaagggtacctgttacattcagttagtcactagaaagataaattatagaattgccaacttttttcacattctctccttttgcttggtatattataggatgctggtatggactggatactgcatcttgatactgatgagcttgtacatccttctggaacccgtgaatattccttgagaaatttgctcagagatgttcctgcagatgtggatgaagttatctttacaaattacgtgagttaaaagtctttgaagacattggaattggggtttctttctttggtttgacgatggtgatgactcgcaaatgttcctttttcaggagagcagcgttgagcgagatgatatcaaggaacctttcactgaagtacagaacattatcatctagagcttgctatcttgggacatatcttcatatgagttttatcatcaaaagtgtttgtttttgaacttttaggtatcaatgttcaagaagaattttaaacatcttcctagagaagtttactatggaaactataaagaggcaactcgtggcaatccaaactattttcttacctatgcaaatgggaaatccgctgctcggattcaagaccatcttcggcccaatggtgctcatcgctggcacaactacaagacgtatccaaagtatgttcttttcctcacttagcttaaacatagacattcattcttttgcttttgtaatctgacattgattccatctttgttgtgacagcatcaaggaactagacgaagctgcgattcttcactacacttactcgaaattttcagatcttacttcaagacgtgatcgatgtggctgcaaaccaacaaaaaaagatgtcaagagatgtttcatgctagactttgacagagccgtaagctagttttgatttgtttatgtcgattagtatagttcttgttcatcacattttgtatttgtttttgtttctgcaggcattcatcattgcttcaacttcaacttcagaggaaatgctccaatggtacagagaaagagttgtatggactgacgataatttgatcctaaaacttcttaggaaaggaattctgactcgcatttatgcaccaatggtcagttagttttactactaaatctacatcctcttttaaatgcttttcattgaacaaagctatcatctatctcaggttataatccaagagctaagagaagccggtgttttcagctcagtggtaacttcagctcatatgtctctctcaaagaatagaagcaactcttcaacctcaagcaactactaggaaggtgttggagtttgatcttgttggtgaatcttaagcagtatcagcgataccaccgaaagcatctccaggcttggaaaaaatccaaaatgtttaattataactttcttgaaaatagacttcaaaaacttgcagagagatgaaacagagattttctgtacattttcgacaagattttttttttgcttaggtaactatacaagaagaacattagagcaggctttgtggatctacttggaccattaatatacattctatgtaaaatgcttggatttttctgttggtcttgaatcttgatatgaagaaggaatcatagtatgatagtgtctgtgtttaaagactagtgttatagagtgaccaaaagacagtggagtgggcgcgtgtcatatacgcgcgtacgagctttttttttggcggttctttgcctctccttcctctcgagtctcgagtttgtgccctttattcg

SEQ ID NO: 12065 - DNA, 533 bp, Unknown
  misc_feature (1)..( 533): cDNA_ID_2708241_gDNA_ID_2214529_Annot_ID_184883 3000 nt of promoter + ATG
ttttcttctatattcgatctcaattattagattcttttttgtagtaaatataaaaacaatgatttcgattgagacaaaactacaagtgaggctgatgtgaacggggaaaaatagtgacggcttatatctgaattacgttgtgaacacgtttgtttatttcatggattgctaaactttgaggatatagcaaagaagctttaagtaaagcaaacgaatcattaatattttgggaggatgtatatatatatttgaagttgttgttgttgttgtttaaaactgttttttttttcttgtaattaaggttgaaacagattttgaaaggacgttagcacgaaactcgtaaataacgcatgtttattttccaaataaatttataataaaactattatacatcaaaacccattaattcatcatagtggcaaccaagtgtatatagcaatataaatcaattttttaaaaacaacttctgtaaacaaaaggaaagtgaaggcactatgtgtccccacacggttccattgagacaaaggcatatg

SEQ ID NO: 12066 - DNA, 2981 bp, Unknown
  misc_feature (1)..( 2981): cDNA_ID_3023777_gDNA_ID_2214529_Annot_ID_184882 3000 nt of promoter + ATG
ttttcttctatattcgatctcaattattagattcttttttgtagtaaatataaaaacaatgatttcgattgagacaaaactacaagtgaggctgatgtgaacggggaaaaatagtgacggcttatatctgaattacgttgtgaacacgtttgtttatttcatggattgctaaactttgaggatatagcaaagaagctttaagtaaagcaaacgaatcattaatattttgggaggatgtatatatatatttgaagttgttgttgttgttgtttaaaactgttttttttttcttgtaattaaggttgaaacagattttgaaaggacgttagcacgaaactcgtaaataacgcatgtttattttccaaataaatttataataaaactattatacatcaaaacccattaattcatcatagtggcaaccaagtgtatatagcaatataaatcaattttttaaaaacaacttctgtaaacaaaaggaaagtgaaggcactatgtgtccccacacggttccattgagacaaaggcatatgtatgtgtgtgagtataaatataagttggttcttgaacatcattgcatgttgattaatcacacagcacaaataagagttagaaaaatgggagtgtacttaggtaagtattgttatataatgataataatgttagtgttggtgttgggaaaagaagtgagaagccagttgttaaaaaatggttattattcaacttcatgtccaaaagctgagtcgatagttagatccactgttgaatctcactttgattctgatcccacaatttcccctggcttgcttaggcttcatttccatgactgttttgttcaggtttcaattttaatttttcttttgctaatctcaatctcctttctatcaattatgcaagttaattaattgttgaatatgacctattattagggttgtgatggttcggttttaatcaaagggaaatctgcggagcaagctgctctaccaaatcttggtctaagaggtttagaagtgatcgatgatgctaaagcccggcttgaggcggtgtgtccaggagttgtgtcatgtgcagatatacttgcacttgctgctcgtgactctgttgacttggtacgcaagattactaaacctagttagggtacttaattcctttgctagtgttaaaattactgatatcagctgagctatgtatatgtatgtatgaaaacaagagtgatgggccaagctggcgagtaccaacgggtcgtaaagacgggagaatctcgttggcaactgaagcatcgaatctaccttctccacttgactctgttgctgttcaaaagcaaaagtttcaagataaaggattggatactcatgatctagttactctactaggtatatctatctatctcttttataataggaaattggagaacttttaaggaagattattttctactttattgttgagtttgtttattttttatattataataaaaagttatacatatgctcaaaagaaacataaagagtttcctcaacaattgaaagtaaaatatgctagctgctgcacacatcacataccaacatgaaaaagtgcaagtgattaaaagttggagtgaaccctgtttcattttgttgatacttttttgaaacttttgaaaaaactagttataaaagtaatagccgtagctagcttttgtcgccgtcgtactcaaatagatcaagaatactaagaagttgagacatgaatttaacaaacatttgacacaactcttgttttgtaagggaaaatataagacacccttgcgattagaccatcttaaagagtaactaaattgtacttgttgtttctgatgaacataccaggattttgtttctttgaacaacaatcaattaccttacctaaattttatgatcaggtgcacatacaattggacaaaccgactgtctcttcttccgttaccgtttatacaacttcacggtgaccggaaactccgatccaaccataagcccatcgtttcttacacagctcaagactctttgtcctcccaatggagacggttcgaaacgtgttgctcttgacattggtagcccctcaaaattcgatgaaagtttcttcaagaacttacgcgacggaaacgctattctagagtcggaccaacggctttggtcggacgccgagacaaatgccgtggtgaagaagtatgcgagtcgtcttagaggtttgttagggtttaggtttgattatgagtttggtaaagctatgattaagatgagttccattgatgtaaagactgacgttgatggcgaggttaggaaagtttgttccaaggtgaactagtttgaataaagacatatagtatatgtattcggtttctctatgtttcagatttctaatcactgaatgcatgttacgtaattgtcgtctttcaatatttatttttcagttttttatttctctagaaaaaatagtgagtttgttttggatggtaaaacagtatatgctaatctttatatacacattttttttccttcagaataatttacaaaggttagtattcatagtcaacaaatggacaatcaaattagttcctttttttttcttatcaacaaaataacatagtcaaaaacaaattaataatgaattttctgttaaattaccatttttactaattaataatgaataaaaaattaataatagtttccatttttaccaataatactctttttattaaattacctttctatcaatgattgttttccattttatagtgatttagcaaaactatgcatatataggacaaaaaaatcgtggttggcaaaagaaaaccaattagattctgacaaactaacaaagaatatcaacttctctcatttattaaaatacgcgtgatcctcgtgtcggtctcttagagtaattgtttggtttgatccaaatctccaaaaaccactaagatctgaccattttgttcatcgactttttcaactcaaaacaaaatg

SEQ ID NO: 12067 - DNA, 3000 bp, Unknown; identical to SEQ ID NO: 12064
  misc_feature (1)..( 3000): cDNA_ID_2708245_gDNA_ID_2214529_Annot_ID_184881 3000 nt of promoter + ATG

SEQ ID NO: 12068 - DNA, 3000 bp, Unknown
  misc_feature (1)..( 3000): cDNA_ID_3023785_gDNA_ID_2214529_Annot_ID_184879 3000 nt of promoter + ATG
aagaagctgaaaggccgcacaaacaggtaaagtattctaattcttaatttagctgtcttctttttttttgccctgtatccaaattttttttgttgaggaaagtcagttttaccctttccagtctaaaatctctcacaaggccattgcttttgcctctcctttttttcttcttaaagttccttgttgaccttgcaagttcttaagctttctcaccttttacttctttctttcttttttctgtcttctcgggtaattacgtatctgacatatatcacaatccccttcgattttgcagaagaaggaagcagagcatgatgctgacggtatgaggagaggggttttggttccttgcaaattctctgccagcaggtaatctctctgctaaagaattgagttattttttgttgggtttggtcacaacaatttgtgtgtctgtgcaaatgggaaccattttttttctagggtttctttctgtcgaagtgagtgtatatgaaacctgccctttttttttttttttatgagctatataaaccaaaatcagttgtagtttcgtccttattagctactattggactcaacagtgggagttgaatccttcatctctcagaatctgagggagatcacttgtttttttttgttcttcttttcaaagttgtagctgtcttggtgcagcatatcacgttatgatgtcttgctttttgatcatcgaaaccaattgtgtaaaaggaaaggctgacttgacttgttctgcatatatataatacagcttgggagaaagacaggaagatccaaatggtgaagcaccactggtgcgcgtatattctcttctcttccttatctcttttctttcctcagactgtgtctttaaaatcctcattttcttgcagctgcaaatgcagagggaattcgagcaacgcagctctgaatccttgcagagcgagttcgacaaattatggctttttaacgagtaataactcaataccatttcccacttcttgctctgcagaagtctctgtttctttttttcttttctttcattttgggttttctttcatctcacaggagaatgaatggtagagagctcgagggtatgacttccttcgacctgtccatacttcacattcagatattacgagctctacgggctttgattgaccaaaagttgggaccaagacaagaacatagggcatggcagcgcggagaggtaaaaatttatctatcagtgtatattatatgtttttagtaactagtgtatctgaatcgtttcttctattcacacattttcttagcttgtttgccacaccgacaaggaatcagtctctgggttagctgagcccgggagatgttcgtcggataatgacaaggatgctgactcttccttgcaatgtagacttcttctcgtttcaagaaagctcagaagattccataattcttatcagcggaagagcatgccggagaccaggtcggtctgccagagtcgagtgacttccgattgaccttatctgccctggttgctgctttctctgtttctatgttgacatatcaacttgccactttatttgtcttagtcttgaagtctacgcatcttggattgtaaacttagaaataccaattagagtttaatttattaccaaggtaagatgttgttttaagactcgaggggtttcatatctcaccatgttaggacttgtgggtttcatagagcatcaatgagcttcttttatttgtaagagattctctaacacatgacgatcgattactctataaactagataaattaatccgtatgttattctagttaataagggattacgtttctttttaccgcatttctgattaataaaaaccattgttttcaagcttgacccagatcattcgatccgaccagttaacctacgacccaaacatttttccgatttagttttagtgctaatatccgacaaattcaaaaaaaaaaaaaaaatcataaaaattcaccattgatccgcaaccccaatgaaccggttgaaccatctaaacttattcagttatctttagaaaaaatttcagtttttaaactcatttgatgtttttttttttggtgaagacttcacaatatcaccttaagagaatgaatggaattatgagagagacaaccaaaattatttgtttggattcgcgatgttttcttagtttatttttgtcattggtgattttttactatatttgttatggttttaaacttatagttagaattaaaaaatttaatcactttattattattgtttgatttcatgtttttgttaaacattatatgattatttgttgtttttctatttatagaagctatataatctttataaatattaagtatattaaataaattataatcaattgatatgtggtccagcaaggttgattatgtgaatcagaaaataatctggtttaccgtcacgctcggatttaaaaacattgataaaaatacattatatatatatatatcttattatataatgtacggttttaaaagttactaactcaccaaattatgacacgtgacagttttatcaatttaagattttgacatgtgttagagtttttttttttacttttttccttaaataaaataaaggaaactaaaaaaaaaacatatttacaattattaatttatatagttaatttttaattttcttaactaaaatagaaaactaacaataagatataaattttaagatataaatttatttaaatatttattgataatatttaaaataatatggaaaactaacaataagatggaaaacatatatatatatatatatatatttcgaaacaaatgtaaaaaacagaaaaaggaagtaagtgtaatgtaactttttccgttttccattacaatttggggaatttttttatttttttttgggttaaaaataaggtttgccttggataacaagaaattgcttttgctttctatcagatattaactttgggtttccttcgatccgattagaaatctcgaga

SEQ ID NO: 12069 - DNA, 3000 bp, Unknown; identical to SEQ ID NO: 12062
  misc_feature (1)..( 3000): cDNA_ID_2708249_gDNA_ID_2214529_Annot_ID_184877 3000 nt of promoter + ATG

SEQ ID NO: 12070 - DNA, 3000 bp, Unknown
  misc_feature (1)..( 3000): cDNA_ID_3023793_gDNA_ID_2214529_Annot_ID_184876 3000 nt of promoter + ATG
gtaatatttccccctatttcaccttttgctccagcacaatggatcggacatccataaggtgactttgaagagctagcagctcggtgaagctgacaatatcttccttcccagtcattctcctggaatcatgaaagaaaactcatcaaccaaaatgaatatgcagaacaagaaagtgggaaacgcacgcaggcatacttgatcaaaagccgtaatctctcgacttctttccgcagctgcaaggagagaagttgaatgtaagcaaaaacacaggtataacatacaaagagatagatatatgagtacataagtaattacataccactgcttcattgtcttgctcctgcagcttatcttcagagctgcatccatatctggaaaaaggccaaggggtttaggtttaagtttattgtctgattcaatcatatcctcagattcagattcagattccgagatccaactaagccgagtaaatagctaatcaataaacctaataagcagattttgtgatggttcccatatcctaaattacttcaaagacctaaatcaacaatgaaaaccctagaaaatcgaacccttgtttgccatctgtgagccaagtacctgctgctggagaattcgcagaaattgcagggccctctcgtcttgttcgttagatctcttcgcttcctcttcatctgatcgccctctctccccatcgaatcggatcgaccgaaacccaatttttctttttttccactttggaaattgcgaggattgttgttacatgtatagacggagttttttgccaaaaaaaaaaaaaaagtacagacggagtttttttggtccaatattatggaaaatttcctaaagtaatttagggaaattgagttgtttgaccacaaaaagaaaaattatggacattgagtttgttacacattttgctagtagccgcataacatcaatagatgaaattgaattagataatcaaatcatagagcccaaaatgactaacaaccaaattagagtggaaaaaaaacagaaccgcaagaacccaaattctagacgaacctgagattttgactgtgtagtttctgggaaatttgatttgaatgcttttgggtccggattcacaggtgaaattcttaccatccactgcaacctcgtaatcacctggagaaatcgaatcaaaacacacgaagattcatttgattgatcggagttttctgaataaaatcaagggctttccgagttcttaccgatagagtacagagaagactgcatcggcgatgctctctttggcgccattgtaataattcagagcgggatttcaaataatttacttttcagaaaactggaaaaaaaaacgaaacgtcgagtgtataaataagtttatcagagggtattttcgtattaacataggtgtcttaaagctctgttctagccaaagcgctgcgttttggagcgtttctgatcgtctgactaatcatttgttcgaatgtcaaatcgacgacttgtggagtcaaaaaaacaaagcttcaagagtcaagacgagagttttcgcatcaaacgaaagaaaagtctcattttccccatttttgatggggaatttactaagtccggtttaaatttggacatgtcttcggtatctcaattccgagctcgaaatgaacttggtgtcgtcggcaatgtttgcaagttaaaacatgttcgacactcctgaccttttgcgtgtattagcattatgatgtaatcgacatccttttcttagccaccaaccttgtagagttctagtctttagagaactgatcattttcagtagctgagacgtgaaaaccttctatatttgagctctgcgatggctttcttttggtcgtaaagccaaagcaacattgatgcaactgcttccggtagccatcaccgatgcaggataagacttttggtaattgaatagaattgctcagacaaaggtaggaaataaactctagttctcatttctcttcaaagtttacatttttttttttttatgtttttacatttttgtgatagcaagtttgagaatgaacatcataaagatacaaagttacagatttttgttgtggaagcaaatactaaaaattacaaaggtacagtggtggctaaagatacacagaccgaactgctctgacttctctgactagttaacaacatatctcttcagcgaggctggtggatgtttctcggagcagcagcaaccctctggtttccccatttcgctggcttttccgcatacttagctggttccacaatcgatctcgggctcctgtttccacttgatttcttaaccatctcaccattctttccaaagcctgatgatatatataaacaacaattagcctccacaaatctactgatcttggatggttctatgtatcaggggaatgaaaccgacttaccaaattcggaaggtgcttggtaatacattcttccatcgaatccttgatcaaactcagcagcatcagtgtcaaagaaatcttccatatcatcaaaatcaaatgattctggaagaagatcagctacatcgatatgacctccaccattctcattctctccgttgtcatagaaaccatccgcgccttgctgctgctgactgatccagtaatcagggtaccaagtcgaagttgtcaccaattgccaccactccggtgagaaatcttccacttgtcgtacagctgccggaataaaaagaggtgcgtcggggtttagagtagatcgtcttcctgataccatcgccattctcaaaactctagatctgcacacacaaacaaacaagctcagttcaaattcaaattcaaatctaacaactcaatcacaacatagcttaatccttagatcaatagatctgtacgatcagtaaacatagcaacaataagtttccgattagatcacttgaagtaggacaagtacaagtttgaaatcgagagaactgaagataaatcaagttttaagatagatcaacaaccatcacagagatctaataccatg

SEQ ID NO: 12071 - DNA, 3000 bp, Unknown
  misc_feature (1)..( 3000): cDNA_ID_1031965_gDNA_ID_2214529_Annot_ID_184875 3000 nt of promoter + ATG
cgattacttttagaagtttcggtttttagatttgtaattttttcttagatctgcttaatttggtactgattattgtttttgtacgacggatctgaattttgtttgtgctgaaattgtatcaataggttatccaccggagggatatccaaaagatgcttatccaccacaaggatatcctcctcagggatatcctcagcaaggctatccacctcagggatatcctcaacaaggttatcctcagcaaggatatcctccaccgtacgcgcctcaatatcctccaccaccgcagcatcagcaacaacagagcagtcctggctttctagaaggatggttagtcaataaacacactccattatatttaatctgtttttactaattagattttgtgtatagtttgaatttgactatattccttattttaaatatttcttctagagattctttgaacaaaaggtcatgtggttttagctagaatattcctctgtagaggttgactttttgtgatctctgttcattcactgatcacaggacaattgttgttgtgtttaatgaatttgcatcttttaggatttaacatgtttgcatgatctagctactggttactacaacattgcatgctttaaagaaactagaattgtgattgtgttcttgtcgttattggtttggtagtgtttaactgtttatgagtacttgaaactatacttgtacaagttttgataagtaaattggcttagcaagatggatcctttttgtgttctctgttccttcactgaatacaggataattgttgttctttgatggctttacttaacagtgtgaatcggatgttgtttttgatgaatgtgcatcttttaggatttgattgtttgcatgatctagctactgcttactacattgcatgtcttaaagcaactggatttgtttttaatactgattgtgaaatgtaaacactgtttttgcttttgcagtcttgctgctctgtgttgttgctgtctcttggatgcttgcttctgattggagtctctctctctctgcataaagcttcgggatttatttgtaagagggttttggttaaacaaaaaccttaattgatttgtggggcattaaaaatgaatctctcgatgattctctttcgttttatgtgtaatgttcttcggttcataacattttaactattgtctatcgacgttctgccttagtttgtatttgattatgggaatgtaaattggttgggagacactattctatgccatagtttattgcttggatcttaaaatctttgtgttcataattcgtatggtcacatctcaatgatccagttttcgtccatctattattgattctttcaatagacaagtattaggtttgatattgaacgtcattgaaagaaataatttcgttctcttgggattttcacgaaatgtatggtcttctatccacatgggttggtttccattattgatgttaggtcatggttttaatctgggagaataatatgttaggtaatggttcttttgtcaataagaaggatttcgtacacttttattatcatggaataaactaatcacgaaatcatgcacagaaagaaaagtatatttcattaccaatattgcgtcaaaatcatgcgtctgctcattctattacaaatttacaactatagaagtatcaatggcagagatctatcaaaatcccaacaacataacatccaaaacagttaagactaaagaaacgtagaagcatcagtcgacccacaccgctttgtttcgtcgttgacataaagaatcaaaccactttggttcttttctgcgacaacaatcgccttctctttcttaaatgcatatgtcgtcgaaactgattgaacacaaggcttggtcttctcgacacactctactcgacttggcttcggataatagaaatccgttgggaaaaaattgaactgaagaagacccgacattgaattttgtagatcaaatcgaaactcatacaactttgtctttgtgaatgtgtatataaaaatgtttatgttcctttaggttcagagtgattttggacattgaagtttcttgggctctacgagttttgcttgaggaaaaagtctaggttggttagggtttgaaaggtctttaatctgcctttgacgctttgacattaaaactcatctagaaacaactagaagaataaagcaacgatgatttccaattacgatggtgttttggctctttggagcatgtcactggtttttacatctgtttggcaacgagggtaaacctaattacaaaaattgggcacaagtcacatcgcacccttcttgaggtttaacaatcgtgcgagagcgtcttgaggaaaaattgttgcaatggacggttactttgtttacaagtaatatacttaagatctgttttaatgttgttgcgacttgcgactgaatcatttgatgttgatagatccgaatcactaaattcatgatgttcacaagagagttgtttacttagaagcttgaagtaagaggtgctctgttgaccaactctaatatctagcttgcaaaatgccaaaatgttcaaactactctaaagaagttcaagatattaacgaaaatatctggaaatctcaaagagtgtgatcggaaaaaaagatgtgtaaatatattatcttaaaaactgtatcacctaacttaagcttctctatttcctatatatatatatgtagactacgctttggatgttacaacaactcacaaagataactaaatagcacatattcatatcctacaagacattcaaaccatgaaatcatcccatgcatatctcgtctgcatactgttgctctctctattttctctacatcaatgtatgtacaagttctcttatatataatatttaccaaatatctctttgttttagagtcatcaaagttgagttgggttgatgtgtgtttcaaattaatgtgtaggtgtgaggttagaaagatcgaacaaaatcgatatgtctgtatgcgtccatg

SEQ ID NO: 12072 - DNA, 2981 bp, Unknown; identical to SEQ ID NO: 12066
  misc_feature (1)..( 2981): cDNA_ID_1808920_gDNA_ID_2214529_Annot_ID_134245 3000 nt of promoter + ATG

SEQ ID NO: 12073 - DNA, 533 bp, Unknown; identical to SEQ ID NO: 12065
  misc_feature (1)..( 533): cDNA_ID_2708241_gDNA_ID_2214529_Annot_ID_134246 3000 nt of promoter + ATG

SEQ ID NO: 12074 - DNA, 3000 bp, Unknown
  misc_feature (1)..( 3000): cDNA_ID_2707132_gDNA_ID_2214530_Annot_ID_134247 3000 nt of promoter + ATG
ttcagttaataactctattcggttttaattcgtatttgaaatccatttttgccacaagttttcctgcatgatttccactcttttgcgatttcttcatcttacatttaagttgaacgaagaagagaactttagagtttacgttttcttttcaaagcaagagtggtttgatacaaatgcatcatttgtttgcagtatgactttccaaagcaagaggcggtaatacagtttgttgttgaggctattcaagcagaagcatttaatcccaagacccttttcttaattggaagctacaccatcggtaatatgttcactcttctttttccgtttcgatatatcatgttgagatctaaattcttccatctcttctcttttgaaaggaaaggagaggctgttcttggaagttgcacgtgtgctacgggaaaagatatacatcaatcctgcgaaactaaaactcctcgagtgtttgggattctcaaaggatgatatacagtggtttacagtgaaggaagaggaaagccacattcacgttgtgcctttgtggacgcttgccagtttcaaacggctgaagcatgtagctaaccgatacacagtaagaaacacatccattcggtttgactgtcaaagaaaaacaaaagaagtgataatcttattggctgatttcgttagaggttgagttctaatactgttttctgtcctgcagaaccgttacagccttatcgttgcattttctcctactggttggacatctggtaagactaaaaagaagtccccaggaagaaggttgcaacagggtacaataataaggtaaactttttgcctatcttcatgtcctgtggcattgggctcaaaatcatgaggcggagaatctttatatatatttcaggtacgaggttccttacagtgagcatagcagcttcacggagctaaaagagtttgtgcaaaaagtgtcacctgaagtcatcataccgagtgtaaacaatgatggacctgactctgcagctgcaatggtgtctttgttggttacgtagaactgtgtttacatctgcgataagctttgcaacaaaaaggcagcctccttgactaccaattgagcagagacgtcaaagatctacaacgaaaatggatatgttatgttctatctaattgtagttatgtaaccacatgattatgtagtgtttttcatcacaaactccgaatgcatttgttatatcaactactttggtctttacttatttccactgaagaaatgcaagttgcagactaaatccgtaataagagaccaagctcatggaattgttgagtttgctgcaattcaatgaggaatatagaaaacagatatgcagattcgcataaagtatctgttagaaaggacacttaaaattgataaatactctaatatcaatcttccagtaaacaaatacataaagtttgggtagtcgtagagattacaaacaacaagtatcaaaatttgttacaaaatcctagacaatcagatctttttatccaccatgcaaagtggaaatgaaaactacaacatctttatcttcgattactgtatcgagctgaccacttagctcccaatcacagtcattcaccagcacaagaaccccaggtctcctgcacaacagttattaaccttcattgagcttaataaagaagtcttaatgaaatcttaacctacaatgagctgataaagaagaaaaatagtcttacacagtatctcctttcatgaacatctcaggtctctctttgatcagatttgtacgaacccatgaaagcaaatgcttcatggtaaactaatccaggaatcagaaaagtggaatgagtgagagaaaaattgcgagctttatgatccaaaaacataagaactcaagcttacatcatcagagtcagctccattgggcaaatcaacgtttactttatgaatcttttcagaatcacagagcagctctaacccacccctacacatcacatgtcaagtttcactcttctcaatcattgaacaacaactaaaacacacacatggttcaagttcttaaatttcagtattacatacaatcaatcaggaaaataatctcaaaagacaccaagtcaaaatcagaactttagtgaggtaaaaactaaaaacgctacgaataacaaaactccgattacgaaaagattaagtgataatcgtacccgaattcaagagttaattgcatcgtcgttgatgtttgcaggaggaaccaaattcaaaacccagctcttctagggttcgttcgtgtggtgttgttgttcactgtaaaacgacatcgttcaggttgaagacatgttgggctatttaattgggcctaaaaatatactacaagataaggcctattacttttcccgatgaatcatcatcttatgttaaaaaattacttatcgcatcgtaaccgttgattacaggaactgtaacgtatcaacggacgatattgattcctagtttgtcactgaaaatagaaaatagatggtgcctgatatttttccagcgaccggcaaaattgcaaccaggaagagaaagaaaatcagagattgatttaacgtgaatggaattttgttgtttcccaatttcttctgagaaatagcaaagttcagttttgtttctctctatctgaagctcaatggaagcttataagcaatgggtttggagaaatagagagtatgtacaatcctttggatcctttgccaacgtaagattcatttttattactcttctccttaatttattttccagtttgattatgttctgattctctgtcgatttgggtttgttttcgtctcgtcgttagtgtcaatttctaagtttttcatcgtctgcttgtttgaatattttttgcttgaagggttgtgttttaaaatcgaagcttttatttattgggtttaagaatgaaaaccctttgaaaaaatttaagagttgaatcagttcgatcttttaattcgtagttgtggaattcatcagctgatagttcgtcaaatatg

SEQ ID NO: 12075 - DNA, 3000 bp, Unknown
  misc_feature (1)..( 3000): cDNA_ID_2708265_gDNA_ID_2214530_Annot_ID_134248 3000 nt of promoter + ATG
tctggacgatagaatccctctaaagaattagttgcagaactttgaatttcgaaattgaatcaaaaaacaaaagcagaagacactctctttcacaaagagaagttagctgtgtcagagtcgtttagtcagctttagatttgttccgacagagccgtaacgcacgatttttatcgtatcgcgagaattttcgaattcctccgatcgaacggctctagttccatcgaacattcgaacggttggtatacgattggaatttgaaatggctcggtgattagctgacgtggacgtatgagcctagtcgtctcgggagcgtcacgtgtgccaatcgataaaattgaccttacgtgttcgttgaattaacggaaatgccattggttcaagcatcatcggcttttgagggccataaaggggagaaagtgtcgaggggaccgaggcgcgtgaggctttgtgggccttcttaacgtgcacgaaacggcacgcacttgtcggcttttgtgattaattaattttatcatttagatcattaatgtaagggtttattgagctaatcatcctccaattttcataatcgttttaaggtaatattaacacgatgaaataattagcacctacatttatccttcagataaatccatccagtactcccaaaacccagtttcactatgattttcacatttcacaattatttagatcaaatgataagtaaatgactattgttttcctcctcctgttcatagataaattttgttagtttcatcaaacttttaattggacccaaaatatcaatggatcaaaacgcaacgtatttgactatttgtcatgttgtaatgatgggcctaaatttgaagcccaatataaaacgagaacttcctattctacgccaatacccttatccttgtttgttttcgtctctctggaagacagttctcgatccgaaattgaaattctggaatcgcaaaatttgcacgaatcctactaattggaagatctagaatctcggggtttgatccatcaggtttgcttctgcttcggcttctacacatctcagagagattatgatgtcttggtgctttctgttagagtttccgcttcttcttgatattcgtcgtcatcgtggaagctcgggtttcacataaaaaattctgctgtgtacattgttggagctagagatctcttctttggttttcttttgttgttatttaggattttatatgcattgactatgaacgcgcggttatgaaatcatcgaaacttttggatttgacttttgatggtttttcactactgcgagtggaaactccgaagatcgtctatggattgtcatgaatattcaagaaaatacataaccattcataaaagaggaacgagcttcgctgattaaaacaaaggataatcgacaaagaagggttactactagctcaaatatcaacaaaaattcataataaacgaaaagaaaatttgtgggtgagtgaatggaatggagtcatatcttcttcttcagtctcactttttcctgaaagagcatccttcagtgagctttgccttccctcctgtgggtgtgcagagcaaagtctggcagtttccacacatcacaacggtctgagagtggctgaacacagtcgtactgcaccaaatccaaacccatcatttcttagttatttcatatagatttataaccaaaaacatttacagattcagactttaaaaaaaaagcttacatgttaaagcagccttgacacttgacatcctacatcaaccacataacatacaaaagatgtaatcagaaaccaaatctaattgacaagaagattcaaagtgaataggcagctaaaaggtttgaactttcaagaaatgaaggaattaacaaagaatagttcttaccatgaaaaacgaattgggtgattgaacaagacgcttgagcttgtgcttcctcttctcgagctcagcaggagggttaagcagatcaatatcgttttgaaggacctgaaatttacacagatttttttaccagaatcagtcaattatctcacttgtggacttgtggtgaaggaatcaaatcaagaaatcctaattcaaaactcttaaaacctaatgattgccctaagaaaagacaaagcttgaaacctaatttgatatgttctttgtttttcgccacataaactatcagattcgacgatggaaaagaaattaaggcagtctctaatgttctaaacaagagaatcgaaacgagattaaagattgagaaatgagtactgaccattttcgttagcttcttagagattctgcaacgacaagacttggagatcgtatggaatcaaccgacaaatgatcttgggagatgtaaaaccctaattcgcacaacaatgccgacttataggttctggtccgaaagcccactgtcaatatttcttcttttcaactttgtcaacattaacgttttgggctgaaaaaaatattagatccggtccatcatagatttactctattgggctaaataatggaccaattttcttctcccacctaaaattttagtatttcacaatcccacattattaattttgaaaaacctttgtctaatttaaagcaagaaattaaaactaaaggaaaaaaatcaacacataaaaaatgtacaataaataatgatttttttttcgaaaaataattaatggtctgacttcgagtattggtgatgaaaaaactagtatattaatagtaagaaattttaaaaaaatattgtaaaacttgtgaccatttttgctcttatcctcttcacaatttattttccttttccctcttgtttattaaaatggtcacaagtttttgccgcaatttttttaaaaattaattttgctccatttaaaacaaatgataaaaatgcgacttatcctacttttgaaaccgaaacgtcgtcgtttctttctttcgctttcgtcgttttaacacttaacactcaaacgaacacggagcttctatcacttttgcctcgccggtatctaaatg

SEQ ID NO: 12076 - DNA, 3000 bp, Unknown
  misc_feature (1)..( 3000): cDNA_ID_2685948_gDNA_ID_2214530_Annot_ID_134249 3000 nt of promoter + ATG
aaaacttgagctttctttatgctacaaagtattgatggatgacgaacctgggggttacagtatgtagtatcaagaataagagagctgatatgcgatccaatcaaccaatttgacatctcttcactatagcggaaatcccccgtatgtagaacagcctatacaaatcaacagagtccatggacaattcctttgtgaatggaaagttaaacataggcttacgactacacactgaaagtttctaatttaagaacgcaccttaccgttggctggttcaaagagtatcatgatggatcccggacagtggtttgcatcaaagcatgtcacatcaatgcctgaaatattaaccttctggccaaggtccaggacttgcagtctctcccaaggtatcccaatcttcatatttaccaactttgcggtaactaaggaacagtatatcttcccatgactaaatgactttgtcaaaccttgataatctgtgaatgagaatacagagactttaagcattgattccacgatatgcaggcttcttctgtgtagtaatttataattagacatacagctgactacttacgatcgagatgaaagtgtgtaagaaaccagtggcaacaatcgcgtgtgaggtacttgaatgcgtcctgcatacatatattaaaccagaaaagtcaccaaacataaagattacttaaaagataaatattcagcatcagcatgacgttttaaatctaatttcatgagcatatttgacttgaatgagaaggatgcatatgtaataaggttgttgcattcatgcggagaagttaaaccatgacctagcttgttatgtaacattaccactcgaaaaggtgtccccggaatgcaattccaatgtggaataactttagattttccgttgttgccatttcttctcacagcacgtctagagctagaatctgatggactcttttctgcgacaggtttaggggctgtccggatcttagtgccctcggtagcctgaccagggaaaaactctgtaatcaacttgtttgcagttggttttttgggctcacttgccttacgagtggttgacttatctctctgtctctctgtaacatggccacttgtacaatgagactgtgcctgcacttcagcagaagatgcaaagggatctctaactccgctaagtgcattcacaatcttctttctgggaccaagtgacgtgatacctatgcttagaagatcctgtggaagtataaccttgtcaatactcaattctgtttctctgtgtaaataaataaataagtaaactttagttccattacctcctcagtgagtgactgaagggtatcccagtcgatctcttcacgaataaaaacatcttcatatttagctaaacctagactcctaagccatttcagcactggagacaagtcggtaactagctgaggaagctgaactggatcatcaatcgattcttttataagagaagacaaattttcgcatttcctcaaggagtcctacaataatcatatttacaaatcagcagtcaatcaatggcgtaacgatgtaacaattgaacacagtatacttcattgtattaacctaaattgaaggttgatatcaattccagttatgagataacaaagaagcttacttgctcagaaggctgattatatgacttatcaagacaagtattgctatgaacttgcctctgctcttcactcaaagatgaaatatccatggaacacaatgggcattgaattgaatcatccttgcctaaactaaactctccactcctaccctcagactcagagcaaaggtttatcaacacatcaagctcagagttagactcaacaaaaccttcatcatcctcatggattccactatcaaacccgagacaaattctcgatttcaataacctagcctccatcgaattacacaaataaccttcacgattcacctttatacagtcgtccttatcctctttatcttcttcaccaagagaagaaattggaccattgaaatctcctagagagcaatcaacactagatgggatacaatctaagatacagtgaggagtagaagaggagcagaagagatccggatccggagaaggaggcggagtcacattttctttacccgggtaacggcagagtctgggctttttgttaggagggcggtgagagatgttgttagcgttggttgggtgaagaggttttcgaatcgaaagctgtgaggaaggagggatctggaagtcgtcgtcgtcatcttcgacggtgttcgacatttagataccggcgaggcaaaagtgatagaagctccgtgttcgtttgagtgttaagtgttaaaacgacgaaagcgaaagaaagaaacgacgacgtttcggtttcaaaagtaggataagtcgcatttttatcatttgttttaaatggagcaaaattaatttttaaaaaaattgcggcaaaaacttgtgaccattttaataaacaagagggaaaaggaaaataaattgtgaagaggataagagcaaaaatggtcacaagttttacaatatttttttaaaatttcttactattaatatactagttttttcatcaccaatactcgaagtcagaccattaattatttttcgaaaaaaaaatcattatttattgtacattttttatgtgttgatttttttcctttagttttaatttcttgctttaaattagacaaaggtttttcaaaattaataatgtgggattgtgaaatactaaaattttaggtgggagaagaaaattggtccattatttagcccaatagagtaaatctatgatggaccggatctaatatttttttcagcccaaaacgttaatgttgacaaagttgaaaagaagaaatattgacagtgggctttcggaccagaacctataagtcggcattgttgtgcgaattagggttttacatctcccaagatcatttgtcggttgattccatacgatctccaagtcttgtcgttgcagaatctctaagaagctaacgaaa

SEQ ID NO: 12077 - DNA, 3000 bp, Unknown
  misc_feature (1)..( 3000): cDNA_ID_2708272_gDNA_ID_2214530_Annot_ID_134253 3000 nt of promoter + ATG
gatcactctctctctctatctctgttcacacatctctcccaaaggtatttcgaatcgaaattcttttgatttctttctatgatttgtttacattttttcgtggtgttcttgatttttttctttgatcaaaactagtagaaattttccaatttcgtcctgccttgtgattagtagtagatattttggaatttgattagtaggtagaagaagatggggacgacgttagatgtatcaagagcagagctagcacttgtggtaatgtatttgaacaaagcagaggcaagagataagttatgcagagctatacagtatggttccaagttcttgagtggtggacaacctggtactgctcaaaatgttgacaaatctactagcttagcaagaaaagtcttccgtcttttcaaggttaatccttttgattttgattagagtgtgtttttacctctttgtttaattaactaaatattatcattgttgcagtttgtgaatgacttgcatggtcttatcagtcctgtgcctaaaggaactcctcttcctcttgttttacttggaaaggtaggtgctttagagatcaaagctcagagttcgtttcggttttatatctttgttctgtatcaatctttgttgttattttcagtcgaagaacgcacttttatctacattcttgttcctggatcaaattgtctggcttgggagatcaggaatatataaggtgagagagagagagatcatcaagtttatgttccactggtgtattctagttttgtgtgtttggctaatgtcttatatgtgttatctcaacacagaacaaagaacgagctgagttacttggacgtatatctctcttctgctggatgggatcttctgtctgcacaactttagtcgaggtccgcctcttctttcacttttccgatcgattcctcatgtcatcttggcctttttcgccagcttatgtatcggttttcactgttatcaggttggtgagatgggaaggctttcttcatcaatgaagaagatcgaaaagggactcaagaatggaaacaagtatcaggtaaagttttcttctttgttaagaaacttctaattctacaaaatcttattataagagactcaattcaaattgtataaaaatgtaggatgaggattatcgtgctaagctaaaaaaatcaaacgagaggtcacttgctttgatcaaatcagctatggacattgttgtagcagctggtcttcttcagttagctccaacgaagatcactcctcgtgtcaccggagcttttggattcatcacctccatcatttcttgttaccaggtaacacttgtttcatccacaagacctcactttccaatttcgtaactttcttcttctgaattctgatatttacatgattctcattgttctccacaaacacagttgcttccgacacgccccaagatcaaaacaccctgaagtcaatcgaggaagctggtgttaaggagaaagtcatttcagaaagtttctgttcttcttattattaaggaaattcactgctgttataaaacatcgtataaaatacttatttgcaggaattacggttattataaatttatgcctcagattcttgatacacaagtttcaatactcaatagtattgcattattatgagatgttgtttctgctacgcaataactagaggcaaaatccaactacatatatgttttgatctgattattataatagactttgggcttcattccgcctaaagctacaacttggagtctgaagagcatccatgcatcgtggaacgctcattttacactgaatgctattttttattaaatatgaaaatcctcgatatttttctataaaaaaatatcttgaaagttgttgataggcccatgcatggatacgaagattttgggaatttaattccgaaatgtaagatttggtttgatttttttgttacatttgttcaaattagttttagattaaactctaaatttaaatcataagaaatcatcaattttacctggataatcttaacaacttatcattaagatctgttataattattaatttgtaaacttgagttaagttcgataaaatcacttcggttccattcgtttcaaatgtttccagtccaatgtcatgggtattgtttaggttaggtgtaactgtgtaaggtacaaaatgttgtttggatcaattaacgcaaaccaaactctcactgccttttacgattccaatggcaatatacattgcttctttgggatttcttcacaatcccgcaaggtttaaacttcctctgtccagtgtccccccaaaaaagtgcatattacattcccataactggcgtatatacagagcaacagagaatatcagttaaaaacggtgtgagcaaaaagtgcttcggttaagtattaaaattggttcgaaccggtgaaaagtgcaattgggattgcgtctctttgcatccaaaggacccaaacggacccctcatcacctatgtatcaaccttcactcgcttcaccggagcgtgcactttcacaaacgcggattctcaaatcaattttacttctttttaaaataatgttaaaagaataaaagatatatttctcataatacaatgcatgaatatactacaaaatccttaattttcctaattttctaaaagataaaatctaataattcgctgaaaatggaaaagaataatattttgaacaaaataatttccccattgttgcctatgactagctcgcacgttttaagcctaatctctcacgaatacataaaaataaaattaaaactcattgaccctttgaccttaaagcgcgtacctaacactcgcttctattttctctcttccctttatattacaccatcgaaccacttcatatcaacccttgaaaacttcactcgtcacacattcgattctttcatcgttgtgtctattataaatatatgtcaatttggtttctaaaaaattctaccattgattgattgatttttttttctttaagag

SEQ ID NO: 12078 - DNA, 3000 bp, Unknown
  misc_feature (1)..( 3000): cDNA_ID_2708280_gDNA_ID_2214530_Annot_ID_134255 3000 nt of promoter + ATG
gtgcggcgtgactacatagatgcgtgttattaatttgatttgatgacgacatcactacataattaacttatttgcttaatttccttaaagtcagaattattaatggtttgttttaaaagattattcagtagcattttccaaagaatagacgcctctccactacaaaagacatcttcatattcgctttgttcaaatactttttgttttccgaaaaagaaagaaagaagagaaaggctctcaggccttagaaatttcacggatgtctttttttgttatacaaagttttgtcaacaagtgcaatttgttataatacgcatgcattcacgaaattagaaccttagtttgaacagaattatgaaagtagtaacttgaagaatacaattgtgtacgtaatgttttgggaaaagtcaatggagtcgttgatacggcacgtgtcgaacacaagcgattaagttgacttgtttctgaaggaaactgtggcgacaattcgaacgaagtttcaggtattttttgcatcattcttgccaaacgtcgacgggacgcgttttttttttgtctgcaccaaaataatcgacttttaaaacctgtgatccatagccagttaataatttcaataacaattttatcacaaaatgtaacagactatatataaattaatcgtatatcttcacttttgagactaatgtaacaaacgtgctcttatcatatagtgattgaaacatttaaggagcaattaaaccccctcgttaacacgaaaagctgtgatggccattggcattgcacgaagaacaacttaccgtcccagaacacactagagccgctgccgcgctttctcacatttgcgtatatatataattttgatcaattattttgacgtaacagttaattacattaatacaaattggtattgtagtcgtagttacgtgatttatcccaattcaaagtggatgtaggtaatagctgggaaaggtaaaaactgaaaaatcttggccaacaaacacatgcatgcatggctatacattgtaaattacatatgtcagcagcatcgtgtcgtgagctaagctaaatagctgtggaaatgttcatatatttaacaatagtttaaaactgcaacgatgtggtcgctcactctataatgtatttttgcgagatattattatatgtatattatcatatgacccaagatgaccgatgggcttagcttgcagtactgatgaataaatcattacagactgtttctggaaatttgttgtttgttgcccagttatttcatggcacatggattaggcactcatatcaactatgtagtactttttctacaatgttgtcgtgttgacttgataaaagtatacagtcaatctaggtcaatatctactagttctttcttataccgtttttggtggatagcgggaatggaattgctaattctaacttacaaggtatggtttacgaatattgtaagtgtttttttttagaatgccaattcagatattcaaaaaacggagaacatgtactagtcattaaatatagagtaatagagttaaaaatctataaattttgaccgaatacatataaaaatataaaaaattagaataatcaccaagtatttctcggtgcttattaatataagaagatagaatttaaaaatggctaccaaaaacaaaaataataaaaatatttattaaaataagcaaattgttaattagataattcaacagatttgaaatttataatcggccacttgttttttcttttataattagagactctcaaaccaaaatctaaagtaatttacacgatatgtatatataaagtcaggtctaaaccactgaatttagagatccgatccgttgatgggaaaactcaacccacattatcaattctgtggaaaaaagattgtgatttatttatattttttgtgtggaacacatgtatgtactataactgtgtagtacatgcatatgtaatttcaagtactcgttaaagaaaacagaccagcaaattgtcttagtaacatttttccacataccatctaatcgttcatgacatcgttttgcttatgtcacgtttatgacgcttgtatgaatgtgttcggctgttggtgtaccaaatatacgacaaatgcgaaacataagagaaaaagataagttaaacgttatacctaaggaaacaaatttggagtcttcacttttggtcgtcctcagcaaacaaatttggtgtatataataatcaaaataggcgaagtcctataaattgtttgccaacaaaatataaattgtcaaactagtattcgccacaaatgcacttttgagttaaaattgaatcacgtgtgaagaagttgttggactttgtttacatcctttggatcaagtcttaaagtcgttctatggacatttgagaaatctacgggaaatagaggcaaaagaaaaagaaatcaaatatagtagtaggttttaaaacatacatactttgtaccaaagcttaatggcgccatcaatgaatgaaatagttgatgtgattgtagctgaatgattgctagttacttgttgtgctcgtttgaggataaatcttatgatttcaaatttccaatatctttgaaaatcgttcaaagtaagatataaacatacctttgaaagagaaattagtatataaacaaataaaactaattatagttttcaaaatgataactgtagatgattaactattttctctcactaatttactaacatatccttgataaaacttgtaatctagatagatagaatataaaaagacgtaatctattatatacaaaacaaatttgtatttgaggattttttttatttataattataattaatagttttcaaaaaattaagcattaacgctgcgtttttcattattcatttttttgcagattggttcattattgggaaacaatagaaacgtaaaacgcagcgtataaaaaagattattatccagtaagtcagtaacttacacagattctctagcacaactgcc

SEQ ID NO: 12079 - DNA, 3000 bp, Unknown
  misc_feature (1)..( 3000): cDNA_ID_3434945_gDNA_ID_2214530_Annot_ID_134257 3000 nt of promoter + ATG
cttatcctattctgttatcttgcttatattattacactctgttagtctccaatttcgatcatgcgttagctaaaaataatattttacggaattgttaggagatcctacttgtccttgatggaaacactggtttgaacatgcttccacaagctagagaattcaacgaggtaccatacgaaactacctaaacctagtgattctggctccccaaactagaatttcttcgtaaaatcttgaggtttctgggttacatttttttcaggttgttggtatcaccggtttgatattgacgaaactagatggctctgctagaggaggctgtgtggtaaatatctcataaaatttttgatctcattcaaagctcttatttttcattagctctgtcattgaaactggttctccatgtcttgcaggtcagtgtggttgaggaattgggcattcccgtaaagtttatcggtgtaggagaagctgtagaagatctccaaccttttgatccggaggcttttgtgaatgctatattctcttaagccataaaacctcgtcttcttcaaaaagctatcatcttcaacgcaggccagagccaagtggaaaattcacagtgaattcgccggagatgcaaatggaagcattccttattttcttggagatcttaggttgacaagctttttctgcaatggatgcaagtttcgatttttaatgatgtgacaaagctcgtttgcacactgatagtgatcacacaagaatgtaacgagtcataggaactgcttgtgtctcgtctcactactattttgtatattgttaatgttgtatttgaaaggaattacaaagattgataaaagaacaatgaggggaggaaaaccgtaaaaaagaaagaaaaaaaaatgaaacttttttaaaaaatattcataacttgtatataatccacaaaacgatgcaaaggtcaaatgacatgatccataattcgattagttttcatatcattttgtaaaaattaatattcaaatttaaaaataaaaactgtaaaaatgaaagaataaaaaacaaaaatttaaaacttttgaaaatatattaatatgaaacttgtatattaattctacaaaacattgtgaaaacaagttgaattagtggtatcggcatacgacttcaaatgacaagatccaaaatccggttaatttttattttattttgtaaatctaatatccaaattaaaagttaaaaaccataaaaaagaaaaaaaaacaaaaattttaaaatttttcgaaaatgttaataatttgtatattagatctacaaaacgatgcgaaaacaagttaaattagtggaatcggctaacgatcaaaaactgtaagaaagaaaagaacaaaaataaaatttataaaaaacctcttagaaaaatattaataacatgtatattaaatctataaaacgatgtgaaaaacaagttgaattagtggaatcggctaacgatcaaatgactaggtcaaatgacaggatccaaaatccggttagtttccatatcattttgtaaatttaatatccaaattaaaatttgaaaaccgtaagaaagaaaagaacaaaaatcacctttaaaaaaaatatattaataacttgtatattaaatctactaaacgatgcgaaaacaagttgaatttgtggaatcggctaacgatcaaatgattaggtcaaatgacaggattcaaaatccggtcagctttcatatcattttataaatttaatatccaaattaaatttgaaaacccttagatgggaaaaaatcaaaattttaaaaccttataaaaaaatattcataacttctatctcagtttgtaaatctaagtaatttaagggctaaaaagaaaatagggctaagaattgacttttatggcgggctgaaattgatattgttgggctttgaagaattgcaccttagtcctgagcccaaacgacaccatctctaatcttacggcaaagcagtcctccaccagaccaccaccgttatcggaaacgaattccccagtctctccgtcgcgatctccgtcgctgattgtcacgaattacgattcacgaagccgaatatttttattgaaataaccattagaacttagaaccgccaaaacagatcctagagcgagtatcttcaccgccatagcgttcatgcaagtcttcgtcaccggatcttcactagcgccgacgatataattagaaaaaaccataaccgtttctctgaaccgctgatcgattaggttatatacaaagaagacttttgaagatcctcaacgtaaagaggattcgattctagggtttttttcttctccttagtgcgagattttcttatctcttaatgatgaagtaagtccgtatttatagattggtgtgagttaattaatttcctttttttataaaacaaaatattaccgttacattacatattctccggtttaccgttgcatacaaccgtttaatataaacgttgcatacaaccgtttaatataaacgttgctgtgtgaagtgcacgctcttgttcctcttatcatttgtgtgaaaatacatcaaatatcaccttgtttttttgtcaagtgctctcgtttgaatttttttttggttataaagtcatatttcccaatttgcataatgatatacaaatataaaccggatggcccaaaaaggcgaaaaccattagtagtactggcccaaattgcttcttcataaaattaattgttttcggcctcaatactatttcatgttttttgggtcaacaacgtccaagtaccctttatataacataaataaggattgttagaaaagaataattttgatgtgtcacgattattttatcaaccaatcactgatctctaggagaaaaagtgaggacccatagtttaagcgacactctttggttaaagaataaagattagatcggtccaatttatatatttacatgttccgccattatcatcttctaatttgaaaactcttcatcattccctaccaccggattca

SEQ ID NO: 12080 - DNA, 3000 bp, Unknown; identical to SEQ ID NO: 12075
  misc_feature (1)..( 3000): cDNA_ID_3023874_gDNA_ID_2214530_Annot_ID_184891 3000 nt of promoter + ATG

SEQ ID NO: 12081 - DNA, 3000 bp, Unknown
  misc_feature (1)..( 3000): cDNA_ID_1808010_gDNA_ID_2214530_Annot_ID_134258 3000 nt of promoter + ATG
aaaatcggcttcccttaacataccctatgtagatacgactcagaagtcctaggaaaatcgaaatttatcaccacattcacagcttgaatgtcaatcccacgtgtaaacaaatctgcaacagacagacattccccgtgaaacataaacacatttgtcaatgttcaagcacatgaaatacacaaaacgtaccagtgcaaacaagatttctgcatgcaccattgcggaaatcatggaaaaccctgttccgatggtcttgaaccatctttgcatggatatagaagcatgagtaaccaagttctgtaattttcttggccaacagctcaacacgattaacagagttgcaaaagataatggattggtttatttggagctgcaatagataaaacaatatttcctttaaaagatacatcaagtagccagaaaataaaacattggggttttaagactgtaacaaaactctgaccttagagaatagcgtgttaaggcagtgcaccttctgtctctcttcaacaaaagcataatattgggtaacacccataagtgtgagctgatccatgagattgataatgtaaggcttcttgagataccgatccttgaaagacttcacagtgacaggaaatgtagctgaaaacatcaaaatctgccggctctctggcaagaactgtatcaactcctctatagaaggttgaaattctacagacaaaagcttgtcggcctgaaaaaagatgtttgcgagttaagaccatgagctcatgaggaaaagaaaattattcaatcaaaatctgcaaatatgaagcataagaggaatcgattttgttttaactttagagaaagttatgttcagggaaaaactagaaatgtccttttgggcaaaaatccaacaatgtttgttaataagaaaaatctagctcaggggtaatagaattaggaactcacctcatccattacaagcatggcacaatctttcaaaacacacacaccctttttggcaagatctaatattcttccaggagttccaaccagtaaatggacaggttgatacaatcgcatgatatcatccctcagactggtaccgccagtggtgaccataacctcaattttcaaatatttggaaagctccttgcaaacctgggatgtctgaagggcgagctctcgggttggaactagaattacggctgcataagaaaaaagatcaacaaaagtactgaaaactcagtaagaaagtagggtttcactggaagttccactgatcaactaactcactacagagaaaggtaggagatcttttaacagagaaaagttctaaaaggaaagtaaaaaaccttgaatgacattgttctctggatcaattttctcaagggtaggaatgcagaaggcaccagtcttcccagtaccatttttggctctagcaagaatatcactaccagtcaaagcaatgggaatgctttcttcctgaataggagatggtttttcaaaacccttctcatatattcccctaagcagatccctcttcaaaaagtaatcttcaaattcatttcctttagtggcagtcacatcctgaagacaagatatggaaaaactaagttctaagggaactgctgtcttgtcaaaacaaaaatcatataactatgcaatcattcatacctctgtctggtaacgattatctcgtggtggcagctttaaggttgctttccagtcttcattactgataagcataagaaaacacataacccgttaaacatcacaacaagagcaccattcataataaccattcttccaaacgagcacttacttagaatcgctaatagcttcagattgaaccgttttttcgacctcatctatgtaacttggatcaccaggaagctgagcccgtcgagaccattgttgttcttgctgctgctgttgttgttgttgttgctgctgcagttgctgttgctgttgaatctgctggggataacctcgctgaacgtactgctgagcatcagattgagactggagatactgaggaggctgaggctgaggttgctgtggaaacggagtccgtgactgaaggtactgttgaggctgaggtggattcggattccgtgactgaaaattaggatccggaccaggacccgccgcaccaatccccggtggaaatcttcctctattattattattattattcatctcgatctcgaaacagagaactctaattctaccaagaaatcttcacaagctcacaaatcgtaaatctaagaagaggctataaacaacaatctggagaatgttaggtcacacgtagcttcgtaagagatgattgattgattgattgattggactctctctctcgggggagggcaagatcggaatatgctaacaattatccacaaaaccgtttccgccagaaactaatcgagcttagctaagatgaataattttcttttgtcgtctggttggttagtgagaaagtgaaagatacatacactcgccggagtcgttgttgttgtttaggtcgtcaagtggattttcattacacggacaggctcttcttcagtttcactcactcttatccacatttatttcactaaattagccttgtacgttcgtataattatgaaataacccccacatttctttgtatttatcattattctctcgtaatttttaaaaatagatcttcggatcttccgcaaacagagcgtacggctgaaaacgtcgatacccttcattgtgctcggagtctaaaattgtaaaattgaaattagaattttgatgatcgacaatgattgaatggcttctcctctttcgaatctctaccactagaaccaaaattaccacaaattctcatttcttcaagaatttttgataaataagacagagaacttgagagatgaaaagaaaaaaacacaaaacctggtgttttttctctcgtcgtcgtttggtcgtgtcctaagacaagaaccggcgaacgaagaacaaactttttgaatctaacatccgaaagaaagagagaaaatg

SEQ ID NO: 12082 - DNA, 3000 bp, Unknown
  misc_feature (1)..( 3000): cDNA_ID_2708284_gDNA_ID_2214530_Annot_ID_134259 3000 nt of promoter + ATG
gatagtttctgatagcgtaaattgatgatgcaggagttgataaatttcacgctgcactacattgcagacctggatattccaattaagaggtataacgtggatccaactgctagtctctaatcatgtttgcaaagtgataagatgatttattttcttgaaatttgtatacataggggaacatttattgaattccgaaatggaatgctcaatgtatcacccattggtcgcaactgcagccaagaagaaagagatgaatttgagagatatgataaggtagaagaaactatatttagtttgttcaatttcttatagaatatattttgagcattgtcattcaacactttttttaaaaggttcaaaacatccgaccaaagatggtagctgaacttcgtgagcggtttgcacatcttaaccttactttctcaattgggggacagataagcttcgatgtgagtagaatcaaaatgtggattataacaatttcttaaatccattttttgagtcactgagtctaatcaaattgttatgacttaggtcttccctaaaggttgggataagacttactgcttgcaatacctcgaggacttcagtgaaatccatttcttcggtgacaagacctatgaggtataagactcatctcaactctgcaaatctattcattagagttgttgtatggtttccgttgagcttgatgggtaaaaatatggcttttacttctgcagggtggaaatgactatgaaatctatgaatcaccaaaaacaattggccattcaggtcagctacttggatatattatcgtttaatctctgtatgtttgtgttgcgagatattttcatgacaaataggattgtttctgttgttgcagttacgagtccagatgacacagtggcaaaatgcaaggctctgttcatgtcttgaaacactactcatctcaagaacacagtgtcaagagtttgattcttctttggcgaaatctcacaactcttgattacaagaaatggagagaagtgtgtttgaatgctatctataccgtatgttttgaattttgattcatcaaataaaatatcttgttataaccttttgtttcagaacatggtcctcaaagttttaaaactaaaggttaaaaatatcctcttcaaaaaaaattggatgttaaagattttgtttacaacagattctctccaaaaagagctttaaaactttacaagaatttacaagaagaaacaacaacaatttgtatttatatattcattaaacagaaacgcatataaaaacttcaaacttgagaactgataagatcattcctccacgacattttcaagactcaacgaccggctcaggctcctcttctcctgcagcttcaggggcagcgtcatcttcttttgcttcgggaattgaggcggtgtcgtcaggtttgtgatcatcagaaggaggagaagcgccaccagaagaggcggatcgacggtggttagcagcggcttgatggacgtgattgtaactgcctttctcgagaaagagctgattgaagtggactttacagtagaggacgccattaagagaagcgtaagaagagtgagtcaaaggacaaccactgtgtgtgcacctgaagcaagtcttgtggtaactttctccttccattgttactttctcaagtgggtaaaccgtcttcttacaagtcgcacatttgtcttgtgttccactgaagaatgatgataacttgcttggagttcgagtcttgcagtatccatcaattgagacaaatcagatgaaaaaaaagaggaaataaaaacaagatgatgaatctttgaagacattaccagatgatcattgggcttctcggtctttcctgcctgaaaattcttgctgtaattgccagattctttgaaaagctgttcgaagtgtggcttacagtaaagaactccatccattgatgagtaattgcttatctgtgttaagaaaagatgtggtcttttaaaacaatgaagcattgtcgaaaaacagagtaacaatggaggaagaagaagaaaagagaaataccacgagagtgcctttgcaatgggtgcatctgaaacatgatttgtgataagtattaccctctaatgttaacaaatccatcacgtacacggttttgtcacaggccttgcatttatccaatgttcctgtaaacgacattttctctctttctttcggatgttagattcaaaaagtttgttcttcgttcgccggttcttgtcttaggacacgaccaaacgacgacgagagaaaaaacaccaggttttgtgtttttttcttttcatctctcaagttctctgtcttatttatcaaaaattcttgaagaaatgagaatttgtggtaattttggttctagtggtagagattcgaaagaggagaagccattcaatcattgtcgatcatcaaaattctaatttcaattttacaattttagactccgagcacaatgaagggtatcgacgttttcagccgtacgctctgtttgcggaagatccgaagatctatttttaaaaattacgagagaataatgataaatacaaagaaatgtgggggttatttcataattatacgaacgtacaaggctaatttagtgaaataaatgtggataagagtgagtgaaactgaagaagagcctgtccgtgtaatgaaaatccacttgacgacctaaacaacaacaacgactccggcgagtgtatgtatctttcactttctcactaaccaaccagacgacaaaagaaaattattcatcttagctaagctcgattagtttctggcggaaacggttttgtggataattgttagcatattccgatcttgccctcccccgagagagagagtccaatcaatcaatcaatcaatcatctcttacgaagctacgtgtgacctaacattctccagattgttgtttatagcctcttcttagatttacgatttgtgagcttgtgaagatttcttggtagaattagagttctctgtttcgagatcgag

SEQ ID NO: 12083 - DNA, 3000 bp, Unknown
  misc_feature (1)..( 3000): cDNA_ID_2711463_gDNA_ID_2214530_Annot_ID_134261 3000 nt of promoter + ATG
ctcgatcttcctaagttgagcttctacggctgctttcttgctattttcccaagcatgcacatcagagatcttcttttgtgccctgtccatttcaagatcatcagagatctgtaagcaatagtaatctttgggtgagaagatgatgaaagtttacctgttctcagcctttgacttctcactctcttcccatgctttgatgaatgacgttttcttctctttttccaagtcggcaagtatcacatctgaccaaacacacacaacacacatttgaagtaaattactgaactaagtaactaagaaactggacatgagaaacaaagtgttgttatcagctgacctctatcggccgaaccagatgaagctttcttaggtgtatgctcctcgatgggttctgcaagaagcacacttataagtataacacatggatatttgttgcaagaagctcacttttaactaagttaaattttgttgctctaattggctaataaggtcatcaaaatagtagtttataaaacgaaactccacacagaaggaattacagatagtaaataaagatgaacaaatgaatgttcaaggattataaaaactgctggaaagttagtacttaattgttattttccaagagttaagcaactttaaaggaaggaaaaaatgtaggaatattaagaaagtaacccactttccttaattcatagctgtccacaactaatttgtcatgattccatacactttttgataacactaattacagggaacattgctttactattaatcatattttaataatatcatcctcgaaaaacataattctcttgaaaatgccatgatgaagttgtaaattctaacagcgatggatttcacctaaacaaatagagtatagaccaagtcatatgcaaaagaactcacaaaaaccttaggcatcttaagaaaatccatttgttaattgtaaattgaaaccttagttccaaacgtaagaattctgaattacatactataataattcatcgtaaacatgaatgaatcctcctaagtagaagattaacatatataaaacacacacgtatgtaaatagaaagcttactttctacaacggcaagagctttggactcgacgggaggtggattatgaattttctcatccgcgacttccaccggagcaggagtcggttccttcgccggagctaaaacagccggagattctacgtcaaccttactcgtcttttgctcctccgccattgtctctcagccgaagaagaagaacagattttatgttttttccgtgaaaatggataaaattgagattttaggacaataatgagttaaagagtttttatatcctccgttagcttataccggtggagcgtactacgcgcgtttaataagtgtgagactcttgttttgcttcgccgttgatttttgtacccatgtgatcgtgcggctgtaaagctctcatacgcattggatgcgttacacgtgattaaacacacctcactgccgacaagtaaagtggttcaatgatgccacgtcacctctgtagaaaatttgtcctccccttcttttttcctgatattcaacaaaacttaattcttccaattataccgaactaaaattttgtttaccatataaattggtttaaaattgaaaatcagattttagctgggatttttttattatgagaaaaacaacaatcaaactacaatcaagaaaataaatgatctatattattgctaatcttggcttaactaaaaagttcgtattaaaaaactgaatctaaatttggagtgagctcgtatgcctatagaattgacagagtgtcgggtgtgtattaaatctataataaaatatcaatcactcgaattcatttaaacaattattttagttttaaaatttaagtggatcaaagggtgacgtggagcctcactgactcgacacgctggaagacagatacaaaaaggataatgtctgtgtctcgcgcgtgtacaaaactttccggttatgtggcgcgtggtatatgcaatttaaactggtttaagcatgtggtatatggactatgagatggagacatctctttttgtaggtgttgggcttttgtgaatcctaatggcccaacgggtttttaaatttcctgcccaacttgttttaatttaaagaaaggtgtaattttttttctaacaaagcaataaagtaaattaattaaggctaatcactaatcacagactcacagtttcgaacagcctgtgaaagatgtattaatgtatttgtataataataaaaagtactctacaacatggaattatttacgattaattatctgtcttgtatgatgatgagtggtcgaatatggactatgatgtcactgacctttatttaatgggttaaggtttatcttctttcttctttcttcgaagttcggattcttttattcagtttaaagcacttataacaaactttcccaaagaggactttaattaattgaactcttgcagttttatttttgtagtaagcagattatttttctaagaacatcaaaggtcttgtatttagttatttaccaataaatacaacgttaataagagacgattatttgggaaacatttgtgtatcacatatcaatgtccatatgtgatttgagcataggaataccaaatatggatgaccaaatgtctcctactaattaataaaatattatctatttaatatttaaaaacattttaactcttcgaaaaactaaaaagtaaacaagattcacacaaaaatatgaacgtcattaacacaaaagatgtgaactctggttagtgttgaagataacgtgaaacaagattcaaatcctcgtggaagagcaccaatcgatcaccagaatcaaacctttgagcttcctcctagcttcggtaacgtttaatctcacctgattctcgtttttcttctcttcctgttgaatgtttgtgaacatagatatatataaagctgagatagatatagattcatgcttcaacggaaaagc

SEQ ID NO: 12084 - DNA, 3000 bp, Unknown
  misc_feature (1)..( 3000): cDNA_ID_2711459_gDNA_ID_2214530_Annot_ID_134262 3000 nt of promoter + ATG
aacatagatatatataaagctgagatagatatagattcatgcttcaacggaaaagcatgaagaggaacaacaacaatcttctaacgaacaagaataagtatgtctatcttaaaacggcgtcgcatccagcaaaaagcatcgctaaagctactctgttcctcgtcacctctctcttcatatctgctggtctcttagacttattgggttgtttcgatttcgtgagttcgaatctgaagtaacttcttttttagaaactttttattcaatcaagtgaatcttgaacttgaagagttaataaattcatatctctctgtacttcagacaacttttacaggtctgaagcaggtaacaactagtatcagaaaatcaccaatcacaagccaaagattccctaaccaatgcggcgtcgttcagaaccaaactcaattatttccccaaaatggctcctcgagaaacaacgacaaacccagaagcagccattcaagaatatccacgtgtccttcttacttccgttggatccacgaagatctacggccatggaaagagacaggtgtaacgagagggatgcttgagaaagccaggaggacggcgcatttcagagtagtaatcctcgacgggagagtgtacgttaagaaatatagaaagtcaatccaaacaagagacgtttttactctgtggggcatcgtacagttactacggtggtacccaggtaggttaccggatcttgagctcatgtttgacccagatgatagaccaaccgtccgatctaaagactttcaaggtcaacaacacccggccccgcctcctttgttccgttattgctctgatgacgccagcttggatattgtcttccctgattggtccttctggggctggtaagggcttaacacacatgttaattctattctgttctctatttaatgggcttgttattggacctagctaattatattattattgggctagggctgaggttaatataaagccttgggataaatcgctagtggcgatagaagaagggaataagatgactcaatggaaagaccgcgtggcgtatgcttattggagaggaaaccctaatgtggctccaactagaagagatcttctcagatgtaatgtctcagctcaagaagattggaacacacgtctctacattcaggttaggatttctcaaaatatgtataatttttatatattgcaatttttaaataatctaaatgatcaaaaatgtttattattgtgaaggattgggatagagagtcaagagaaggattcaagaactctaacctagagaaccaatgcacccacaggtttaacttaagccacactttttgtacttaggaaatatttgcaaagattcgattttaaatgtgtgataatgatggaataggtacaagatttatatagaaggatgggcatggtcagtgagtgagaaatatataatggcatgtgattcaatgacattgtacgtgagacctatgttctatgatttttacgtacgaggaatgatgccattacaacattactggccaatcagagacacctctaagtgtacttccctcaaattcgccgtacattgggggaatactcatttggaccaggtttgtatttttttttttacattaagacccaaaaagttttgttttgtaacaaattaacacattgagtgtggttttttttttttatataggcgagtaagataggagaagaagggagtaggtttattagagaggaagtgaaaatggaatatgtgtatgactacatgttccatttgatgaacgagtatgcaaaacttttgaagtttaaaccagagattccgtggggagccacggagattacgccggatattatgggctgctcggcgacgggacggtggagagatttcatggaggagtctatggttatgtttcctagtgaagagtctccttgtgagatgccttctccttttaaccctcatgatttaaaagagattcttgagagaaaaactaatttgactcgtcaagttgagtggtgggaagatcaatattttcatgatttagccaatatcaagaagccttgaccaaaaaggctcttgtgtttgtttagatgattgagttgtattcatatattgaaattagtgaaaagtaaacgagtaattttttttccgactagtatgtgtctctatctccactagcgatcttttttccgactagtatgttaattgagttgtatattctaatgttttagtaaatgttataagtttagttctattttttttaaaaactttactaagatatttatttaggttggaattttttaaaattaaattcattaaaattataagaacaaaaataaaatagtatgttctaaaagtataatgatgtttttatagtatcagaccttgttaattttcaaatcatataaaatgtaaagatttatattctaatttaacttgcattaaaaaatctatagcattgaatatataggcaactgaaatagttcattttggtaataataaggtaaattaagaacatcaaaatttggtatctgtagatattagaaagaaaaaaatgtgtgtttggtaagtggttcaaagagaatgaaaataagaaaaatatgtgtttgataaatgtgatggtagaattaaataataaaaaatataaagttgagaaaaatggagtttgccacgtaatcactataaacatacaggataatggcaacaagaaatattggttagtttcagggtaattaatttcgcagagtccatatatagttttaacttattaaagtgggttgcttcggttctgaagaaacaaccattaattatctattttcttcataaaatttcctcagaaaacatgggtctacacatccaacatactacaattcttagatacaaatgaatcaatatctgtaatcctcttttccttctaccgtcacaaaactaatgtgatcctcttatctttctctctctctcgttcatttttttttgtcttaggttgaattaaacacataatatct

SEQ ID NO: 12085 - DNA, 3000 bp, Unknown
  misc_feature (1)..( 3000): cDNA_ID_1807725_gDNA_ID_2214530_Annot_ID_134264 3000 nt of promoter + ATG
ctactgtacaagcttacaaagaaaattcaaataatatgggctttattattattgggctaacatcaagaaaaagagatcagcaccgacatagctcacgaggcattcttcctaacgtagaaaaccaaaaggtcccacatcgacaagcataaatcagatgtttgtgtatatatgttttataaataatcagtaccaccaaccaatattcactcaaggattattgggccttttaattttgtttgcttttttcaacggtttttttcttttgtttcttcattttcctttaatttttgtttatagatattttttagttttttttcaaatactaggttaatttgacgttgtgaaatctaagcggatttaggatccggctaattaattgtggtcattagcgattccacaaatccaacatatttttcacatcttcatgtatatttagtatttattttttttattttattttcttaaacggttttcaaattcttttttttgtttaccttagtttttgttttgattattaattttattttaaagttttataaactaaactaatacgacgttttgaaagctaactggattttagatcccatcatttaaccataatcattagcgattccacaaatccaacatattttttgcatcttcatatatttttaacatttattttttatttttttattttaaaggttttcaactctctttttatatattattttttaaggttttataaaatactatactaaaaatacggtgaaacgttcatgattttgtattttggctttggctaaactgtcttgatttttgtttattagccatactaccaacttctacagttgagattaatttatcatcattactcaacgatggaagtaagcatcttaatatatatggtttgttggctattttggtttattctgtgtcagaaaattactgttgaatttttaataataagaacctcaaaaataaccaacgcacgtaaacgtcaccgccgtagaagcaaacactgcatatctacaatcacaagacacaaggaactaaggaagatacacttaatgaccaaaagtctattaatcatacattagaaaacctaagttagccatcacacagagtatattggcatccattacttcaagatttatgccaaccatttgatgagtgcttaatttcaaggatccttttctttgcgatgattcgattgcgtatgacctctttggattcaacagcttcatcactgttactaagcaccatagcacatagctcatctaaagctagcattgaaaatggctcctctataagaacacccacctgcagacatttcaagcaccaacttaaagagtgataatgaggcaagaaaaaaaaaatgtgactaatctatgaacgagaaaaagttaggtacttcttcaatgcagaagagagaggcagcactgatgaaagtagcagggactacattccagtggcaatcatcccagagaataacagggagtgttagatgccataagactaagaacctcgacgttagtcgtgtgtaggaaagtggaatcggaattcccattagttgttcacatacaccaattccttcctgtaattgcatcatctttgtttcctgtgaaggagaacactaaacattatagtgcatatccaaagtctatggaaagagaattacattcagaaatcacagtcaaatgaatgaagatgcttaaaagattcaagaaagataccaacatatctatctttgtactatccaaattcagcagctgaaggctctgagaaatgaattgaatgacacaacgtggacgatgcttggattgaagaatcaaagacagatcatctacttctatcacattcttgagatcactagcaatatctgaaccataaatcacatggcactgcacatgaatagaatcacaatcacgaaccttcctctacctaactcaacataagctaacttcacaaaacaaaccttaagcgccacagggaaagcaacaatgtaacgcaaaagcgcatctctgatgatcaattcatcaccggagccatgaacagaagaaataactagcctagctaaatcattggttccactaatgatcttaacccaagctttccttccttgttcaaaccttgaataagaagcctcagtgcgaaacactagaagcagagctaaagccggagccgtaagctgatacggtagaggagaagctcgaagtacagggaagaaatcaggcaaccagtccaaatccacggcggagttatagccggcgatcaggatcgcgacggtggtgaagaagaaaacaggcggaatcaaagacagtataacgcgtgaagatgggctcgaggatacgtgacggagatggcgaagagagcttctgtgtctgacccaattctcgtgagtgtagagagatcgtttctgctgcatccgtctctctttgataccgtcagaccagtttgggacagctttaagcagcgaaatgagcttctcggatagaggtgaatcgtcggatttggggccggaggagacgcaggaaggattgaatttgaaatgtagggatttgggagctctggcggagattccggagtataatcgtggtttgagaaaggataggttggtaaagttagaagaaaaagataggttcattgactgatacattttgggcgggaaaatcgaggtttagggttagggattttggtggagacgacgatgaagaagaagaagcagagacaacaataaagacacatgcaaaaattgcagagtgcataagtaaagagagacaagtgtgacttggagaaaggtagttggaacgaacagttgtgcgctcgacaacgtttcggtttctaagcttttatctgggcttaaatgggcttatactgaaacttctattctatcttctaaatgggcttatgtcttatctcagcccattaaagttccgtaccctttgaggtcagttgaaatttagggtttatagagaacgcctatctggttggagaggtgaaattggaacggaaaaaatg

SEQ ID NO: 12086 - DNA, 3000 bp, Unknown
  misc_feature (1)..( 3000): cDNA_ID_2711455_gDNA_ID_2214530_Annot_ID_134265 3000 nt of promoter + ATG
aatcctggttcttgattcaatatataatggagctttcttttttcaagattgcaagtttcagagatagatagttaattaccaacggaagccattctctgtttcttgccggagcccggaggtcgaccacggccgcgtttgttagagttgttgggagtaatggtcgaaacagaggaagacgacagagccaaagaaacagagccgtcttgaccgtattttctaggccgtcctctctttcgtttcatcggagtttcactgggaggtggaggaggagcaatcatattaacgccgatatgatgaggaagagctccggctcctccggctgctgttgccagagaaggatcaccgtgtaaagaaggagatccgaaaccagtggagcctgacccgaatggagagttttgattaggtaagtgacgaagaccttgctgttgctgtggtgatccatgaaacgttggaggacccgacccggataatcctctatggatatagtaagaacctgacccggataatcccattgcatctcttcgatccatttcgcatttacaatagttgaagaagaaagactcttttcaactttttaagtgaacttgtgaaaccctaaaaagattgtggctagaattatgaggagagagagaaaaagaaagaggataaatggataagaggaaaaaacagaatcaaaggttgagagactttacgatgaagatataaacttggagagaaaggaacatgcaaagctctaaacactttctctgcttcttacttctcctcctctctctctttcattctttcaccataagcaacaagaaaagaaaagctttctcttctatcaacaatggttaggacttggttttgaggctatctctctctctctctcttcttgaatttgtttgctttttagttttctgggtgacagaaggaaacagaaacaaacaaaaaacctctaacagactctctctcaagcaaaagcatttactgtgaggataacaacaatgggatcttttaattcttttttttctgaaaatgtatttggaaattcaaaatcctaatgaataaactgactttgactgtagctctatatagcaactaggcatctgtatggcacatgactcttatggccacactctttattcaggcgcgtgcaccaacatgtcactcttctttcttctcaaccagaaatcttggtgaacagattcctccttttcaagctgatgctacttcttactagtctctctactgtttctatagactgattgatctcttcggaatttgatctgagacggaagaatctgtagagacagtggaggccacgcgccggagagtgagaaaagatttgggcctgtctggtcagagacttgcccactggcttccactttgagaactattttgacgagagagagaggctgatcagaagaaatctataaaatatctcgcaaggacccattgatgggatgatataacctctcaaagcctttgagattttttcctattaggattcaactttaaatgtaccatgtaatgtgtgacactgtttgtataagacttttgattatgacaaacataatttgactttctaaaagacagtttttttcttcaaaatatgtttagtggaatactggaatgtactaataaactagaaaagatcttgggtctgactaatgcaccatgaaagtcttatgccaattataaacatacttgtgtctttgttttgtttacctaaaagttgactttttctcagagaaatcagaatctatgctgaatttgaactttagaagcaattaggaaccatacacatttcacttcatcaatagctacattccacaatgatcccgatccggttagatagcaaaatcttgcattcaaaagagagagtgatacataagagtttaacctataagaagaagctagcttcaacatgatttctccaaagtaaagacgaagatcaatgaagaacaattttacatacaagtgaaaaaaaacgaagttccttgtcaattgtctagctccattgcctgagcagctttagctttagcagttggagtcagttttgtctttaatttcttcttgccaacagaaaatccacctttcttcttcttcccacttccatcaacctagacaacaaaatcaaccaactcacagatatcataaactactctagacttcatttaaatgatttggaaaactcaaacttattcgtcagatgttctactaagaagattcaatattattatttttaccccacataagcttctgactaacactatcgaaatcaaattgaatccaagcgaattcaatcatttcaccattggtaaccaactagagtaatatatagctagaaaagaccattctctgcaacagaatcggtttgctacttaacgaacaccaatgtatatgaactaaatatcagaattaagagataagagagacagaaaaggtccttactttcatcttattcttgttggcatgaagcttcttgatcttcttgtcctgtaactctttctcttctgcaaatcgaaaaaattccaagttttgttgagaaacacatgcgtattgaattgaaagcgtttaaagagatttaaagaaacctactttggagattgtactcgtgctgcttctttctcttggctaaattgttcttcttcgacattttttccgttccaatttcacctctccaaccagataggcgttctctataaaccctaaatttcaactgacctcaaagggtacggaactttaatgggctgagataagacataagcccatttagaagatagaatagaagtttcagtataagcccatttaagcccagataaaagcttagaaaccgaaacgttgtcgagcgcacaactgttcgttccaactacctttctccaagtcacacttgtctctctttacttatgcactctgcaatttttgcatgtgtctttattgttgtctctgcttcttcttcttcatcgtcgtctccaccaaaatccctaaccctaaacctcgattttcccgcccaaa

SEQ ID NO: 12087 - DNA, 3000 bp, Unknown
  misc_feature (1)..( 3000): cDNA_ID_2711451_gDNA_ID_2214530_Annot_ID_134266 3000 nt of promoter + ATG
aactttcacattacatttatatggaagtcgcaagttatccttttatacctttggaagagtggtgaggtaagaatcaggaatatccatgtcattaagagtggaatcgttaatggccaatgctgctttatgtatctgactggcacaatcgcgtttgtgacgcaaatgctttcgttcttcttcagataaaccttcagcaggaacacatggcaccggaagccaccatttctcgtctttccgttgaaccaccactttcctaaacgttcctgaatctctaccaccaccacccgagttcatcgatgagcttcctctttcaacataccagaactcgttttccgtaaaactatccaatatttcctacaaaagtcaaacaagtcgtgttggaaatcttttgaatcttgattatctatcagtctaattcgagtcttatacttaccattagcatgttatcgagttttctcaaagcaggaagactcatgagaatatcagatcttagctttgtttctgttatctgaaattaaaacatcaacgcaccggttttttagcgttttaaattgtgtgtgtcaaaattaagatagtgttgaaatagtattttacctcaacgttagtaccaagagatcttggaataacttcgacaatgtaatcacaaatagacatgaaacaattcatctctcgtttccataagtctttcttctctgtactcaatggttgtaaccttaaactctgtccaaacacagtcgctgcaataacacaacaaacacacgctacactataaatactctgttttgaaaacagagcatatttgaaaagagaagaagaagacaaaccatagagattggttatggagtttgacacagtaacagcagtacaaactcctttcccacttcctgacatgtcttcaccaagcaacagcttcgcaaatctttccctcatcatctctagctctgcactagaaaccccgatttaacgaaatgacaaaagaagaaagttacaatcttaaacactttacctgcatcttctgcagaatcaatgtcgctgtcttcttcgtctccatctccgtggacgtcgttgacgacatcatcttttggttcctcggcgtcttcggagacatcttcttcatggccactcaagacaacagcgttagtgtttgacggccggttataaaagctctgaacgtcgaaccggtgagataatccggagatatctgagtatgttctccggtacggcgaagaaacagagctcgtcggagttccctcattttggtcggaattcgaagaactctccatcacgattgtgtataatgatcaatgtttttggtgagtttcaagttcttctctttcgttgttggctcctctggctctgatgaacgtgacaaagattaatacatggagtctcttcctcttcagcttgagttattatttaatgactaaaaattaagttatgattgtctccgacgaatgatggccgtccgatctgattgtgggggagagacgtgccttccacatttggctaatcaaatctcataatgaacgttagttgctatatatgcgttaggtgtataattaataagtaaaggttgtcccattcatttctaattaaattctaaatgacatttacaccatgttattgcaattttcagagagtaatgttactattggaattattattttcggttcacatgtttttagttacaaattattaatgtagacataacaattagaatcacatcgtataaatgtcatttactaatttttttttgtagacattaaatatttttagatcattttaataataataatctcaaatttgtaattgtcatcaaaattaaatcggatttacaacatcttttaatgacatttgagtttgttttgtaacgaatgtttttggtcaacttttagttgacattcaacgtaaaccctcgagacaaggaagaaggttcaagccaatgaagccatggtcaatgtctaagactttactttggttttaaaaccgggatgaagtccacgtctacaagagtaaaacggcacgcagtttgtgaacactgttttcaaacgaccataattagacatcacatcatgcgaactgtgtctggtcaggcaagtcacgtgactatctccctgccttgccttgtgcgccgcagagtgcatcgtaatctcgtgatggtggtggtggcacgtgcttcccttcacacgtttaatgagcccgtctctactcttcaattggtttacgcacacacgcatagttcgtgccaagccttagcttcacacactcctctttctctcagacacgctcgagcgctacacacgcgcgaaagctcgtcttccaattcacgctgcacgctccttcacgcgcttcctccatctcacggccagatccgcctcttttcacccgccggagatccaccgtcttcttctcctctctcttggtttcgctgacggcgacagagggggaaacctttgatcggaagctccatttatagggttttttagtattgctcgatgattcgcccagagggccgagaattctgaccaatttcgagaggaggcttgtgattgttgaaagaattgtgcttagtgtctcttactcacagaggtcaatgatatatggttaggtacttaatctcaattgtgcttgaaatagtctctgtttggtttcgttagtcacaaaagttttccattttaatgtctgcaaatatgtttgtagttgaaaatgctgtttatatgtttgatttttgtcttgtaggatctttgatgaagttaaactgagagcagcttatgcacattgagagattgaagattaatttcgttgatactaaaattatctccaattttctaactaactgtaagcaaggaaatatcatagaatatttggctgcattgtccagaaggattacacgtggagtgttaaaaccagagaagtaaagatggaacatttcatcataaagggcaataacgttcttaaactaacagaggtttgggtggttgggttataagagaagtaatg

SEQ ID NO: 12088 - DNA, 3000 bp, Unknown
  misc_feature (1)..( 3000): cDNA_ID_3023822_gDNA_ID_2214530_Annot_ID_184915 3000 nt of promoter + ATG
cgcacctaaaagacatagggacacctcatttaacaaattatctacaacattttcttacttaaatactttataacattgctaattttagttatgagtgataattttacatgctccattcccaacaattactttattttatagcattgctttcttacttttaattctccaacaattttagttattattagtgtcgagtgagacgaataaaaaaactaatgactttatatccttttattaatcaaaaaagaaatgagattcttctttgtgttctgttctttttgttatcatcttcactatttttatccatgacaatatttttttattatgaaatcatctatagatcaatcaagcatgacagccgaattttgtttgtctataatgcaactttaatgtaccaactacaccaagtattgatcaataaattgcctatatgcaaaatcaaacgccatgtaccatccacatgcatattcatttgcatatatataccaagtagtttcaccatgaatgtgtaaaataaatgcatgatgaatagtgggttttaatgaggttaaagaagaagattggatagtgtaatattcggcagcaatccactatttgccaaaaaggaaagacaacgtttaagccaaaagaaagaaaaaaaggactaaacaattatggttgcttcgttgctttgttgtctttttgggtgtaacactatgtcctacccacgtgctgttttcttctagtcccattaccaaatttcgttatgttctatcgcttgccttcttttattaccgtccaagctctcatatggaccaaatttgatctgaccatgcaccaaatttccctggtaaattccctctttaaacggtgtatagtgcagaagttatgttatcgcctttcccgtgtcccaaaccatgtacatgctccataatgaagttaaactcacatccataatgaaattatttattgaacggcctatatttattttggtatgagtttgatcttgattagtaaattctgtcgatattagaatagtcttttatattttgcaatttttttggccattcacacaattctgaaaagttcatttacaattcaataccattttgtcatgtattcacaaaaaaaaaagggaataaaataaacctatgttacaattccattcaacctatgtatctaatttcaactactggtgttccattatagtactatcaatcaaaatcaggattgctacttttccaaatccttttagtatttcttggttttttaagcaatggcttttagctttttgtgaagggaaaaaaagggggaggttgtaatatatttggactttggtatgagaataaaatattccacgattccaagccgtccaatccatggataagaggacacgtggcataaacttacgtatacaaaaaccgaccaagccacccaaacacttgtcaccttcagccaaatagtaaaatcatttttagttttatttttcatgagtgcaataattgcatgcccactcccaatattcccgttgcgttacagtccccacttccacctctcttggattatttaattttgaaacattttgttctcttttttctttttttgacaaaagagttctgaacaattcacaagtacaataccatcaatactagtatgaatcaatagtttttaaagttttgaaataacatcatggataaaaagattagacaccaaattttggatatatcaattaaaatttacatttcaaaacaaaatttgccaagacaaattgctcctcaaagttcctacaaatttaaattcaaatgtattcaacaaaagttttggaaaatcaaattccttagaaatttcaaatgaggaagattcgagcctttttaaaaaaacagttgggccatttatcacctatataaaagcccatacttattattgggccaacaatttttaatctacaagcgcctcggctttttaacaaattctccaagcatcgccaactcgaaccactctcgctactagagcccaccgactcgagcctagtttccttttttacctaacgatgccgttatggttgataccaccactagccattagccaacatgatcatgacacctggacatgatcggtcctctcattttcttgtttttcctcctcctcatttgatttttatttttatttttaataaaattaattcctaaatttagtccgctttctctcacttatccgctcggccgcttccacatcgcttggccgcagccgccgccgtccgccgtcgctatccaccaccagattttaaatccccgccggaagttcaccttcaatacccaatatctgttataaggtacaacgcgccaattcgcataatagactctccttggttcaaaagagcttctcggtggttacgtgtatgtatctcaatgtgtttgcttttgcttgtttgatatattgtgttttggacaattcgaatatctgtattatctccaaacgtatacggctgtttctgcttttttttttttttttttttgctgcttcattggatcagttttaagatacctcttttgttttgcgtttccattttattctatgttaaatgctcaaaatttgtcataaagagagaagctttttagtatttctttgaattgagagtgtatattgcttaatgcttattggtttctttaagacacggttcttcattacatgttaagattcagggttggctttctgagcgttcattatcttttgttaagtggttagtctccgttttatagatctctcttcttttttccagtttggtggatgaagttgctggatattgcttgagatcgtcatctgacctcaaaactcatagtcctgagtactttgctacttggcgtatttattttatctggttggccatttttgtcctgaaaagcttcaggatttaaggaaaacagagactttgtatagtagggtttgtcctacttattggagctgatggtgtaataatacatataatagcagaagactgcgtcatcaaatctattatcaatg

SEQ ID NO: 12089 - DNA, 3000 bp, Unknown; identical to SEQ ID NO: 12085
  misc_feature (1)..( 3000): cDNA_ID_1807725_gDNA_ID_2214530_Annot_ID_184906 3000 nt of promoter + ATG

SEQ ID NO: 12090 - DNA, 3000 bp, Unknown
  misc_feature (1)..( 3000): cDNA_ID_3023854_gDNA_ID_2214530_Annot_ID_184904 3000 nt of promoter + ATG
tgtatcacatatcaatgtccatatgtgatttgagcataggaataccaaatatggatgaccaaatgtctcctactaattaataaaatattatctatttaatatttaaaaacattttaactcttcgaaaaactaaaaagtaaacaagattcacacaaaaatatgaacgtcattaacacaaaagatgtgaactctggttagtgttgaagataacgtgaaacaagattcaaatcctcgtggaagagcaccaatcgatcaccagaatcaaacctttgagcttcctcctagcttcggtaacgtttaatctcacctgattctcgtttttcttctcttcctgttgaatgtttgtgaacatagatatatataaagctgagatagatatagattcatgcttcaacggaaaagcatgaagaggaacaacaacaatcttctaacgaacaagaataagtatgtctatcttaaaacggcgtcgcatccagcaaaaagcatcgctaaagctactctgttcctcgtcacctctctcttcatatctgctggtctcttagacttattgggttgtttcgatttcgtgagttcgaatctgaagtaacttcttttttagaaactttttattcaatcaagtgaatcttgaacttgaagagttaataaattcatatctctctgtacttcagacaacttttacaggtctgaagcaggtaacaactagtatcagaaaatcaccaatcacaagccaaagattccctaaccaatgcggcgtcgttcagaaccaaactcaattatttccccaaaatggctcctcgagaaacaacgacaaacccagaagcagccattcaagaatatccacgtgtccttcttacttccgttggatccacgaagatctacggccatggaaagagacaggtgtaacgagagggatgcttgagaaagccaggaggacggcgcatttcagagtagtaatcctcgacgggagagtgtacgttaagaaatatagaaagtcaatccaaacaagagacgtttttactctgtggggcatcgtacagttactacggtggtacccaggtaggttaccggatcttgagctcatgtttgacccagatgatagaccaaccgtccgatctaaagactttcaaggtcaacaacacccggccccgcctcctttgttccgttattgctctgatgacgccagcttggatattgtcttccctgattggtccttctggggctggtaagggcttaacacacatgttaattctattctgttctctatttaatgggcttgttattggacctagctaattatattattattgggctagggctgaggttaatataaagccttgggataaatcgctagtggcgatagaagaagggaataagatgactcaatggaaagaccgcgtggcgtatgcttattggagaggaaaccctaatgtggctccaactagaagagatcttctcagatgtaatgtctcagctcaagaagattggaacacacgtctctacattcaggttaggatttctcaaaatatgtataatttttatatattgcaatttttaaataatctaaatgatcaaaaatgtttattattgtgaaggattgggatagagagtcaagagaaggattcaagaactctaacctagagaaccaatgcacccacaggtttaacttaagccacactttttgtacttaggaaatatttgcaaagattcgattttaaatgtgtgataatgatggaataggtacaagatttatatagaaggatgggcatggtcagtgagtgagaaatatataatggcatgtgattcaatgacattgtacgtgagacctatgttctatgatttttacgtacgaggaatgatgccattacaacattactggccaatcagagacacctctaagtgtacttccctcaaattcgccgtacattgggggaatactcatttggaccaggtttgtatttttttttttacattaagacccaaaaagttttgttttgtaacaaattaacacattgagtgtggttttttttttttatataggcgagtaagataggagaagaagggagtaggtttattagagaggaagtgaaaatggaatatgtgtatgactacatgttccatttgatgaacgagtatgcaaaacttttgaagtttaaaccagagattccgtggggagccacggagattacgccggatattatgggctgctcggcgacgggacggtggagagatttcatggaggagtctatggttatgtttcctagtgaagagtctccttgtgagatgccttctccttttaaccctcatgatttaaaagagattcttgagagaaaaactaatttgactcgtcaagttgagtggtgggaagatcaatattttcatgatttagccaatatcaagaagccttgaccaaaaaggctcttgtgtttgtttagatgattgagttgtattcatatattgaaattagtgaaaagtaaacgagtaattttttttccgactagtatgtgtctctatctccactagcgatcttttttccgactagtatgttaattgagttgtatattctaatgttttagtaaatgttataagtttagttctattttttttaaaaactttactaagatatttatttaggttggaattttttaaaattaaattcattaaaattataagaacaaaaataaaatagtatgttctaaaagtataatgatgtttttatagtatcagaccttgttaattttcaaatcatataaaatgtaaagatttatattctaatttaacttgcattaaaaaatctatagcattgaatatataggcaactgaaatagttcattttggtaataataaggtaaattaagaacatcaaaatttggtatctgtagatattagaaagaaaaaaatgtgtgtttggtaagtggttcaaagagaatgaaaataagaaaaatatgtgtttgataaatgtgatggtagaattaaataataaaaaatataaagttgagaaaa

SEQ ID NO: 12091 - DNA, 3000 bp, Unknown; identical to SEQ ID NO: 12083
  misc_feature (1)..( 3000): cDNA_ID_2711463_gDNA_ID_2214530_Annot_ID_184903 3000 nt of promoter + ATG

SEQ ID NO: 12092 - DNA, 3000 bp, Unknown; identical to SEQ ID NO: 12082
  misc_feature (1)..( 3000): cDNA_ID_3023858_gDNA_ID_2214530_Annot_ID_184901 3000 nt of promoter + ATG

SEQ ID NO: 12093 - DNA, 3000 bp, Unknown; identical to SEQ ID NO: 12081
  misc_feature (1)..( 3000): cDNA_ID_1808010_gDNA_ID_2214530_Annot_ID_184900 3000 nt of promoter + ATG

SEQ ID NO: 12094 - DNA, 3000 bp, Unknown; identical to SEQ ID NO: 12079
  misc_feature (1)..( 3000): cDNA_ID_3434945_gDNA_ID_2214530_Annot_ID_184899 3000 nt of promoter + ATG

SEQ ID NO: 12095 - DNA, 3000 bp, Unknown; identical to SEQ ID NO: 12078
  misc_feature (1)..( 3000): cDNA_ID_3023862_gDNA_ID_2214530_Annot_ID_184897 3000 nt of promoter + ATG

SEQ ID NO: 12096 - DNA, 3000 bp, Unknown; identical to SEQ ID NO: 12077
  misc_feature (1)..( 3000): cDNA_ID_2708272_gDNA_ID_2214530_Annot_ID_184895 3000 nt of promoter + ATG

SEQ ID NO: 12097 - DNA, 3000 bp, Unknown; identical to SEQ ID NO: 12076
  misc_feature (1)..( 3000): cDNA_ID_3023870_gDNA_ID_2214530_Annot_ID_184892 3000 nt of promoter + ATG

SEQ ID NO: 12098 - DNA, 3000 bp, Unknown
  misc_feature (1)..( 3000): cDNA_ID_2711447_gDNA_ID_2214530_Annot_ID_134267 3000 nt of promoter + ATG
aattcacacttcatattgataaccccaagctgttgacagaacaggatatgtagttagtaaggatgaatttcaggatattattggtaaatgctaagattaaagtggcttactggtaacatcacataaaccggaacataaggagtgccagagaaatcttgctccgtcagatttggaggaatctcgagaatctaccaaataccaaaagtggaagagagtcatcacaattgaacccagatatgtgtatgcacgtaaatcaaccatgcagtgaaaatctgacaggttcttatgagattttcagattttgaaaatgtttttctcaagttgaggaaactatcaaattcattaatttcaaataagctatgtaaatgcaaaggactgaactgttacaagatttattttctatgtactagtaaagtgtcgttacttgtttagagttgataacatcgactgaacaaccaacaagcccctcagccttatttacactgccaaccagttctggagattggattgggagcatatcatacggtgatggagcgggtgtgaaaacacctttcatacggcaagagctgagttccactgggcttctaagcccagatgataccactctaagagcaggaggtgaggtttgctgtgatgcaatgtgagaagctgatgaacctgccgcaaccgcagaagaaccaccagtaggctttgtcccctaaaaggttgagcagatcaagaagatgatttagctttcactggtaatggatatgtcaggagtttttccccaaccgaggatcaaggttactgctaatgatttctgacaactaagagtagaagaattttgcagcatacaacaaaagacataacacagggacagggtatataagtacctgagatttggatggaaaagtagttccatcaggaagaacaacccatccagcttcccttgccaaagccgcgataacatcgttaatatcagctctaactctcaggttataattcccatgccttcgtaacccgcctagtatccttgcagttatagcccttcgatggcgctctctcaacttagttcgctccttctcttcaagcggtctacttctgcgacttcctcctcccccaggagtgcccacttgatcttgcattgactgctgaaacataaactcgtcattactactactgcctgaagctgcgtgtttgtctctatttcgtcggtctccatcatcttcttccttcacatccatgtccatttcttcgtcatcatcctcttcactagttccaagcagtttatgcatatccgtcgccattacttctcttataacccaaccacccaaacctctgttagtttaagaacgttattgccctttatgatgaaatgttccatctttacttctctggttttaacactccacgtgtaatccttctggacaatgcagccaaatattctatgatatttccttgcttacagttagttagaaaattggagataattttagtatcaacgaaattaatcttcaatctctcaatgtgcataagctgctctcagtttaacttcatcaaagatcctacaagacaaaaatcaaacatataaacagcattttcaactacaaacatatttgcagacattaaaatggaaaacttttgtgactaacgaaaccaaacagagactatttcaagcacaattgagattaagtacctaaccatatatcattgacctctgtgagtaagagacactaagcacaattctttcaacaatcacaagcctcctctcgaaattggtcagaattctcggccctctgggcgaatcatcgagcaatactaaaaaaccctataaatggagcttccgatcaaaggtttccccctctgtcgccgtcagcgaaaccaagagagaggagaagaagacggtggatctccggcgggtgaaaagaggcggatctggccgtgagatggaggaagcgcgtgaaggagcgtgcagcgtgaattggaagacgagctttcgcgcgtgtgtagcgctcgagcgtgtctgagagaaagaggagtgtgtgaagctaaggcttggcacgaactatgcgtgtgtgcgtaaaccaattgaagagtagagacgggctcattaaacgtgtgaagggaagcacgtgccaccaccaccatcacgagattacgatgcactctgcggcgcacaaggcaaggcagggagatagtcacgtgacttgcctgaccagacacagttcgcatgatgtgatgtctaattatggtcgtttgaaaacagtgttcacaaactgcgtgccgttttactcttgtagacgtggacttcatcccggttttaaaaccaaagtaaagtcttagacattgaccatggcttcattggcttgaaccttcttccttgtctcgagggtttacgttgaatgtcaactaaaagttgaccaaaaacattcgttacaaaacaaactcaaatgtcattaaaagatgttgtaaatccgatttaattttgatgacaattacaaatttgagattattattattaaaatgatctaaaaatatttaatgtctacaaaaaaaaattagtaaatgacatttatacgatgtgattctaattgttatgtctacattaataatttgtaactaaaaacatgtgaaccgaaaataataattccaatagtaacattactctctgaaaattgcaataacatggtgtaaatgtcatttagaatttaattagaaatgaatgggacaacctttacttattaattatacacctaacgcatatatagcaactaacgttcattatgagatttgattagccaaatgtggaaggcacgtctctcccccacaatcagatcggacggccatcattcgtcggagacaatcataacttaatttttagtcattaaataataactcaagctgaagaggaagagactccatgtattaatctttgtcacgttcatcagagccagaggagccaacaacgaaagagaagaacttgaaactcaccaaaaacattgatcattatacacaatcgtg

SEQ ID NO: 12099 - DNA, 3000 bp, Unknown
  misc_feature (1)..( 3000): cDNA_ID_2711443_gDNA_ID_2214530_Annot_ID_134269 3000 nt of promoter + ATG
attactatatcattttattcctaattaactgtacttctatttctaattaagattagtattcaaaaattcggcttaaagagattaagatacctttaagtagctgtatagacagacaacccctaattagaaagcagctactcttttttttttttatatagtagtaccaagataaacgacaaaagcaattaacaaatgttcgcaatgtcgacctcatcaaaaacaaaattaagaaaccgacaacgtttcttgtatttttactcagcatataacaacaagagaaacgacgacatagtggagaatacgaagcatatagtttcttaggattcttctatcacaggtcactgccttttttgtctacgtatcttgtcctaatttgcatgtgaagatttgatgggctttttgtgcatcgctttcagcattcggaacccgatcatattcgttttatccgactccgacccgagggttatatgcaagcaattaatatttcgttgttcttgttcgttcctgaggaccatcgccgaattctaagacttgtgattacttaaactggaatttaaaagattagaaagctaacaaaagtatatggtaacgtcatgtgtaattaaatgcatgattagtttttgacttttaaatatcatatagtttttgtttttgtatgttatacagaattctttcattatgttctacctaacagaaaagagatataaatttagtgtaatcttataaaataagcatggctgcggttgccatattacaactctgtctaatcaccacaatcattttagttaagggttttggtaacatataattatcatggaaattaaagacggtgatagcgtaaactaattaagaaaatcacatcacatacttgatactcctaaaagaaaacattaaagtagaaagaaagaaactaaaagccaaaaatgcgtgtgtaatcgtatgagtgatatttggtgtactacaaagcctgcaatttgaaaatgttgacacgtacgtccttaaaacatttgagactattggattcagacttttgaaaagcaaaactttggattcggaaaccaggcaggcttatatggataccattaaggcccgtgaatcatatattgcccatttaaggaggtatttatttttgatatattttatttttaatttattataagttcatcattatcccggttatcgtgaagactagtcatatccaattaacgttattgctctaacggaaacgtgcacaaacaaattcaaattgcagtttacggtgaagcttttgacgaatgaataaagagatgctacatccccaaatcgtatatcctaagttgaaatattccatgataattaaactcagttatatatataacttggttagttaacaaactggtgtggatgtgcttagcctgtcttcatatcctgagacaactttttctttatttttaaaacctgtcaattacaaaattaacgtaatattcaataacaaataaaattctatttcgaccccggaaacatatatatatatatatatatataattcaaatgaaaatgacaagggaataagcatttcggagaatatgcctattaatttacattatataacatagtacaaccacacacgccacattaacaattcaactagctagtttttaatttatcagaaaatgaacttgaaaatatgttataatctacactaaatgttaatagaagactttttctcatctattttcaggaaaaaaaaaataacaaatttcttgaaccaactaacaaaattagcaaattaacgtacaatgatccattttttaacaatcattagagtgatatagtagtaatccgataccagatcctcaaaatatatggagacatagtcattcaactgctggtttttgcataatccatgtgtattagcctaatactattaggtttgatgcatccagtctttctaaaacacgtcattataactcacgcgtttagtttgatagacatataatgatgcacttaatactttcatattcgttgtcatctatgtgtagcagcatagtgcacttgttcgtctcagactttatagaattttagattcgtgagtagaaaatggcttttcgcttaacttttcataaatcttatgtcacacttaattaaaaattgactagcaccttaaaattaacatatatgtgtaacatgaagaatattgatatcttgcatgatactaactcttttggggtcttctgaaaaatagattgcatgcatatctgatcaaatgcaaatagattatgttataaaaaaaagtcatttattctactgattggaatggaaataagttttcaccggcgggaacaaaaaaggtgaacacgtcggcagaaatagagaattaagaaagactgcgagttggtgtaccaaatctcatccgtgcttctcataatcaggtacacgtgtcattaatcggttaaggtggaccaccccatagataagtactactgtgtgtgtgtccacagcagataaataaacctcttctttcatgttctcgaccacgtcagattttttagcagcaaagcacacaaatccccaagaagcttcgttttggtatgttaaagtaaaatcgaataaattttgcacacaaatctcaattttaattgtctttccctcttctcgtgaaattttccgacaaaatatcagtttcttcttgccgtgagttttggttggtctgaccaagagtccttttatttggtcaatacgtttcgaaatttgataatcaaactctttcttcctcttcttcttcttccttatccgtagactctagggtttcaatacgattcgagtgtgtctgtttgctctctagtcaaaaatttcactctggttagaaactttcccttttggattgtgaaactgctattttaaatcactgcttattgattcgtgttccggagtgatcttggtgaatattcttaatttgtttcgttgttttgtggttttagatatcaaacgatctggtttgtcggatttgatattggagca

SEQ ID NO: 12100 - DNA, 3000 bp, Unknown
  misc_feature (1)..( 3000): cDNA_ID_2711439_gDNA_ID_2214530_Annot_ID_134270 3000 nt of promoter + ATG
aatattatagtatactgatattataggtaattattataggctaaacaatcagaaagtgcctattctgaggaattgaagcgaaggaaagatacggagatagcagtagcgaaagagaaagagagatttataacaataaaaaacgagcaagaggtgatcatggaagaacttcaaagtgcaatggctcagaaagcgatgcttgagagccagatagcaaaatctgatggtacaatggaaaagctaaaccagaagcttgatatagctgtgaagttgttgcaaaagttgagggatgaacgagaggagttgcagacagaacgtgacagagcactcagagaagctgaggagttaaggagtcacgcagaaacctcaaccctacagttgcctcagtacttcacggatttctcattctccgagattgaggaagcaactaatcactttgattcgaccctgaagattggggaaggtggatatggaagcatctacgttggtttactgcgtcatactcaggtggctataaaaatgttgaatcctaacagttcgcaaggccctgtagaatatcaacaggaggtattttcttgacatattattagtgaaatttcttgtttagtttcatcatcattgtttactggtttattgtgcacaaactgctgcctctacgaaaaaggggactttgaaacacagttctactgtagttttgattttatagtgttcgctgtggaggagctttgacttattcttgcggcattgcaggttgatgtcctaagtaaaatgaggcatccaaatatcattacgctaattggagcatgtccagaggggtggagtcttgtctatgagtatcttccgggtggaagccttgaagacaggcttacttgcaaagacaactctccacccttgtcgtggcaaaatcgtgtgcgcattgccactgagatatgtgcagcacttgtctttcttcattctaataaagctcatagcttagtacatggtgatttgaagccggcaaatatcctactcgattccaatctcgttagcaagttaagtgactttgggacctgctcactacttcatcctaacggaagcaaaagtgtgagaactgacgttacaggcacagttgcctatttggatccagaagcttccagtagtggagagctaactcctaagtcagatgtttactcgtttgggattatcttattgcgcttgttgaccgggagacctgccttacggatatcaaatgaagtgaaatatgccctcgataatggaacattgaacgacctcttggaccctttagcaggggactggccctttgttcaggctgagcagcttgctcgcttagcattgagatgctgcgagactgtcagcgagaatcgtccagatcttggaactgaagtgtggagggtacttgaacctatgagggcttctagtggaggatcttcatctttccatcttggccgtaacgagcaccggatagcccctccatacttcatttgccccattttccaggtaactaatctgtatatttgagtatggatttccagtattattatcaatctgagaagacttcgatcacaaagtcattaaaatttgcttatctgaggtctcaaaccgttatgttgcagtctaatggtactcaacccgttcttcctctgctttgttttcaaatatttcaggaagtcatgcaggatccacacgtggctgcagacggtttcacatacgaagcagaggctataagagcgtggctggacagtgagcatgatacttcaccaatgaccaatgtcaagctttctcacaccagcctaatagctaaccatgctcttcgttctgcgattcaagagtggcttcaacatcatttgtgaaaataaaatccttcaaaccctcaatccctgttctcttatgaaaaaacgtttttgccttttctgcgggaggcaacagagtaagtgagtaagattagtgttttcagtcttccttatacatatacatacgatctaatcatggatagcagcatatttgtttactttttcaagcatagtgtaagtcctccatatcagtcatatatgaaaagaagaagctggtgagatttgtatgtggatatgtatatatatatatatatatatatatatatatatatgttctgtatgaaaaaaaaagttatatgcttattcggtttgtgtgagaagaactgccactattttgttcttccattatgttcggctctcttaagaacaaagattagcctctaattattggacatgatctcactgatgatgcctttgcttagctaaaattaggatgagtcttacatttttagtcaagactatcgtgtaagacttgttttccacctggaagaagttaccttggattgcctatagtgatttttaatgaactcttaaaattcttgtgattaatcttacttaattagcagtggggtcaggtcgttttggcggctagtggcataactgtataaaaattcaggattgcactgaggtaagccaacctaacgcagcctttaaagacaccaacctggaaaatgctgagagtattcttcaggattttctcaaaagtcttgtgaaattcgtgtatttgtgtcaatatgtcgacatttctcttcatacacagatactgtcgcttttgattcctggtttggcttgttgaaagtcaaaaagccttcattattttaatacatgattcagcttctgcgttaaggctaggtttcgtcattggtaccgtggttgacttcgtgtgcatgttataacataagaaaatgttcttgcttgttgattgctccctctgttagataagtcatctcttttctcgtattgcaaattttaagtttgttcttgtttattctcttgagtgaattagaggtatgttttgagtgttctcatatggagtgtgttggagataggagcttcgatccaagcaaaggggaaaagtgttggcttcatgaggcttcgatgcagccttaaacgctaaaatccaggccaagcaagatggagatagagagagatg

SEQ ID NO: 12101 - DNA, 3000 bp, Unknown; identical to SEQ ID NO: 12088
  misc_feature (1)..( 3000): cDNA_ID_2708291_gDNA_ID_2214530_Annot_ID_134273 3000 nt of promoter + ATG

SEQ ID NO: 12102 - DNA, 3000 bp, Unknown
  misc_feature (1)..( 3000): cDNA_ID_2711495_gDNA_ID_2214531_Annot_ID_134278 3000 nt of promoter + ATG
gttaccaaatttgggcgagatgctgtgctttacgtcgagtctcttattgaatcaataatggggggactggagggcctaattaatattcttgattcagaaggcgggtttggcgctctagaatctcaggtcggatatctttacccaaaatcaatattataacaaaagcaatcttctacttgagactgtcctcaaactgatgtgttgacctttctcagcttcttccagaacaagctgcagcgtatctgaataatgcatcaagaatttctgctccttcagtgaaatcccccagggttgtaggcgggtttactttgcctggccatgagagctatcctgagaataataagtctataaagatgtgagcgcccaagtctggctttaagttttgttcttgtattcatgtaatcagtgctccttagatactgtttatctaaaatatctcctcgtgatggcaggttggaagctgcaattcaaaggttgactaatttgtgttcaattctgaacgacatggagcctatttgtgttataaaccacgtatttgttctaagagaggtgagtctactagatttcaaattcggtagaaaaacatatatatggctgaattcttttagaatatatgctcgaatcctatctggaaaattttcatgttttctcagtgtcctgtgaataaaacaatatcttatggaaagacctcatgaatttctctcatcgtctggtcctgttaagcttttaaactttttgattttatcctgccgattggatacttgcagtacatgagagaatgcatccttgggaacttcaagagaagatttcttactgctctacaaaccgataacgatctccagcggccttctgttttggaatctcttatcaggcggcatatgggcatagttcacttggcagagcagcacgttagcatggacctaacccaaggcatcagagaaattttactcacagaagccttttcagggcctgtgtcatctttgcatacattcgaaaaacctgctgaacaacagcaaaccactggatctgcagttgaagttgtatgcaactggtacatggacaatatcatcaaggatgtgtctggcgcaggaatcctcttcgctccgaggcacaaatacttcaaaagcactagaccagttggagggtattttgcagagtcagtcaccgacctcaaggaattacaggcgtttgttcgtatcttcggcggctatggagttgaccggctggataggatgatgaaagtacatacagctgccctggtaaactgcatagaaacttctctgagatcaaaccgggaattgattgaagcagctgctgcaagtatgcattctggtgacagagtggagagagacgcatctgttaggcagatagttgatttggataccgtaataggattttgtattgaagctggtcaagcgttggcttttgatgacctcctcgctgaagcctctggtgctgttcttgaagacaatgcatccttgatacactcgatgatctctggcatcgttgagcacatacctgaagaaatacctgaaaagaaagaaatcagaaggatcaaaggcgtggcaaatggtgttggcgtagcaggtgatcacgactctgaatgggttagattaatcctagaagaggtaggaggtgcaaatgacaactcatggagtttgttaccttacttttttgcctctttcatgacctcaaacgcctggaacactactggcttcaacatcgagactggcggattcagcaacaatattcattgcttggctcggtgtattagtgctgtcatcgctggaagtgagtacgtaaggttacaacgtgaataccagcagcagcatcagtccctctcgaatggtcatcactctagtgaaaatctcgactcagagtttccaccccgtgtaactgctgaagcaagcattaaatcctcaatgttactctttgtaaaattcgctgcatcgatcgtgctagattcatggagcgaagccaacaggtaagagaaacctggaattattttactctctctctcgcatttttatccgcatcatcatcatatcatcctttttgttcttcagatcgcatctcgtggctaagcttatcttcctggaccaactctgtgagatctcaccatacctccctagaagctccctcgaatcacatgtcccgtacaccatcctcaggtcaatctacacccaatactactccaacacaccttccacaccgctctcaacagcatccccgtaccactccccatccgtatcgctcatccacgcttctccctccatgaaaaactccaccactccccagcgtggtagtggtagcggcagtagctctacagctgcccctgattcaggctacttcaaaggctcatcatcttcactatacggtcaggaacactacaccgaatccgaaactggaaactcaagaaacaatgagaacaacaacaacaacaaacaaaggggaagttctcgtcgttccggaccattggattacagctcgagccataaaggagggtcaggatcaaacagcacaggtcctagtcctcttcctaggtttgctgtctcaagatctggtcccatctcatataaacagcataactaagtaacaacactcccacattctacaaaagagacaaatttgtttctttttccccaaaagaaaaagacaattatgtagagagattagatttgtacaaatccctcgcaacagtcttcttgttatgtattggattgtaattcagaaaacctattatgcatgtctttatcttgggtaatcgactaatttcataattcattaacataaatcaatcatttataatcttaagattgaacaaattcttaagataattaattactttataaatttattaaaaagaaaaaaagaatatctgttgggggcacgaaatgtaacgaacccaaaattagaaccaacagtcatcttcgtcattagtgagctaagttgttcaatctctcacctgaaaaccctaaccttcttcttcaatctccaatg

SEQ ID NO: 12103 - DNA, 3000 bp, Unknown
  misc_feature (1)..( 3000): cDNA_ID_2711491_gDNA_ID_2214531_Annot_ID_134279 3000 nt of promoter + ATG
gtgaaagcaactagcgatatcaattctccagtctcgggtaaggtggttgaagtcaatgaggagctgaccgagtcccctggattggtgagtactcatctcagactcagaatcatattaccattgactccatgtgttgaaccaaaaagaacttcattggcatgatcaaatccgaaatcttagttttgcgggtgtcattttcatgtgatctaacaaattcattcctcgggtaacattctttgcataaatacttgattattcaacagctgttaaaatgtaagtgtcttcaagattcgtaggtctagatcaaattatttacataagtgagtgttggaaagttttaggcttttagctgatgtgaaactcttgatctttgagaaccaatatagatttgatttatcaatagcttgcttaaatatcgttaacttggagattcttgattttgtggtctcgagctgagagattcttttgttggaattcacaggtgaactctagcccgtatgaacaaggatggatcataaaagttgagctgagtgatgcaggcgaggcagagaagctgatggattcagacaagtactctaagttctgcgaagaagaagacgccaagcactgagctttttctattttttccagcatccttctccaagcttccaccgcaacacagattgttgttttctcaatcgaggatcaaaacgagatttctccatctttgtcccttggactgaaaattcccatctctcgttctccttttttcttttcatgtttttcttttaatgaaatgaaattgtttgaataatggtagagaataatgagctttggcgttgaaattgattggatctttcatggagttatgcctttttcttcttaactgcaaaaagtttcggacagtacatcttcgtggaccgaaaaccataacccttagcgggttgaactagtgcttagtgcttagcaagctccaactcctttggagggaccaaatcaaatgctactggaccaccatccatctatttataaacaattgtacaccggattggtaatgttcatactatataagataacatgttgacaagaaaaatgcttctcttcagatggaccttacctccgtaggtctaggcacggcagcaactacacttgtagactcttgaattaatttggagttcagtaaaataactgcccagtcctgagatgaagaaattggaatccaagataatagccgagtacaaagaagaagctaatggaagattcatgcgaataaagaatataggttcggtcatattgtagcaaccgtgtgaaaaccgtttttttgttattttctggttcatagggacctcaaaagataatgtgaaaggaaacaaaatctgtgatgcaatgatatgtgcacagagggaaaagattttggaatcattgttgcttattgtgaaggccaagcttgtttagccacagttgtccaacaaagttacaagatgtgccttgtaatacaatattcctgcgttgtcaaccctactttattatatgaagttgtttttgtgtgtcatggtttccactaatttacttattaatttgattgtttgattgttttctattagtaaaaaagtaatatcaacattatgattaaattctcaaatcaaataattatgttgaaaagatgaaatgcttggatagcactgagctttggacacgcaacaaaaagtgagggaggggcaaattcatcatcagaaacgtcagaaacattatttattagtcgaatcatactaaagtttaacacagtaattctaaaataattgacaattattacacctaaaagctactccatatgtagagataatgataattatatactacaagttagtatttgtcgacgtcaatattgttctcttggttaattgtttttaaatattaaaaattaccggttaagggacttgttctcattttgtcaaagcttcgaaaacttacatttcaaccacccaactagaacgtttgttctttttctaacagaaattttccttttaaatactaaaaatagtacttactacataatataccaaatacttttttctattttagctatcctcattattgaaatagatgtcgtagatttgaatttaccttctgttaatgtacatatgataaaagaacattggtttgttatgctaaaatctcaatagttggagctaatcctatagttttgctaaaaaaaacttgtaatccaaataactacaatcaaaccaaaacaacacatgatttgaaatatcattttttctagtgaaaaaatgttgtcttgcactgctcaaattcaagtagacaattccgattcaatataactaaaaatctcatattttattaaaattttataaacaatttattttttgaaagggataaacactttcagctgttcaattgttcataattttcttctacttacattgtttcgtttcctatggaaatgtttagatttacaggtaaaaagtaaaaaatgtgcttgagcaagaaaagagtaaaaaaaaataaaaaaatctgcattttagttgaaaacgaaagaaattctactgactaattttgtcttaaatgagagagacccgaatttagcaactctttatttctcggctcacacactccgattaagcccgacgctctctctcctctttgtcgtcgtcatcatcgtctccggagtaggttgcagaaattcagatctgaactctcagacgaagctccgatcttactgagacatttttgctcgatttgactttcgcctttaaagcttctcaggtaactttcaatcttcacgagactcttgcttgacttggttttagctccttgtttggttgctgggaaattgacgaggggatatctattctcactcgtcactcgttgttgagtattactgggtttttggaagatgaatgcaagagtagagagctaagtaaattatgttggacgagattgtgtaacgtgattttgaaatacattttcctttattgtagagattattgtactgaattaatg

SEQ ID NO: 12104 - DNA, 3000 bp, Unknown
  misc_feature (1)..( 3000): cDNA_ID_1807221_gDNA_ID_2214531_Annot_ID_134280 3000 nt of promoter + ATG
ttgagcctctacttaaacggatactctgcttgtgttatctatccatcctctccatttacataaaatttatctcctcaacaaggacaagactgtgaatatctccggtcatgtaagaaccatatgttcttttagcggttttagaaaatgagtagttgagactacccatctgcagaatttcttcaactctgttagttagcggatgttcgttcataaagtctattgctttggacattaaccgttgcctatttttgtatataactgattatctgtgtcaacttagctcaggtgttattatggttttctgctgaaacattttgagaattgcttgctttggtacttactaccttagtgttttgagtaacattttcatgaaattgggtttttgatttacaggttggtagctggaaacgctttgaattgcttattcattgattccagtggcttccagagatatttgggttttggagtcacaaatctcaatggtgccactgttaaaagctataagcaagaggggtttgtcatagatgaacgtgggaaattaaaaagatttaacaggaagaaactctccaggaaacgatgtaagactcaaaaactaagaaactttcttatgaatctctgtaagatttggagttacgaatgttttttttttctttcatataggtggctctttgagagggcgaggatggaaatatggatccgggtttgtcgatgggatatttcctgttctgagtcccattgctcagaagattctgagctttattcagaaagaaactgatcctgacaaagtagctgatgtccttggagctcttccttctacacatgcctcatgggacgatctaatcaatgtttctgtgcaacttcgtttgaacaagaaatgggattctattatcttggttagccttcttagaaaagtttcatttttgtcaatcattgttacagtttctttaagtttttaactgtctgaagctacaatcttgtcttaggtgtgtgagtggattttaaggaagagctcctttcagcctgatgtaatctgcttcaatttgcttatagatgcttatggacagaagttccagtacaaggaggcggaatcactctatgtacagcttcttgaatcccgctatgtgcctacggaagacacatacgctcttcttataaaggcatactgtatggcagggctcatagagagagctgaagttgttttagtcgagatgcaaaatcatcatgtttctccaagtatgtctttgcatctcctaagctttttatatgcattggtaccaaacactggctcatagttttcagtcattcttgtaattaacattttcttgttttgagaaactataggtgtaactgtatacaatgcctatattgaggggttaatgaagagaaaaggaaacaccgaagaagcgattgatgttttccagaggatgaagcgtgatcgatgcaaaccaaccactgaaacttacaacttgatgataaatttatacggaaaggtttatagtctaactttgtttgctatgaatacattggggtttcggaaatttcatattcatgtcattgattttcttgcaggcaagtaaatcatatatgtcctggaaattgtattgtgaaatgagaagtcaccaatgtaaaccgaacatctgcacatacacagcgcttgtgaatgcatttgctagagaaggtctttgcgagaaagctgaagaaatatttgaacagcttcaagaagatgggcttgaacctgatgtatatgtctataacgctctcatggagtcatataggtgattaccctaactctcccatagaagaatgattgcaggcaatcgatgaagctgaaatgtaacgccctcaaaatccggagacagtcgtgcaggttatccatatggtgctgctgagattttctctctaatgcaacatatgggatgtgaaccagacagagcttcctacaatatcatggttgatgcatatggcagagcaggtcttcactcaggtaaccaaaaagcttatctcgccagggatgtccattggctacatacattacattctctgtttttgatatatgtgagaaccagatgcagaagctgtgtttgaagaaatgaagagactaggcatagcaccgacgatgaaatcccacatgctgcttctatcagcttactctaaagccagagacgtaacaaaatgtgaagccattgtgaaagaaatgagcgaaaacggagtagaaccggatacatttgtcctaaacagcatgctcaacttatatggccggttagggcagttcacgaaaatggaaaagattctagccgagatggagaacggtccttgcaccgcggatataagcacatacaacattttgatcaatatctatggtaaagccgggttcttggagagaattgaagaactttttgtggagctcaaggagaagaatttcagaccagacgttgtgacatggacctcgaggattggtgcttactcaaggaagaaactgtatgtgaaatgtctggaggtttttgaagagatgattgattcaggttgtgcaccagatggaggaacagccaaggttcttctttcggcttgttctagtgaagagcaagtggaacaagttacttcagtgcttagaacaatgcacaagggcgtgactgtgagttctcttgtcccaaagctgatggctaaatctttaactgtaaactgataaagatagcatttttagatctgccttattaataaaggttggatttttatgatcagaatccttgtatctattgaacagtgttataatatatggttttatgtcattacccacgatgttgctttagtggggtagttgatgcgaaattggtctacgagcaaatgatttcagaaagtgacattttttataagcaaaaaaaaaagcaaatccaccaaaccctttgtcgtaagaatataataataagccgttcggtgagtgcactctttctctctcactgttgttgttgtgtatctgtgcgagatctctccaacgaaaaaatg

SEQ ID NO: 12105 - DNA, 3000 bp, Unknown
  misc_feature (1)..( 3000): cDNA_ID_2711483_gDNA_ID_2214531_Annot_ID_134282 3000 nt of promoter + ATG
ttagaaaataagaaagaaaaacagcatttcaagtgaaacgaaatgctgaccttctgaactaatagaagatattcaaccattgagctgcattaacattttaatatcttacagacatagtatatatatatacataaaacataataatatacaattaattaaatatctgcaatttattaaaaataacaaaactaaataaaatcaacaaccaaatatatacaaatattaaatatgtttaccctaaataaatatttggaaatttcaattatttagtttgctatgttagtttcttctatattttaaaaattattgatttctaaattatataaaacaaactgaaacttggataaattaatttgtatttatattataatatatataagataaatataaaacataattattctaacttgaaattgatgtaatattaatagttagatggaaaataaataaataaaaattattttagttacattataagaaaaagtgataattgtattaatggtatatatatttaaatgaaaaggattgtataaacttaaactcacatatttaatattatatattctaatggtttctgttatttttttatattatatatatatatatacatgctctgtttaccataatacaagaatattaatgtagctcaatggttgagtgtctcttataagtccaaaaattcagctgttcgattctccttgttagcaaatttttcttcttatattctaatgtccaaaacaacgtcgttttgatttcacggagattctaacgaaaagttaacaccgtgattgttttgttgacggaaacttaacgacaagccctaattggccaggtcaacaaaacttaatcattttatcaaaagtcaacctaaactttaggatttaaatgtctttttgaaagttcatgttttttacgtcccaaatttgaaagttcacgatttttttgacatttttccccttctaaaatacacaaccttttggtgtttctacattgaccctcaagataatcttcttactcattttcattatcaaaattttaaccatatactatatatatttatttatttattttaccacctatacgaaacagactttaaatattaattatgtaaaatcttcatttaaaaattaatcatggttacaagttaaccacatagattacactttacttgatttacatgatgattagatatcttacacgtacgtcttttatctaaaaaacaatgaaaacctcttaattttctaaaaagaaattatcttattatcacaaaccctaaatcgattatacgagcgaagtcgacatcgaatcggagaattaagggatatatttcattgttttcgttttctcgatataaatccaagttgattccagcgaaagcaaataagataatgtacgaatttttgccatataatatcgattatgaataaaagatgcaaattgtctaatgtgctatcgattatgcatattgttgagttcctctattttgattgcatcgtctttgaatgatctctaactattcttatccaattctgattaaaaaacattcatttgtaagtttgtttttcttcgactgtgaactctatactgcaaatcgatttagaacatatgggctatgatcaataaataagaaaacatcaaaacatattgacaaaactattgttcaaactagtgttccacactaaagattactactagttagatgtttttgatgcaatttggtagattggaggtttgtaaaaagagttttttttccttgatttatatgatgaaaatgagtcaacatttcactgtttttccgttgaaaacttagtgggtgattgattgggctataactgtagagtttttgctgtagagattttgttgtaactgtgttggcggtagttgtaacttttattgctgtaagttttttattttaaataatttataaaaaaatggattaataaaatataatagttataataaaaaaaattatagtaaataaaatatcttgtattactaatttaaataaatatattatgatgatataaaagtaaaatataataaatattttttttgttatatatttatgttgataattttaactttttgtatttatttaatgaattaaaatttctacagtcaaaagaatatgactttgagaatttactctcctacaaccttaaaaataaaaataaataaaaattaaactataagttttaaaaaaaaactacaagtacgtaatcaaaactttaaaaaaaattaaggttgtaagtctgacttacaacctaatcaatcatttagggttattagtgtaatttgacggggagaaaaaaaaagattttgtttggggacctaccaacaagaataaaagattcgagtaattcgcattgcaaaatccggaatatttaagagagaacccatacgaaaactgcaataaacccactctccccctcgatctttgcgtttaatatctatatcctcctccgatcttcgtccccctccttcgccgtttcgttttccggtaatactccaaaaaaagtataaataaaactcccgatcgttcgtgctttctcttctccttcattgatttcaatagatatctatcttccttgcttactattttttctcgtttatggtttttttttcttttcatgtatgtttgtgatagaagtcgaatttaaaaaccaggaaactccaagccgtgattttttttcccaggtttgattggttcttctgcattgcttttcttaaaaattctccatttaatgttcatggctactgtttaattatctgtgaatatgcttgagagattagttacgtcgccgttttgatttatctgtggatgttcaatagcgtcactaacttctttcttttcttcggtatttgttgctttatttgcttacttgttctaaaactttttttaaattggaatttggggttttactgtttacattattcagtttgctctgtcttagttcaacaaatgaaggaaagttgttattttagttttctgtaacagca

SEQ ID NO: 12106 - DNA, 774 bp, Unknown
  misc_feature (1)..( 774): cDNA_ID_2994444_gDNA_ID_2214531_Annot_ID_184951 3000 nt of promoter + ATG
acaaaaaccaaagcaggatcaggagaaatgggttttaattgatggcaaaatgattaatcaatcttacagattatagatacgagtttagaagtacttactgatcggcagttgtatttctcagctgagaagaatcaaacttcggtagagaagagaggagaagagaagcgaagggtcatgcaagagaaaaaaaacaagctttcttcagtttctggtggtgtgtgtgactgttgaacataatgggcctttaattgggccgagagctaaattatactaaacgacgccgcgtggctcgctgtttactttcgtctgtgatctttgaaacacacgcatcgtcgtcacttagctccggagctctctatctttggtcatcctcctatcggaatcggcagcgcaggtattgttttttaggttttgaactttgtgttatctgttatcaatcctcgtttgatctgaaagttctcatttttgttaaattaaattcacctagaatcgttaatcgtaatttcgtaggttttgtttagtgaaattagtcatgggtttgctgaaaagtttgctctttttgggagttttatcgcttttgtttccgccatgaaactcaattcaatccacatgctcctgattgtttcatcattgaattagtagccaatgtagatgccgtgaatgagttctcatcgattctcaattttgttgctcctactgaatccttttgtcgattgatgtaagatgtgatctctggttttaacttgttatattcagggaagagggcagattatg

SEQ ID NO: 12107 - DNA, 3000 bp, Unknown
  misc_feature (1)..( 3000): cDNA_ID_2708329_gDNA_ID_2214531_Annot_ID_184945 3000 nt of promoter + ATG
atatatatattatcaaatcatcaaaaaccacaatttccacctggtcctccaaatgaaaaggcttctcctgtagatttggtataaccccaatatgtcgccctaaaacaattataggaatcgacataaagtcgtattttcctaccttcaatgtaaactcttttatagtccgagtttataacaacgacgttattaaaatgtgccgtctttttaaagtccgcaactggaaaaaacccattgcccattggaggactgattccatcgggagattcaaaagtatttcctccatatcttactagagaagctccattattcaaatgtgaaaataactctttaggccaataaccaatgacttcatcaaacattttaagtgcccaatttccgctgaagccatcctaatacatataaaacaaaagaaaaaatgaaaactaaatactccaacaagtatggtgtaatatgataagttcatctaaagtctaaactaattatataaatctttttcttaaaaaggataaacagaaatttacctgaaaaacttgcaatttaaacgtaagacttgttttaccatagacagatgttccccaaaatccgcttccaattcttgaatttcgacttacaaccacaaagccagggcattgtgtattatagcacccagttttctgataaccatctccctacatataataatatttgttacacatgtaaaataatgaaagacgttttgatctcttattttatttttttactctaagctgattaataatgttcttaaaagaataagagtagctaaaaattactcacagtccaatatattgtaaatcgtgtgacactatcaccgtacaatcttggatgtacctaaacagaaataaatataaaaaagattatgtatgttaaaaaaaaaacagattatggaacgcaaaatctttagcaagtttgatagaactgacttactgccaaaccagcttgtatactattgagttgacctggaggtccattctctaaccatatttgacttttactgtattggttattttgcagtttcaaatcatgaatacttatatcagcttctgctccccgatatatacttccatctaaaatggtctcaattgttgcaaactgcaaatttcatcaatatgttagtttaattttcatctataatatatattttgcatgaataacaatcggatgttttgatgttctcctttaattttacgtaaaacgaatagattattagaatgtcttaacaactagatgaaattttgtaactcctttcaaaaaccaagattaggagaagacatacatgttgaccagaatactcggcggtattcaaatgaacgcccttggatacatttctttgtctcaaaattgcaacggttccttttggacaatgctcttttgtattatatttgttgcttctttcaatttttccatctaggctgaatgtttcctacattataccacaagtaacaaaggaagaataagattcgtcagttttgatgtctcccgaagtcctattttcatatttgattaaccacaactattttattcacattttataaatttataaactaacattaacatattcatccaaaagtttcttaggaatacccatccttgactataacaaaagttacttatcatacataaactttgaactctacttttataaaataaatagaatatgcgagatctaattctaatatgaaaaaatctagataatttctaggtcggattagatttcgaaactcaaatattttgcccaacgatatatgctacgttacctggatcttgtgatctttcaacaatggatgttggaaagctggttgtttgtatatttccacacaatcaaaatcctataaaattggttgaacacacaaattagagaaaaattctaaatataagaatggaaatctttagaggatagaacaaacaagcataagcaagggtctcacatcagtgtttccctgtgcaccttgtgtaaacagcagataaacacatagacttaaagctagacgtaatgccattgctaagttatttttagtttacctagtttatatcaatgatacttttcagtataaataaacgaattcgagtcaaagactatctaaactattcatattaattgtgtttttaatgttttaccaaaattaacatatgtatatattttttggtcaacgttcaagtgtatatatagggaaatatggatacatggcttttagtttcccatatgtaaacataacataccaaaaaagtttcaaagttattcaaaatactttcatacgtatctttcaataaagagattcctaaaataactttaaaatagtcaaaataaccaccaaagtttatgaaaatctaaaaatattattttttaatttaaatatctttgtcacattttctatttacttcttatgccaattattgtttaagataatgatttagattaaaatattaacgaaatatcattgcttaaagtgttaattttactgtttttcgagtatacatatattcaaaaataaaatcaaaacattaaaaagaaattgaatcaaaaaagggtaatctattcaaaagaaattgaatacaacataaatgaaaaccattgtcattctttttccctggatttcacaattattaaaattaaactttatattaataatatcttaagataatataataaataaaaagtttatgagatggcagttaccccgttgggaacagattttctgatcccgccaatgttatctccacgtgtcaaataaatattggtcgcagagatatgcttcatctaaaccagatatcctcctaaccgtacgataaaaatccaacggaccagaataaaccttatctctccagttttagatctcgtataaattcaaagaacccaaaaccaaacaaaaagcacaagcacttagcagagcaaatgaagaagacgaagcacactgagaattcaccggccagagatcaccaataagtgttgtagtttccggttacttcgaataaccttca

SEQ ID NO: 12108 - DNA, 3000 bp, Unknown
  misc_feature (1)..( 3000): cDNA_ID_3023903_gDNA_ID_2214531_Annot_ID_184943 3000 nt of promoter + ATG
gaaatccagggaaaaagaatgacaatggttttcatttatgttgtattcaatttcttttgaatagattacccttttttgattcaatttctttttaatgttttgattttatttttgaatatatgtatactcgaaaaacagtaaaattaacactttaagcaatgatatttcgttaatattttaatctaaatcattatcttaaacaataattggcataagaagtaaatagaaaatgtgacaaagatatttaaattaaaaaataatatttttagattttcataaactttggtggttattttgactattttaaagttattttaggaatctctttattgaaagatacgtatgaaagtattttgaataactttgaaacttttttggtatgttatgtttacatatgggaaactaaaagccatgtatccatatttccctatatatacacttgaacgttgaccaaaaaatatatacatatgttaattttggtaaaacattaaaaacacaattaatatgaatagtttagatagtctttgactcgaattcgtttatttatactgaaaagtatcattgatataaactaggtaaactaaaaataacttagcaatggcattacgtctagctttaagtctatgtgtttatctgctgtttacacaaggtgcacagggaaacactgatgtgagacccttgcttatgcttgtttgttctatcctctaaagatttccattcttatatttagaatttttctctaatttgtgtgttcaaccaattttataggattttgattgtgtggaaatatacaaacaaccagctttccaacatccattgttgaaagatcacaagatccaggtaacgtagcatatatcgttgggcaaaatatttgagtttcgaaatctaatccgacctagaaattatctagattttttcatattagaattagatctcgcatattctatttattttataaaagtagagttcaaagtttatgtatgataagtaacttttgttatagtcaaggatgggtattcctaagaaacttttggatgaatatgttaatgttagtttataaatttataaaatgtgaataaaatagttgtggttaatcaaatatgaaaataggacttcgggagacatcaaaactgacgaatcttattcttcctttgttacttgtggtataatgtaggaaacattcagcctagatggaaaaattgaaagaagcaacaaatataatacaaaagagcattgtccaaaaggaaccgttgcaattttgagacaaagaaatgtatccaagggcgttcatttgaataccgccgagtattctggtcaacatgtatgtcttctcctaatcttggtttttgaaaggagttacaaaatttcatctagttgttaagacattctaataatctattcgttttacgtaaaattaaaggagaacatcaaaacatccgattgttattcatgcaaaatatatattatagatgaaaattaaactaacatattgatgaaatttgcagtttgcaacaattgagaccattttagatggaagtatatatcggggagcagaagctgatataagtattcatgatttgaaactgcaaaataaccaatacagtaaaagtcaaatatggttagagaatggacctccaggtcaactcaatagtatacaagctggtttggcagtaagtcagttctatcaaacttgctaaagattttgcgttccataatctgttttttttttaacatacataatcttttttatatttatttctgtttaggtacatccaagattgtacggtgatagtgtcacacgatttacaatatattggactgtgagtaatttttagctactcttattcttttaagaacattattaatcagcttagagtaaaaaaataaaataagagatcaaaacgtctttcattattttacatgtgtaacaaatattattatatgtagggagatggttatcagaaaactgggtgctataatacacaatgccctggctttgtggttgtaagtcgaaattcaagaattggaagcggattttggggaacatctgtctatggtaaaacaagtcttacgtttaaattgcaagtttttcaggtaaatttctgtttatcctttttaagaaaaagatttatataattagtttagactttagatgaacttatcatattacaccatacttgttggagtatttagttttcattttttcttttgttttatatgtattaggatggcttcagcggaaattgggcacttaaaatgtttgatgaagtcattggttattggcctaaagagttattttcacatttgaataatggagcttctctagtaagatatggaggaaatacttttgaatctcccgatggaatcagtcctccaatgggcaatgggttttttccagttgcggactttaaaaagacggcacattttaataacgtcgttgttataaactcggactataaaagagtttacattgaaggtaggaaaatacgactttatgtcgattcctataattgttttagggcgacatattggggttataccaaatctacaggagaagccttttcatttggaggaccaggtggaaattgtggtttttgatgatttgataatatatatatatatatatatatatatatcaaccaaattgtatcaaatttcaaataagaataaaatcatctaatctattcatattttcttactgaaaagtatgtaaataataaaacatgatcatcactaaaaccaaaactttacaagagaaggtggaaacatcatcaacgttttggtctgagactctgagtgataccaatggtatcataccataccaaacgaattatcatctctcattcaaatgggcctcatatttagacatgataaggcccattaataacaaattacaagcccaatttgttttactctctttcgttttcttcaatcgtatccataaaccctagtctcgtcgtcttcgtcgatcatcgccgggaaaccacaccagtctcaatg

SEQ ID NO: 12109 - DNA, 3000 bp, Unknown
  misc_feature (1)..( 3000): cDNA_ID_1394178_gDNA_ID_2214531_Annot_ID_184938 3000 nt of promoter + ATG
tatccttcatcctctcgatctctctcagattcgctcttcctcacttaacatcaattcgtctttttgtcgcacgcttgctgacatttatccctgccagattctcttcctctcagccgagcactgaccgagttgtttggtccattgggtcgaagccagttgcggagaataataagacaaattcaggatcttgggttcagaagtatggcactaatgatatgtatgaaggagagtttcatagaggaaagtgttcaggaagtggagtttattactattctatgaaaggcaaatacgaaggagagtggattgatgggaaatatgatggttatggagtagaaacatggtctaaagggagtaggtatcgaggtcaatataggttaggtctaagacatggaattggagtttatacgttttatacaggagatgtgtatgctggtgaatggtctaatgggcagtgccatggttgtggtgtatatacctctgaggatggaagtagatatgacggagagttcaagtggggtgtcaaacatggccttggtagttaccatttcaggtcagcattgttcttttttactctgcatagtcatttgagtttctggaatatggttgtgctttgacctgtaatggtggtgcattagatccctgtatatgttgctcgtctaagtgtgtttgctatcttgagttccattgtttttgaagggtcgtgtagttgtctttctctttattgttgcccttgttcacttgggtgtgtgaatctggaggacctctgaaaggttttcaatttcgatttctgacatcagatggataactgggttttgtttcctgcttcttgtggttatcctcaccttataagctagtctagtgaacatcaaagtttaggcttttgtgttactctcagttagcattgatcttaagcaattgcatgaagcactggtggtccagtatgctttagcggtaccatggctttaaaactacatttaacttggagttatgctgctgttgcagaaatggtgatgcgtatgctggggagtattttgcagacaagatgcatggttttggagtgtatcactttgcgaacgggcataagtatgaaggagcttggcacgagggaagaaggcaagggcttggtatgtatactttcaggaatggtgatacacaagccggtcattgggaagacggtgtactcagttgtcctaccgagcagactatccgtcctggatcatcttttaccataagccattccaaagttgttgatgctgttgaggtaaaagttaactagtagtttatctttagtactgcaaacaccatatatgtattaaactaagcttgttctctctttctccttcagcaagcaaggaaagcagctgagaaagcacatgaagttgtgaaagtggaagagaggatcaagagagcggtgatggctgcaaatagagcagcgaatgcagctagagtagcagccgtgaaggctgtccaatcccagacctttcacaggaatgatggcgatcttgaaaccaattgttgagcataggttagaagagatcttccttaacaggttttcttgttcctttatgagcaaagctagtttgaaactgtagataataaactagagatgatctttgtatatcaacaagaaaaaaattgggtctgcttcatagaatgcaactgacatacatgtagccaaaaatccctatcttgattaaacaattagaagaatctggtatatcagtcttataacaaaagatgaatctggtcttgaaaagttgtgtatgagtagaagaagtctagctctcagtttgttctctgagccttctgatggtactcctaacagttacagcactagcagtattcatcgtgtaggcacctccagccttaactttcccacagtccttacatccccaaattccaacagccttccgtttaacagcatacttgccacagaactagcagaagtatttgctgtgctgactcacttccatcttcttgatttgcttcctaagactggcaccatatctggtcccttaacagacaacatttcaacagattcagaaacaatgtaaaatgggctgaaaatctgaaatcaaaagagggatcttatgattcacacagcagacaacatctcatgctatgaagcatttatttgaatgaactaaaagcaaggatttaggccgtttttatttgggccaagctagatgacattatacacttcccttaattagttgaattcggtttttcttaagtacactttttttttttctttgtcctaatttttcttattttcaaatttagtttggatttcgatttttgcatttaccggtttgtataataaataaacgattctaatttaatgaaggactgaaagttttgtttcgttttcgaattaattattatgatgtgctctttattttaatttcatttaaagtcaattatcaaaattaagctaatgtaaagagtgtggatcgtcagatctggagaggtgaccaatcgtacgtcccaggttatatgagttccaacactgacaaacgatgtcgtggcgggtcccactggttttcggtaacgcagtttttcaaaatctctcattttcgtcccttcgagccaaatcaatggcaaaaaattagcttttagaattccccaagaacaaaaacaaaaaatgtccgagagaaattagggaaaaacaaaacaaataaaatctgggtgtaggggagagagagctcgtgctcgtgattttgatatctatctcttcgttatcgattttgaacatccacattgttcttagatctgaagaaaaaaaacacgggttctgttattacgatttgctcggcgattttgacaccaggctttcaattcttttcgttggaggtgattcgatttcagatccatcggatctaatctcggcgagtcgattcgtggtcgacatttttcaaaaactgctcgcgtggatctgaagaagagacattgttgtcttttgtatatcggcactgaatttttctgggaatctgtgtaaag

SEQ ID NO: 12110 - DNA, 3000 bp, Unknown
  misc_feature (1)..( 3000): cDNA_ID_2708303_gDNA_ID_2214531_Annot_ID_184936 3000 nt of promoter + ATG
agtaaagggaaaaatctttatagtggtactcagattattggaactgtgcctggtgttgaggttggcgatgaatttcaatatagaatggagctgaaccttcttggtatacatagaccaagtcaaagtggtatcgactatatgaaagatgacggtggggaactagttgccacgagtattgtatcctcgggaggttataatgacgtgcttgataactctgatgtcttgatctacacgggtcaaggcggaaatgtggggaaaaagaaaaataatgaaccacccaaagaccagcagcttgtaacgggaaaccttgcgttgaaaaacagtataaacaaaaagaaccctgtgcgggtcataagaggcatcaaaaatacgacattacaatcatcagttgttgcaaagaattatgtttacgatggattgtatctggtggaagagtactgggaagaaaccgggtctcacggtaaactcgtcttcaagttcaaactacggcgtattcctggacaacccgagcttccctggaaagaggttgcgaaatcgaaaaaatctgagttccgggatggtctttgcaatgttgatatcacagaagggaaagagacattacccatatgcgctgtgaacaatttagacgatgagaaaccgccaccgtttatctacacggctaaaatgatatatccggattggtgccggccaattcctccaaagagctgcggttgcacaaacggctgctccaagtcaaaaaactgtgcctgcattgtgaaaaacggtggaaagataccttattacgatggagccattgttgaaattaagcccctggtctatgagtgtggcccacactgcaaatgcccaccttcttgcaacatgagagtctcacagcacgggatcaagatcaagctggagatcttcaaaacggagtcaagaggttggggagtgagatcgctggaatctattcctatcgggagcttcatctgtgagtacgcaggagagcttctagaggataaacaagctgaaagccttaccgggaaagatgagtatctttttgatctcggggacgaggatgatccgttcaccataaacgcagcacagaaagggaacatagggaggtttataaaccatagctgctcgccgaatctgtacgcacaggacgtattgtacgaccatgaggaaataagaatacctcacattatgttctttgcactggacaatatacctccacttcaggaactctcgtacgactacaattataagatcgatcaggtatacgactctaatggtaatatcaagaagaaattttgctattgtggttccgctgagtgtagtggtaggctctactaataagctgttgttagcacttgtattcttcttcattttcccccttgatgttcagttctgtctgaataagcaaattagaagacagctttagccaaattttcaacacattgtatgacataattggtgtcaattagtgttgtcatgttttagctgcattgtttcattattatgttattcactgaacctcaccataatccaagtatttcatagttattttcatacactttgttgcgttattgcaactatgggttcttttgtgtgtgtgtgtttttcttgcatctacaagatttgttacttatgatgacacctgaaaccccagaagccaagtaaattacatgagttcactatctgtctgaaccgaattcaaacttgatcatactgatgttgtcttagtgattactaagcaccaaagaagtagctagcttctttgtttgtttgtccaaatctcagtcgctgatttggtttgatttgaaattgggaaaaggaagatattactgttactattacttaatttatagctatgggatccactatgtcacttttcattattctttattgttgattccaaaactatttatttcacattgttttttagcttttaaagtacataaaggttttgaagatccataaagattactcttgaattaggatagagataacaattgtgtacatagataggatcatgatgtgtatatatagtatgggtggccatgaaatttttggataacaaatgttaaaaaagctataacttatccctccattgagatattcttggtgattagactgctttggccttatggtagtctctaattttccatgaccatctatcgtttatatcagccatatctcaggatttttgactagctgtttaatttcatgtacaaatgtctttttactagttttaggttagattacaagagtttttttttttttttttttactattgttaaattaattatgggtttttgtaaatagattaagaaaattagtgattggatattgcttttatgaccttaaacttgtctttatctgaaagtagtcttgtccaatctcaaaccacttcttaaaaatattgatgtgtgttttgttttttgatgaaaggctttacaaaattctaaccgggttcactggattttatgttttggaggttagctcgcaattgtaattataactcactaaaataaacatacaaacaattattggttggtaattaacaaccaaaccaccaaataaattaaatagagaaaaataaatacaccatataataaaacaccattactttaaaatcacctgaagtttttgcaattagagatacacacaattttggaatcttagagaataagctctcttaataatttgtttaatcattaagtaaaaattgtcatcaaggactgggtcaacaagtggcaaatggatggcattttagtaaataactgaaactaagaggtgtttattgtgttctcacgtggatctcttaccttagtttcaaaagttcaaaattgagctcttctcttcttcttccttcttcttcttcttcgcgaaaacttggaaactgttttaggaacaaaaaccagaggctttgatttggaaaaaaccctaattttcaacaaccctaaatcccctaccatttctccccaaatcctctttccaagttccatactctttatgtaa

SEQ ID NO: 12111 - DNA, 3000 bp, Unknown
  misc_feature (1)..( 3000): cDNA_ID_3023916_gDNA_ID_2214531_Annot_ID_184934 3000 nt of promoter + ATG
ctggtgaaggcattacaacccctttgtctgtaattatccaaacctctgatttctcaagttccaaaacctctggtgatggacccaaatggtctccagaatctgacttctccagaaccaagttttcctcttccaccgatatagaacgtttagcggtctttccattctttgaaaacttgctccccatatttggagataagtctctcccaacagagatcgttcttccgtgaagctcctttgttccagtgatgcttttcctgcaaacagaccccatcatatcttcctctggcaggcttatgcttggaggatggacctccaccatattttgctcacttgtgttctctggcatattcctatctttcataggttcttgcatgttaactccaagagattcagctccttcggttaacccaaccgacatgtcattacaatcaaccgacttaaagctatctctttctgcaacaatttctccaggaatcaactcaacatcagcttgagaagagagaacacaaacatcagaaacattcctggtctcgtaagtctcaactgtgaactccttctgcattcttctcgatctgagctgcctggtaatcgatccaaaatcaggtgaaaactcactttccgcagcaaccttaaaccgcttggacttcctccgccccataggatcggtgtaactaccatttattgctagttcatccttagaacaaggaataccaccgccatcaccaccgcgcaaggaactaagtattgatgactctgaatgtaccatgatgcccaacgcctactcaatgtaatacaagaatatgaactaaaaacaccatcctagtaagttacaacaaagcatattaattaaaaaacaccatcctagattcctagtagttacaagaacgcgtattgattagaaaagattgcaatcaattaaattgaatatctttggcaatgcatgttatgatgatctaagttcatcatcacaattaaccaacaaaagaagacatgcagatcttcaaaacccatgatacagttttgagtaacatgtgaacgaatcagtacgcattaatccatgaatcataagaaatccttatccacattttccagaaacagactccaaatctcgaaattatcaacttttaaaattgttaatcaatcgagagatggaagcgattgataagatcaatttcgagtctacaagtaacaaaaaataaaagaatgaagaatagagaagaagggtacaaagatttaccagaaatgaaggaaggagtagtgataatggcggagatgacgagtcgattggccggagcgggagatatgtgagtcgcctactcaaattgggttaatttggcattgtcctgcaaaacaaaactaaacaatcaattttaattaaattctgttttctcttttcaaggattcaatttttaataactcagtcaaataagtcactcacataattcttatgaacagagtcctagcatgcatctttggctctggctctataacttcttcaattcctattttatacaagttcatcaagattaatttatattgatgatgatttagggttttagtggatctcttttttttttttttttgttgatcaaagcttttttagtggatctatgaatgtttttttttggaaatataatctttgaaaatattataaatctagagatttggtagttttattaagtaatattttttggaaaagtaatatttgaaaatattctaaaaatcttctattcttttcttttagaagtttctaaataatgatctccagaataatataggaaaacaaaagtttaagtatatgtgattcaatgttgcatgatctagggttttaatgaatactatttttattaaaaaacaacttttgaaaatatcataaatctttagatttttctccggattaatttatgtttggttttctcgacattatttctaacattatttattttctatctttttaatcgttttgtttgttttacgttatcacccgttcggcttctatatcaaaaaagttcgatatactattttctattataatcgtttaaccttaaatgaagaacatattacgctaaaaataaatcataaaatctgaataaatcatagtgagttgatgcatttttcattctattttttcgtacttatattatattaatttagtaatttctcatttaactaacaaataaaatccttatttttgtccttttccataatttctgtaatcaaaatctaaaaagagataaaataataagataaaagcaaaaagaacttataaagtagtagaagaaaaacaatttaaaaagagatttgtattggttgacattataatgtgataaattaattcatgcgtcgacaaaacaaagaaaaaggaagataattctcgctctactgtattcacaaccaccatcaacagtaactccagattattatgcagctcctattgctcttctctctctggtcttcttcttcttcttcctcctccagttttctctgcaatcctcactttctctctctccccatctctctaaatgcagctacttctctttcatcactgctgattctccgtcttagctcccatttctccatgaagttctcgcagctactccgacgaattgtgctgtcggtgagtttttcgcgccttcgagaatcttcgctggattatctcaaagttgatttctttaggcttcttacatgatgttagattctgggttcgtttatgttttcttccttcttttgaggcgttgcgtatcatcttgttttccgattgtaatttgaaaatttcaaggtaattctataggttacttgacttgtagggttcataaacgaagtttgggatgatttttctcttataaagaatcaaagatgccatttttaagtttatatcatcagttcaagtgttgtaatttaggaagctgaagtctcttctatctcttgttttgcgttgtgacagaggtgaaaaaggtacggtggtgttatctttaataagtagcattgtaaaaggagatg

SEQ ID NO: 12112 - DNA, 3000 bp, Unknown; identical to SEQ ID NO: 12105
  misc_feature (1)..( 3000): cDNA_ID_2711483_gDNA_ID_2214531_Annot_ID_184933 3000 nt of promoter + ATG

SEQ ID NO: 12113 - DNA, 3000 bp, Unknown; identical to SEQ ID NO: 12104
  misc_feature (1)..( 3000): cDNA_ID_1807221_gDNA_ID_2214531_Annot_ID_184931 3000 nt of promoter + ATG

SEQ ID NO: 12114 - DNA, 3000 bp, Unknown; identical to SEQ ID NO: 12103
  misc_feature (1)..( 3000): cDNA_ID_3023924_gDNA_ID_2214531_Annot_ID_184930 3000 nt of promoter + ATG

SEQ ID NO: 12115 - DNA, 3000 bp, Unknown; identical to SEQ ID NO: 12102
  misc_feature (1)..( 3000): cDNA_ID_3023928_gDNA_ID_2214531_Annot_ID_184929 3000 nt of promoter + ATG

SEQ ID NO: 12116 - DNA, 3000 bp, Unknown; identical to SEQ ID NO: 12111
  misc_feature (1)..( 3000): cDNA_ID_3023916_gDNA_ID_2214531_Annot_ID_134283 3000 nt of promoter + ATG

SEQ ID NO: 12117 - DNA, 3000 bp, Unknown; identical to SEQ ID NO: 12110
  misc_feature (1)..( 3000): cDNA_ID_2708303_gDNA_ID_2214531_Annot_ID_134285 3000 nt of promoter + ATG

SEQ ID NO: 12118 - DNA, 3000 bp, Unknown; identical to SEQ ID NO: 12108
  misc_feature (1)..( 3000): cDNA_ID_3023903_gDNA_ID_2214531_Annot_ID_134290 3000 nt of promoter + ATG

SEQ ID NO: 12119 - DNA, 3000 bp, Unknown; identical to SEQ ID NO: 12107
  misc_feature (1)..( 3000): cDNA_ID_2708329_gDNA_ID_2214531_Annot_ID_134292 3000 nt of promoter + ATG

SEQ ID NO: 12120 - DNA, 849 bp, Unknown
  misc_feature (1)..( 849): cDNA_ID_2994444_gDNA_ID_2214531_Annot_ID_134298 3000 nt of promoter + ATG
acaaaaaccaaagcaggatcaggagaaatgggttttaattgatggcaaaatgattaatcaatcttacagattatagatacgagtttagaagtacttactgatcggcagttgtatttctcagctgagaagaatcaaacttcggtagagaagagaggagaagagaagcgaagggtcatgcaagagaaaaaaaacaagctttcttcagtttctggtggtgtgtgtgactgttgaacataatgggcctttaattgggccgagagctaaattatactaaacgacgccgcgtggctcgctgtttactttcgtctgtgatctttgaaacacacgcatcgtcgtcacttagctccggagctctctatctttggtcatcctcctatcggaatcggcagcgcaggtattgttttttaggttttgaactttgtgttatctgttatcaatcctcgtttgatctgaaagttctcatttttgttaaattaaattcacctagaatcgttaatcgtaatttcgtaggttttgtttagtgaaattagtcatgggtttgctgaaaagtttgctctttttgggagttttatcgcttttgtttccgccatgaaactcaattcaatccacatgctcctgattgtttcatcattgaattagtagccaatgtagatgccgtgaatgagttctcatcgattctcaattttgttgctcctactgaatccttttgtcgattgatgtaagatgtgatctctggttttaacttgttatattcagggaagagggcagattatgaataatgatacatcaaaaaagctgggaactttggtttctgatgatggaccagtgaatgtatatgtatgggacatg

SEQ ID NO: 12121 - DNA, 3000 bp, Unknown
  misc_feature (1)..( 3000): cDNA_ID_2708387_gDNA_ID_2214532_Annot_ID_134300 3000 nt of promoter + ATG
gcgaggtagctgagatagaagtttttccaaccatttcaggtttgcttgcagttctgtttttggaagaactagaagagtaagattgaccaaagtcaatttcagaccgcactgactttgtcttttctctaacgccggttctatccacctcatccctgaacacagtaccaatgctttcttcactatcatcactagatgcagaagagatccttgcattgttccgggcatcggtcaagcaactgatagaaagttagaaaaagagtaaattccagctccatgaaacctctaaaactatttgcctgatgtaagaatttatgttaggatatgcaagcaatcatgccagttctagatatttgaaaggagaaccaagattcttttacttttcaaaagctcagctaaaagagatattatctagcaaagtaacattagcagtttcacctgctaggagtttgctctgaagtatctaatgatcttcccatttcttcacagggctcattctttttctcattcaagtgaaacactacttcagagttacaggaaggggaagatcgtaaatgttcaccacctttaggagtttccagttttttggatgtgttcctaacttcaattggtgtcgctggtatttcgcaggaaactttaagaaactgtgcctgtaattccataagtaaagcaaagtgagattaggttctcattgaagaaagtggtaatctaattctgttgttatatgcaaacaaatatatctgccaagctctagcaggattttcaacttgagaagagtaacgcacacaaatttcagataatttcccaagtaaagataaaagacgcagacactaatgcaagttaagcatatttccttccacacacttgcacaataatgcatggatacataagctacattcatcccaaaaaaacatctgtgtgtataatgtatatattttctttacaaagaattaagttctaaaaccaacacctcaaataactgagcacaccaaaacagagaaaaggaaaatcaaatataaggacaaagccaaaggctgtggtatatacaatgcaaatgatgcattcctaatggagaaaaaaaaagcactagtagagtctagaccacctcttcaataacataagacataaaaaaaaacttcttctcattacgggagaagagcttcagctcaagtatcacatatcaagcaaaagaagaacatgtctcaagcaaacataattattgtctcccaagtataaatgaatgacagatgcttaactctagaattccagtcaaatcgaaaatgctaattaatttcaatggagccaaaatcttaagcgtgagttgttaagtataatttcgatatgaacatacgtcatccttgagatctttatcaatatgcatagaattcaaactagatccctctctgtcatcatggcaaggcgacgaagctgcgtcaaaaaaacaataaacaagtaagaccaccgtttaaaactattaagtgatataacatcaaagaagagatttatcaccttcagatagaaacaaagctgacaaacgattcttcgactcatgacctctctgaaaatcatcaaaccaaagatgttaacactgaaacagctgaattgaacactgaattgcaaatcaaagatctggaaaaacagaaggaaacgattagaattacgttatgtttggcttgagaaacggaatcagtagtagattcgtcgtctttagcacggaagcaaccgaagagacaacccatggctctctactcaacaagccgatccgtcggtaaaatccgagcgtctcgaatttatggctcagtcactcaattatgaagcgtttctgtaatgtcgtgatttgaattatattggtggtaaaaaaggaacagcgatggaggaacctacaacaaccaaacactctcaatgaggagggaaaaatagtttcccgagaaagtgagagagaaagagaatgttggtggtggtggtgggtctgagtctctgtgagtcttttgttttcaaatttgaaaatccccaaatagcttttgcgagagatgtgtgtgtgtgtgtgtgagcttcgattttgaaatggcatcaaatttcgaatttgttattaaaagattcataatttcgtacgtttttacactcgcgggcgcgtgtgatcctacgtggcccaatcctcttcattccttctaataatattttttagctaattacagtatctgtgactgttaatgtgagtagtttctattgaatcttagtgttagattaggacgaattgatgtctaaatgttgatgtttagtgttgaattttcttagattgggtttggtgttagactattctagtattcttgaacattcttatattgaatttagattgtttgttgcacttaaaatgtttgtgaattttttttgaaccgaacttaattgagcatttttttcatttgctaaagagaattgatgtgaagatgttttgtgagcacaatggagtttactgctattaacctatactaagtatcaatagcttttatttgtttgtgaaaaaaaacaatagcttttatttgtcctaggaattatttaatagattaaataacagctatttttctcttatttcttagtgattaaaatatttaaaatacagaccaaaattaattgtttatgttaatatatttactccttaatcctttatattaaaattgtataatgcatgtagttaataaattgttttccaaaattcattcataattttattcctaaattattttggtcaagaaaacacatctttgaataattaaatgcttccttgtatttgataatttcttgatattttaaaataccttctatactatgccaatgttattggttataaataggtttaacattgatcctgaaatatatcataagaaaatcaaaagtgaaataagagatcaaaatgatgaagctcatagttgtctttgttatatccagtttgttgtttgctactcaattttctaatgtaaaaattattattattttcttcatattatg

SEQ ID NO: 12122 - DNA, 3000 bp, Unknown
  misc_feature (1)..( 3000): cDNA_ID_2711538_gDNA_ID_2214532_Annot_ID_134304 3000 nt of promoter + ATG
tttcaagtggttaggattcagccctaaagcttctgataaaagctcaaagattagttcccctagtttcatcactcgtttcgcatattccaacatgatttccctaaaacattcacacaactagataagtcttctttctttctttctttcttctatagactaagaaataaaggaaatttgtatttcgtacccacaaatatctggtaagtcctctgtttctggaacatcaggagccataaagcaactcaaggtatctctccagttcgctgaaggagagctataaagatcaaaattactgttatacttaactgttttggtgacgtcacgagtataaaactttttcctaacgtctgagtcttgctcatgaaacccacgaatcccatctttcatcttctccataacatcattactaatcccatggttaatcacctggaaaaacccgaatctctcaaccgcgtctctgatcatcgcgatgacgctctctcgcgtgactgtgtactcgtcgaacacgcctcctttaagatcgattgttggtataaccatcgttgtagaggaaagaagtagatttgagtcggttaaattaagatgtggatgatggaagatacgtgggatctgagtaactccggcgtctaggagaccttttacgccgatcttcaactcgtcaaaagcttttacctcactagcacgatcgtatgttgcttccatcttcttcttcctttgtgtcaagaaacagaacaaagagaaaacgttttctaagacaataggtatctgcctactactgttgaaatttggtacctctgtgtatattataatagaaaatgaggtaatcgaataaaagtcaatggaattaaatttttctgattagccaatagatgagaaaaggcaaaaagattcttcgctcaagtctatatggctctgttcactgtcggaaaatgagtgaatttgaaacggcagctgtttcttttcatccaagtagctgccgggaaaagaaaagaaaaaagctcaggtaacttgtgggtcttgcttgagactcacggagttttcacctatctttcaatagttgactttttcactaaataacaaaactgttttaaaatagtaactaagtggagatgcggggtatcgatccccgtacctctcgcatgctaagcgagcgctctaccatttgagctacatccccacgatgactatttattaaaatattacaatatttaatactttcaacgtgtaactgatgcaaaatacgagcggtgtgtgttgaaaagggactaatgattgagagaattggagataatgactaacgatattaatagagaaatcagaaactaaagtcggatactatctaatcagtaaagtagagatgtgtgtgattgactaaattttagaatagttatgttggaaagagaataaagaaaagttaggaggatctagggtaaaattttcagtttgtattaagtaaaataagtttttactcttactatctcaattggagggatttttttttctttctttcagctgattagtgtagtatacatcaagctaaaacaaaagtaatttgtttttcaatccactattgttacgtcaatagacattaatagttacactctacatgtcatgaatttttgtcatttcatgtatagcttccatttatatattaaaaaaaaaaaacatattagaagaagtaaatacctaatagataatctttactttgtttattatttatgattggtgtattcagcttataaaataattaatatgcatcatatttgtttttacaaaaagtacattgaatatcatatgatttttagttttttttttttttttcatttaccctcgatcttacaacaaataataagtccagtcatacgcacctaccaaaagaaccaattgaggcatgtggttcagtggttagctaaacggatgggctcattctctcacgttttattttggctccacctacccacttcaaaccactaaccatctttgtttcattctctacgtctttccttcatttgattttccttttctcataaaaaaaacaaagcatcatcaatcaattttatttttattatgggatccctttttattatattcaacgaaacctagttctttttcttaaacgtcaaaaacaatgagttcttttactaattgactgtttgagtttagaatctagttttgaacccaaaaaatgatacttatataacttcatggaaaactttgattctaaatattgtatgtagaagtatcctcaatatacaaagtagatttgcattgttcgacttcaatgaaatgacatatacttctaattgagtgagatagaaatatctaaatgttttattttcatcggttgaccagatattacgacgttcttacaagagttttgaacccaaagatgggttagggtgggtgacatggatagatattgacctgtgggctctggccaatcaactccgacaagatagaaatatctaagttattattatttggtaacaaaattgtatattatccacacaagagtagcaaataatttgtgttctacaaaatggtgacaatattcattttcaaagtaacaactaacaagtgttcagttcacatttttaaaaatcaacattcaaaaaaataaaattcaacagattgagattttgatttcatacaacattaaaattcttaatatagaaaataaaaattatatgcaaagaggataagtaatattaatgttggaaaatcagttttcaataccagtaatattttatgtaattagttttccgaaatagttatatctgataaattttgtcataatttttttgattgtatggatttgataataacacacgtttccaccaatcaacaacggaaacgcaacgccacgttccgccacgagtcgcgattctctctcactctctctcccatctttctctataaaacttgtgtcgtggacactcttaaaacttcactcaacaaagcttaaccataaactgtgagtaaaaaagagaagaaagaaaa

SEQ ID NO: 12123 - DNA, 3000 bp, Unknown
  misc_feature (1)..( 3000): cDNA_ID_1014113_gDNA_ID_2214532_Annot_ID_134305 3000 nt of promoter + ATG
cgacgttcttacaagagttttgaacccaaagatgggttagggtgggtgacatggatagatattgacctgtgggctctggccaatcaactccgacaagatagaaatatctaagttattattatttggtaacaaaattgtatattatccacacaagagtagcaaataatttgtgttctacaaaatggtgacaatattcattttcaaagtaacaactaacaagtgttcagttcacatttttaaaaatcaacattcaaaaaaataaaattcaacagattgagattttgatttcatacaacattaaaattcttaatatagaaaataaaaattatatgcaaagaggataagtaatattaatgttggaaaatcagttttcaataccagtaatattttatgtaattagttttccgaaatagttatatctgataaattttgtcataatttttttgattgtatggatttgataataacacacgtttccaccaatcaacaacggaaacgcaacgccacgttccgccacgagtcgcgattctctctcactctctctcccatctttctctataaaacttgtgtcgtggacactcttaaaacttcactcaacaaagcttaaccataaactgtgagtaaaaaagagaagaaagaaaaatggtgctaaaggtgtacggacctcactttgcttcaccaaagagagctttggtcacactgatcgagaagggcgttgccttcgagaccatccccgtcgatctcatgaaaggagaacacaagcagcctgcttatctcgctctacaggttccttccttcttcttcttcttccttcatcttctctgatttcttccttttttctccgattctgatggtttcttgattcttcttcctatgcagccttttggtactgttcctgctgttgttgacggtgactacaaaatcttcggtaagatctttaagaaaatttcagtatctgttttgattgtttctataataaggtcaatttcgtcacagaacaaccaagttctgttttaggtcaagttctatagttatgatttgtgttggctcatgtttgttttggttgtatgtatctatagtgatgctaagagatggtttttgatcttttgacagagtcccgtgcggtgatgaggtacgtagctgagaagtacaggtcacaaggacctgatcttttggggaaaaccgttgaagacagaggtcaagttgaacaatggcttgatgtggaagcgaccacttaccacccaccgctattgaacttaacgcttcacataatgttcgcatcagtcatgggattcccatctgatgagaagctgatcaaggagagtgaagagaagcttgcgggtgttcttgatgtctacgaggcacatctctcaaagagcaagtacttggccggtgacttcgtgagcttggctgatttggctcacctcccgttcactgattacttggttggtccgattgggaaagcttacatgatcaaagataggaaacacgtgagcgcgtggtgggatgatattagcagccgtcctgcgtggaaggagactgttgccaagtattcattcccagcttaagatgtgttcatcttcttggtgatgtggtttgtgttttatgagaggtttaataaaagtggaactaaatgtacctcttaatgtaatgttgccacctctgtgttctctttccttttgtagtttaataagtatctttatggctttgtgaggctttcaattttaaggaaatgatcttttcccctagttctactacttgaatgatttaactagcttaagaaaattaattatgaatgaaaggtcggattagcgcgcgagacgggagacctagtcgatggaatctatcttattgattgcatatcgactctcaataatggataggtactgaagtatgaaataattgatgataccttcaaactagtttgcggtttaggttggaacatggtctgataacaaaagaacttccacaactataaaatctaggttggcttcttttactcggccttttgattcataaccaaagattcttggttttgtgaccaagaccattcgaatattggaagaagtgactgatctagcaagaaacactctaccagtaaaacaaagtagagagaggtaccctaagaataaaatcttgattttcatgaagctttttgagagaagcctctcagcttatttatggataataaagtgcatcatcagacgatacactgatttttttttaacatctctaccaaatttgacaaaagtgaaagaaaaaaggtttattggtctttcggggccaatgatggatagtataaattaaagtatagacactataatgaaagttggtttcgataattagatcactaatttttgtttaaggcatctaataattgcgttgataaagtaatgttatctgtcagaacataaattacaaaaataagagggctcattcgatcacgttttataaatactttcttgtacccaccaacctaattttaatcggctaacttaggttttccattgcctgatcattttttttttataaccaaaacaaaacaaagtgtaatcaagtctcgtaactattttattaaaatgtgttgattcaaaaaagtgagaatcattttggcatcttattacaacaaagtggggaatatctttaatcaaatatacttacaacaagtggtctctctctttattaggcttattaaaaatgaataaataacattgttaaaaaacacacacatgtaattcataatttgatgggacgttggaaatttcgtgctgagaaaagtcaaatatgacgtgaaacgttgccgccactagctagccgccacctataccgacacgtataaataataatatactaataagtgcgactgcgtttagcctactaccgcaaacgcagctaaccagatccctttttctctctcttttctttccctctataaaatcgcgtcctgctatagtgagtttagaaagaaactgatagtagaaaaaaaaagagagaagaaaa

SEQ ID NO: 12124 - DNA, 3000 bp, Unknown
  misc_feature (1)..( 3000): cDNA_ID_2708371_gDNA_ID_2214532_Annot_ID_134306 3000 nt of promoter + ATG
taacttgattagaatgctgaatgctcaaacggccaaacctaatcctcaagacactcatacgtcagagacagcatgaaaataggtagtgttccttcgtcaattcctcggaaaatttgggacatttcttctcattcttgatacacatgtagctaaaatttaggttacgacttaatcactgcctatgactatgagcatgttacacttgaaaataacaaaagaagaaagaaactcgaaagttagtcaaatcattaccactacaaatcaattcaaatacctttgaaactctttttgtctcctagaaaacaatctctcaaagtaagaccaaattactaatagcttcttagcttggcgcttttagcatttctctaactccggtttactctcttcgacctcgtatccatggccagtctctgcggttgagatgttgctgttatgatcaacggattgatttctgttaaaggtagcttggctttggatataagaccatttatcttgaaaaagatagaccaaggcaatacaagagagttgtgcagtgaagagtatggtccaaagattagcactttttgatgtctttttggcgtaagcgtgtaaacctgtgtatatgtttattatcccaagaatagcaattgatgttcctaatatccaatgtcctacaaaccacttccttctagctttttcttctctgcaatgcgagtaaatcaattaaagattgaatataaagtactagacgcatttcgtagttctcgtcatcataacatttgattaagtctaactaatttgcattcaagatttttcttagaaatattcaagaacaaaataatgagtgttattaatcttaagctagcttaattttgtcacaaagaattatcggtgtaacagcttattttattgaagagaaaagaaacagaagtaccttggaggtcggaggaagccaagaagagcttggaaccatacaatgacgtaaagtccaattccaagctgttggtgatgattactgaaggaattgttgaagtttattactgacattactgcccctattgtcacaagtatcactgcaaccatctgcttcataaattaatcacattgttaattgctcacttaatattccaagtaaactatgagccgcttgttgatagataacaatagttaaaagtacttgctgctgtttaattatcaaatattgttttgtaacaaaattgactagctagtaggtgaggtttcttagttaagtatcagaatgagagaaagagaaagtcagaaagtcgttaaagctaaaaataaagaggaagaagatagatgctttagcttggccttcaagtttccatgattatcaatgtgattaacaatctagaataacctaaaaggccctactaattactaatggagtactaattaaaaatcacgaaaaagttgttaattggatgcaatctttattgtttagatgaagagagaagcatctttgctttactctccatccacctatcttctcgcaccgaccattaaatttcattttcaacttatacaatactttcaacatacttatgatttagtttgttgaattgtaatatatatttgatatatataatttaaataagagagccaagaaaaatgaaacatgcctgagaagtgacatgaagaaagaagagtcgtcgaagagtgattataggttggtctttgatagacattaatctgatggagattataccaattggcatcaaaacacccatcgctgcccaaagcataaagccatgcactttgatttcgtacacaagctttggatttagtttctgttcaagaaaaataaaaataagagcttcataccaatatatattcagagtttttgattaaagttattaacacgcaggcattttatacagagagtaggaaaaaaaaactataacctttaagcatcatggaataataatatgtacatgacttacatacattataatcatgcgatgataaataaactcaataggttataagatcagaaacaaaggaaatgcctggagcttcattgtaaagatttatcagctatatcaatgagattatgaagagtttgagattattagattttaattaggataagcgagagagaaagaagagcatacgaacctcggagataggagaagtttcgactggaccattgacatcaatggccaagcttctggtgttttcttgggaggagcataggggaaggaggaggaagaggagagagactaagagttgatgatgaatctccatgacttcatgtggtttgaagttgaaacaataaatacaaagtttagaattgatgataatcaattcatgagttcatttcataagtataactgttaaagtttgtgtgtatctagctctttgtaaagaattggatgacggtatatatggaacttgaatacttgatccactagtttcttagctatagatagaagaagagaaaagaaaagaaaagttttagaatttgcttttagagtgtaaagaaatgtgataaaaagaaaaaaaaaaaaagttaagctcgcaactttgttatataatatggttttgcatggaggttgatggtttattttactagtatctctgaatttaaatgaagaaaagcaagtggaggaatgggcaatcgatttgatataacgaacttcatttttgtcaatcttaattagatgttaataatgatgttttatatctaaaaaggactatatatatataatttgagtattgaatttaattaatgaatgtaagaaaaaacagaagaatattcaagtggatgtcactatctctgcgactctacagcacttttggttttctatgaaaaaaaaaagaagaaactgaaactgaaaattccttaaggtcagattcatccaaaagtagaattttaatggacttttatgttttgtggaagaatgtcagattttgcaagggaaagtgagtcatggcaggttgcactagctcatagaccactaacaatatgttactgtcaacaaacatcatgatttcactatg

SEQ ID NO: 12125 - DNA, 3000 bp, Unknown
  misc_feature (1)..( 3000): cDNA_ID_2708360_gDNA_ID_2214532_Annot_ID_134309 3000 nt of promoter + ATG
ccacaaacgttgacaacttgtgtgagtttttgcaatgatgagaggtgctgctcccaccggagtagtatcggtcatggttttaatgatacttgtgttgttaaaacaaatagagagtgctagtgcgaatggttcatcattagggctaccacctagaaagttttgtaatatttatcaaggaagttgggtctatgacaaatcttaccctctctatgattccaagaattgccctttcatcgagagacagtttaactgcaagtccaatggtcgccctgacagcgagtacctcaagtatcgatggcaaccttccggttgcaatctccccaggtgattccatcttttctttatggtatttataacgtttttcgatatgtagatctagtgcgttttaacttttaaggcatgtaactagtcataggtgaattgctatgagtaccactatacttcaggacgacttgggcatcaactagcattgtatcggaaaatttcattttcaaaaacgtctttagtatttcttgagggggattaataggtttttaattaggatttattattggattcaaatccccttttatgtcgcatataagttcatatgtaactatgtaagaatgttatagaatttagtaaccgaagcagctggtacataaatccataactatcatttattggaataaaactgttacaaagacaataagtcacaaaatgttacaaattaacggaagtacccaaccattttgtggtaaattattaaacgtgaatattttctcctatgaatgatatagaagtgttaaattgattaatgatgaatggtgcagattcaacggcttagattttctgggaaggataatgaaagggaagaaactgatgttcgtaggagattcactgagtctaaaccaatggcaatctctcacgtgtttgctccacaacgccgcaccaaaagccaattccacatccacacgttccccttctggcctctccgtcttctcattccccgtaacgttttctaactttatcaaactcgttccggtattgatccggtttaataattctggttcggttcgtatttaaatgcatgcaatgcaggcttacaattcttcgattatgttttcaagaaacgcgtttcttgtggatatagtcggagccccaccgaagcgagtgatgaagcttgactcaatctcgagtggttcgttgtggaaaaccgcagacgttttggtcttcaactcttggcattggtggcttcacacagaccgaaaacaaccgtaaaatcatctttatgtcgtcaaacatattttgctatggactatggacttattagtatctaactaatgtaatcatttggggttgcagatgggacgcaattatgtccgggaatgtaacggttaaagacatggaccggttagtggcatatgagaaagcaatgatgacttgggctaagtggattgatcaaaatattgatccttccaaaaccaaagtcttcttccaaggtatttctccggaccatggccggtaagttctacctctatataacttcttttttattcgatacatacattaaatcaacgataaaaacttaacacgattgatatatgttggattagtctataagttttcgttagaaccaaataatttcatgttgatattgttaacaataatggtacataatgttacagggcaagggaatggtcgaaacaaggtggcaaaggcagttgcataggagaaacaaagccgattatgggatcgagttacctggctgggccgcacgcagccgagatggtggtggcgaaagtgataaagacgatgaagaatcaggcgcggttaatggatgtgacattgatgtctcagctaaggaaagatggacatccttcagtatacggttttggcggtcacagaatggcggattgtagccattggtgtctctctggagtcccggatagctggaaccagctcttgtattctgagctgtttcattcttaaaattttgatggttttgacacaaaactaaattcattatatgatttatacatttatttatgacctaaccatgtttgtgttgttttacacatttattttatgtcataaacatgtttatttagaatttcaaattcatttgtcaaccaaaatgtttaaatgagaacaagattctttgactggtcgaacaatttataagagaagaatttgcaagaatataaccttatgatctcgttataattgaatggactaaatatgtgtcctgaatctctaagtgagagattagaggaagaccaaaactagaagtaaaccttattccacgagaggggataactagcgtagcttatataataactttgtacaatgatttggggttaagttatttttggattatgctaaatcaaaatctaatatagtggtgcaagccccttgacttgggtcaatgattcaaaagcttatacaaaaaaaaaaacgaaaaaactaatagtaaaacattactttagaaaaaagttactaatcaatatttttttaaaaatttcagattactttataagttactctatactcatagactcatagtgagatatagttctatttttacatggatgaattggatcgaatccatttatctacattaatgtatttaactaatgcagaacttaagccttttatcggaaaaaacaaaaacaaaactaatgcagattacagaactatagatttaaaaataaaaataattcgattttttccttattattatgctggtttgcccaaaaataaaggtccaagtaaaactgaaattgatctggtcataaaaattggggctttagtaaaaaaaaaaaaaaaaaaaaaaacatctgtctctttcacttcacgtttgcgactgtgtcgtcgtccacctccggatctcatcggcgtttcatcataattatctgtccatctattcaccgtacgactccgttttaggaatctgtggatgtcaatttgagagaaaagactgtcttcattacaacacatttgggacaacaaggatcactc

SEQ ID NO: 12126 - DNA, 3000 bp, Unknown
  misc_feature (1)..( 3000): cDNA_ID_2708354_gDNA_ID_2214532_Annot_ID_134311 3000 nt of promoter + ATG
acatgaaactccctctccttcaaattaaaagcctggtctaccatgcattatagctaagtaactatcaccagaattttaaagcgaaggagacgaaccaggtatcagcaatggcagagaatttggcaagttcatcttcattcaaagatgttgttgacgatgtgcttcggcttttattagaagctttgccttcaagcgtttgtattttcggatgcgaagaagaaaaagatgcagccgaagcatcagtgtctgaagtcgagaatagccgctggtgaagtaaacgcgacggaggtattattggtgaagaagataatcgacgagcagagagaagaagtctttgcagctgattcacccgtaccgacgccaacattttcgaaagagaaagcgatcacgagtttcggaaactgcggtcggaagttactgacgtcggattcgtcgtcggcgaaattgaagaagacaagtgagtgagggcaaaagtggaatgacgaattctcgaaggatgtaattttaacgggctacatattaaactatatgggcctataaactatagtaaggcatattaaaaatttagattgatgataatcagtaaaacaattagagaaaaagaaatttagattttagggttaaagttatacgctaattttcacgattgagaatttagagttgagggtttctattttaggttttagtgtatttctttttattaatttctaaaatctattttcctactttcggtataaaattttggggctattacgagaatgagtattttctaacccaaaaactaaaaattggacatttttacaatggacttatggggaaaggtactttggtgagttgggttgacgaaattacccctgccctacaatttcactcaatcaaaagccatcttcttgagtcatcttctccgacaactcacggcatctaaatgttggttctgataaactcaaaaaatcaattaaaagttttttaatggaataatattaaaccctaaggagataatttatagggaacccaaagatttcaattaaaaaaataatcaaatcaattgaggaaattagctcttaaaattttcgtttgaatcaattgagcagattagctctcaatcagaattcgtttgaatcccaaaattcgttcgattcgagaaacccagaattcgtttgataatctcgtcattatcaatctctcaaatttaagaaataagcttagatttacctaattcatttgaatcaagctcgaaacccagaattcgtttcaaattcgcgatcttatctcaccacattctcttgcttctcagcctcaccaacccttctctttacagtttgatcggacttttatagagaaaatgatgaaaattattaatgagattaggttgtcaacgtctctgcaacaatgaaatcggaaaagaaaaaagattttgcaataaaattttagaaaactgtgaaaggtgtgaagggtgaaaacgtcaaacgacgaaaatataaatacctaaatctataagccatatgagatgtacctattttcacaaaaacatagacttaattgtaccaatcccataattgatccataaaattttagtatattttataatttttccataaaatgagttcattaataggatcgcacaaagttcaaaagagtagttggatttggatatgttggtatcagtttgtttcactttcagcttgtagtatttttctaacaaaggtcccacgatcaaatgagaaatctcattcttgtatataatcattataatttaaaagatccaggtaggctttcattatagtgtgtatataaatatatcacatcggcacatacaaaaactaatatattctggatacacaaaatattagagagcaaagacattggtaataaatcttatttgaaaatttgatatggcgtgtccacaaaatctttcttcttactagagattagcgatccacaacaattagttcaaagattagcgatcccctaattcattttgattgtgtttggaagcgtggagagaaaaattgtattcgaagcattaaattattttcttgccaatagattatgagttaccacttattaccaattgattttgagttgaaattccttataaaatttgatttaagctttagatgagatgtgtgtttgtgtctacggtgcactcgaaatcagaatatattcatttctaccatcgttcatgatagctcgggcattcgaactcttaatgccctaaaaatttattttcttcatctatttattatgttggatttagtgtgttcgatgtgttttgaatgagcgatacacatgtgtaccatcatttacggaaacttgaacgtttggagtgattgattaggtaagaatcctagaacaaaatgactactacaagtaacttttttgcaaaaaccttattttatgtatttcatcttaatactaataacaacttgacttttgttctaccttttcaatttcttattcactacaattttattacaccacactaatcacaagattcacaactaatggtgtatgaaccgttgtttgtgcttcaaactttgcagcgaatattcaaactttttatctatagaaaaagaagagtgtgggggcattaaaaggagctgtctcatagttggtaatgtcaattaagaagctggcaatacaatacatgtaggacaattcaatcatcgacccatttgaatagataatgcaacccaattatttcaccttattacaaagaaaaaaatacaccccaaaatatctcatcaataagcatattatactcatgatgacttttgttaattataaaaactaatgatgctaataaccaaaatcaagagttgataaaggaagtcacgtttggagattctgtctatagtgtttcgctggaggcgttgaaacagccctctttaacagctcacttcgtttcacattcctaaattcctctcaatcttcttcttacttaacttattatataagtctctgtttctctctgacaaaaatattccaccacaaaaaaaa

SEQ ID NO: 12127 - DNA, 3000 bp, Unknown
  misc_feature (1)..( 3000): cDNA_ID_3023988_gDNA_ID_2214532_Annot_ID_134313 3000 nt of promoter + ATG
gattctttggggatttgaacttaggttgtgtgttaagtatgctcagaagaaacatttgaaatcactttcttgataagcctcttgcgttgttatgcactgcttaattatgttaaatccttcttattccacaggcatctttcatgaaaccaggtcataatcatcacgccatggaatcgtgaaacccacatggttatctgagacttgcgccaacaaactcctatgttctgctttgcttgcacctccttctttgccacgattcctgatcatgtaaactgttcatagatcatttattcctatggttattttggaatggacatcctttgttcgattctatttcctccacttcaaatttttgacacagggccaaaccatattacttgcatcttttgatgtttagagtccataacctcaaagtttccaggtgttttctcggtactgttagtaagagaccatgtccatcagtgtttctaatgggtttctaatctaaaatcctaaagaataaaagtccaaaaataaaggaaaacccaataaaattgttaggatcgttcctattttaggatttttaggattttctgaagtgtttagaaacagtgacgtggctagaaatgataggatgaaaatttagacaaaaaaaacaaaaaagaaaaaagcgtgtttctctttcctcttgtcctttctcttttcttttggttctccgacgaaaattaggtgattccaatcgatccctttcgattacaaacttcggcgtatcgaccatgaaatcgggagacaagagccacatgtactcaattttcaaccgctatgtactcaattttcaaccgccgggatgatgatcgacgacgaggttgttcactaaattgattcttcgaaccaaatcgaaaggagtggcaaaaagcttcagaaaagagtagggtggaggctgcttggattaaagagaagtatccagatagaattccggtgagtgtctctcttgtcattgatcgatcatacaataacttgcttaactttcacaacaattatagccttttctctacgcattgtttggaattgtggtgttctctacgcattgttttaaacttctgttgtttaagaaattatagaatatctgcataaagtatgttaaggtttatacgtttattcacatgaacatgaccatgcttctgctatcgaagaagaattgcaattctcatggaaaagcctctgttttttatagtgcttagtaagtatagagactagtaactagaatattattagattggtttatgcatttcttttatggcttttgatgaacaattggtccatatgccattattttcggttatatggtccttatgtgacacattactgttaagtgtttctttctcatctaaacgttgaagagtagtttgattgttgtattgaccgttaagcatttgtactcttactgaaatcttgagagctgtcattttcaggtgtatgtagaattgcagactacattctttaagttcttgagcttggaacaatacttttctcactctacttgtttctgcaattaaatggtaataacaatttctaatgtcagttaaaaatctttcaagttgatttttgtttagctttttctattgaggttcaaacttgtaagcacgcgattgaaaccaactgtagaatgacagatcttgtttgttattctgtctttatgttactttgtgtcatcttctatatacttttacataccttacagggccgcttagtgatcttgaaatggctttaaagaacaaacttatcactgacatgttgtcaaatgcttgaatggtgccttttatgtcttgaaagttagtctttttgtgtcggttaatgcttcttcacttgtttttgttctgttcggttatgaatcttattatcttaagttgtttgtgttctgttctaaattggtttcattgtgctctgttctaattggtttgtgttcgtgttcaaacttcaatagattggtttgtgttctgttctaaatgaatttcaacttcgttttaaggatgatgtccctgtcgagatgcaagagttcaaggaagcataaatagcaagcacatgcaagtgttgttctgttctgtgtataagtgtataggctatggtcgtgtgaagatgcacttgagtttgtgtgtcgaattttgtgagtgtatcaagttttgagagcgtagagtctgtgtcaagttttgagagtcaaatgtatcccaaacactttcacatttttttcaaaatttttttttagttttattagaaactcacttaaggatttttttaatggaccaaaaatttttcaaaaactctacaaaatctctaaactacaaaaatatcaaaattaattaataaaaaatacatagaaaccttacttagaaactaaccaatgtggttgctctgagagtactacaaaaataaaataaaatgtgtaatatacaaattgcaagagaatacataacataacagagaaattcatatgtacagtaattgaaaatcgtcgagtaaaccaattttggtttggataccaattcagtttttggttagattcgggtaattaaattaaaccactcaatgaaggacacgtaagttcttcacgaaccacatctgttcccttaaaaaaaaatctccaagtcccttgcactattctcctctctttctctccatcctccatatttgcagagctcgagattctccttccctatacaactctcatctgtaatcgatacaggtttgtcttctacctcttctctttggttagattcttttataatctccgtcgctgcataactctgactgggttttcttcggcaaattctgatttcgtcgctttgtgttagttttagttccttgatttctaattcactgaattaagaactcgaagtatgtttactgttcctttgatctgagggttaggttcttgtacttgtaagaaacttgcttgttctgtctcatcgttcatgggatttgatatatcatctaattaatttttcttctttgatgaattttcag

SEQ ID NO: 12128 - DNA, 3000 bp, Unknown
  misc_feature (1)..( 3000): cDNA_ID_2708350_gDNA_ID_2214532_Annot_ID_134315 3000 nt of promoter + ATG
taagaagttcgacaatgatgtttcacttgaaataatagcaatgagaacacctggatttagcggagcagatctcgctaacctcttgaatgaggctgctatattggccggaaggcgagcacggacatcgatatcatctaaagagattgatgactccattgatagaatcgttgctggcatggaaggaacagtgatgaccgatggcaagagcaaaagcttggtagcttaccatgaagttggtcatgcagtgtgtgggtaagtgagaaacatattaaaagcctgtctgtatattattactatcaaaaacttactttaaagttataaactttggttttttacagaacattgactccaggacatgatgctgtgcaaaaggtaacgttgataccaagaggccaagcaagaggtctgacttggttcattccatcagatgacccgacactcatctccaagcagcaactctttgcaagaattgttggtggactcggtggtagggccgctgaagaaatcatctttggtgattccgaggtgactactggcgcagttggtgacttacaacagatcaccggtttggctagacaggtacgcgacacgttcagcttcacattagttatgctggagcctgatgataagtttgatcttttactagttgatgaaactgagtgtttgagactgttgaatatttttactttgcagatggtaacaacatttggaatgtctgatattggaccatggtctttgatggattcttcggcacaaagcgatgtcatcatgagaatgatggcaagaaactccatgtctgagaagcttgcagaagacattgattctgcggtgaagaaactatcagacagtgcatatgagatagctctaagccacataaagaacaatcgtgaagccatggataagctcgttgaagtgcttctcgagaaagaaactattggcggtgacgaattcagggcaattctttccgagtttactgagatccccccggaaaaccgagttccttcttcaacaacgacaactccagcatcagcaccaacaccagctgctgtctaagtaatcaatctgtatacttgtgatacttataatttttctgtaaatttatcttcaaacttacactctagaaatgtgatactatctcaaaatttagtaacaagtaaatgtttaaaaaattgaatttgtaggcttgtttatgatattgtccagatttgcaacactcaaaccgaaattcaaaagtattttcaagtagcacaagcagaacaccaaaaactgttatggaatcatgttctttatacttacaaacttatgtacatttgcttacaattaacctcaaaccattagtccctaatgcttcagagtctttaatccaacaccatcatcatctctctgttcaatgaacatccaagaatagtagcattccagagctaagcagaaaacctgaaaccaaaatattctaaaagatcaatgtttgattccaaatcagtaaatagaaaccgtaaagaagcaacatttatcaaaccttaaaggaaacgttacgcattaaatggcttcacgccacttgcaattccatcaccagctctctcgttctgctctttcttcacccacaccattgtagaagaagaagctcctctcggcattggccgattacgatatctccatttggtttgtgtcttgagagttttggcttctcctctattgatagagaagttctcaaactgtgtttctatggccattgatttggtaatctctttagatttggtcgctttcatccaataaactggaaccacatctttcaccggagtattattctccgtcacgacggactcaggcggcacgattgatgatacacaaccgcaatcgatgacatcctcaaccacagctccatcttgatttttattcgtcttgctattatatcgtttcctccaagctcccttattcttcttcttcttcttcttcggtaatccatccgccgcatcttcacctccaccgctctcgatcgccaccgtgacttccggtttctccttctcaacgaatcgtgcttctccgccgtctatagattccttttttctcccaaaatgcttccgattacttcgattcatacgcttctcctcctccgctttcttcagatcttcttcctctatctttttctcttcctcagcctgtagtttccgtcgtctctcttcttcttcctttcgcttcttctctttctcattgagccaacgctcctggagctgaaggatgctgatgtagttagccggaatcagaggaacagtctttcttttgccgtatgtgttcttctcctccattgaaatcatttccttcacacgcttcacaaacaaacctcgtcgaagctgaaatagtgaaaagcgtactgtagtaataaaatgctgaaaggaaaagtaaaaaaagagaggtcctacgcaatagcattaactttttataccgcacttccttagaggcccattggctggcccgtaacttcctttacttttttgagattttctgataattttgttgtaaagttcacaaaacataattaagttggaagcacttaagttcacaaaacattctaatgaaatcatcttgttataattgactcaagttacaaataatatgataaaacagtcaaaattaaaaaattaactaccataaacatgtaagattctaaaataaatataaatgttttattactagattcaggtgttggaagactaactaaaagggaaataaatcagacacatagagccaagcaacatttattactttttatagtatttatcattagagtaaagcttattttattaaaatcaaaccttatctctcacacacacacagaccaaggccattttctaagcaacttgtgcgactctccttcgtcctcatctgccaaaaacttcgtacgagtcgctacttctctctctatatataaactccttaccactctctttttctgattttttgacgttaagagatagaaacagagagagatagagagatagagtt

SEQ ID NO: 12129 - DNA, 3000 bp, Unknown
  misc_feature (1)..( 3000): cDNA_ID_1807538_gDNA_ID_2214532_Annot_ID_134317 3000 nt of promoter + ATG
aactaaagtttacagaaactcttaacaaaataaatatcagaaattctggaaaatatattttcatacaacttattggtaatgaaaataaaactatgaagtaaatatagttttagtttgggccaaagagcttcagttctaagcctatggcccatttgtaaggtgattctcaaacacatgtgatatagtttttttcatcaatctttatttaattttagtccgtaaaaaactaattgtgattctatataagcaactacagtataatttagattaattattatttcaaacatttaaaattctccatgtagtagaacattttatttgattttggggtaccatgatatggtatcctttactataagctactatatatgaagcaacatacacgttaagataattcattatttaatcaattaaaagataagagaaaccggtcaacaatagaatcgttttacggttctgcttgctcagttctcctactatattactacataataacgttggcattccactgaaaaaacattaggagaatagaaaaacaaaatgagaagaaggattatataagagagacaggccaaagaatgtgacgtatattattgtcgtcatctcatttatttctatgtgtagttattgcttatccgtggatgcttagtccacttaagttttataggattccagtgctatgctagcttgattttcaacagtacacacacaaccatatttggatttaaaaaaggatagtaatattttggtctataatttataacttgaattcaaattgtatatatgattagtttgattttgaacatcttataagattcacaaaacccaatttacaaagaaaataatcagtgatacatttgaaaagaaaaacattccagataaatgttaattaaaggctcggactacgaaagatattttgatgtaataaagtggaccaccagaccagatacgtcggtcggtcatattcgatactagtaaatgtttttttctcaatagtgcaacttacttaccatcacgaattacgtacgtcaataaataccaaactaattaatgttaagtaaccgatgaccaccccctcacatgattcacttactgaccaaagaattgagatctgatgactctgtattaactacccccaagtctttgcaatttcgtaaaatcaaaatagagaaaaataaaggatattttgttttatagcgtcagtagatcttgactaatttacaaaaaaacgttacagagacaaatgagtttttaattatttttatcaaacctttgactcgtatcatttgctaaaacgaagaagtgtaaagtaacgtatgattagttggaaaaataagtaacgtatcattatctacactccaaatgttagaaaaaggttcctttctttcttgttttggtcactactgtctattttatttgtttataagtatatattttctgacaacctagcagcagatttattcttttattttgttccccactactatatagtatatactgtactctctccttttattctttaataattattttttgttatttgttttttatcttactcttgttagttggattaatttgttcacatatttgatttatcggaagttggatttatcaataataccaatgtttgtttgtcaaccaaaactattaaattaaaagatgattcattgattgacatccaatttgaaggaaaacaaatatacaaaatctttgatgaaaatatgttatatatatatataaatataaatatacatcttattttaataatatcgaattaagaaaaaaatataaagtctgaagaaatgtatagatctcactgccaaaaccttacctttagagattagtatatacttatcgtcccactcccatcttgtatcatagaaaagttcaaatgcaccaccatgtggtaacttatccatatcattcattgtttttagcaactgttcttaattaatcatagaaaatctataaattttccaactaattggtatactatttaatgtcttaaattatttcgacatataaatatttgcatgcctactacattctccctattaatgattacatgaagcacatgaaatggacgtaaaagaaaaaaaattatgttgatagagacataaggaaaggcaactagtgtgaacaaacaaaaaaagaagaaaaaataaatttccattttaagcattactaaattaatcaacatgcattataaaaacaattatttcactaatcaattttatatataaaaaaaatcaaagaaagggacaaatcaaaatgacgcagcctaaagagaacgaagtaggaagaatatgacaacctcacatatattcgttttcaccttcctctcttcattactatttttttctcttctctaatctcttcttctttctctatctgcaatcccgcgttttctcactggtatttcacttcctctctctgtatatgtgtatctatatatctgtgtgtatagttcgtcttcttcatcttcctctatttttactctgtttcttttaaaagaaacacaatcttgagctggttttttccaattctatgttcttctgcttctaattcttatacacaataagtacgaatacgtatctgtgtatacagatttagattttgattggaaaagaaaaaaaaaaaaattcaatatttttctttgcgtacataaatgttctcacgcgtatacatttgaatctgtatttcttctgtgttcttaactattgtggggttttagataagttttctaagaagcttgtgaaaattccatcaaggcggctaaagaaagactttatctctctctttcaagtttttggattttgaatctgatggctctctgacacattagtgaatagtgataatcttgacttaagagttttgacatggaagaacaaagctagttgaagaggtttattatgaaaattacatgatgtttgaagttattgcaagtcttcttaatgatgattttgattatgcagaatgttaatggggagcttaatgatg

SEQ ID NO: 12130 - DNA, 3000 bp, Unknown
  misc_feature (1)..( 3000): cDNA_ID_2711515_gDNA_ID_2214532_Annot_ID_134319 3000 nt of promoter + ATG
gaatcaagccctacacaccagggatcagaacttgcggaaagggtgaagttgctttcttttgaatctcaaggtgaagctttgagtaaggactcccctagaagtgttgaacaggattgctctccaggtcaaagagcatcacagcatctttgggatactggaatactctctgaacctattcctaatggtttctactcagttgttccggtgagcttttcagattttttttatttctttgtcatttggttagtaggaagatgcagtttctgaaatttgaaatcttgctccaggataagagagtaaaggagctatataatagactacctactccgagtgagcttcatgctttgggagaggaaggtgtcagaattgaagttattcttgttgattttcaaaaagataagaagctcgcaatgcttaaacagttgatcactacacttgtcagcggcagcggcacaaatcctgctttggtgattaagaaaatagcaggaacggtaggatttctgtaatgactcttccctctttgtcacagttccgcattgcatattctcctagctcgacatttatttctttaaccgcgtccattgttatgttctattgcactctctgccagtgacttactctattacctcaatttcggttcttaaaaaaaagaaacgggagttgatgtcctcatgcaatcttttcagcactgacttgtcctatactcacaaaattcattctcctcaaacaggtctctgacttttacaaacgtccaacactagaaagcccttcaaaacttgctctagaggaaaatgcgttcttgtttgaaaaccatggtgctcagttgcttggccagattaagcgtggttgctgtcgagctcgggcaattttgttcaaagttctagctgatactgtaggacttgaaagtcggctggtggtggtaagcctcagtttctcatatttcaatttttttctttacctacatttatgatctagatgattggatcttatgctatttgtctcttacaaatcaacttggtttcccttttgattcacatgtgcagggtttgcctagtgatgggactgtgaattgcatggactctaacaaacacatgtctgttatagttgtgctgaattccgttgaactactagtcgatcttattcggtttcctggtcagttggtaccgcgatcagccaaggcaattttcatgtcacacatctcgcctgctggagagagtgattctgcagaaaacgactcttgtgactcacctttggagccaaatagtcctttatatgagagaagagatcctgagaggtcggcttccgttgtgtgatttttctttctaaagcatattacagtaagatcattctaaaacaactcttgtgataagcgtcccctagagtgatatcgtttcctctgctacagtacagaaaaagatgaaaatcttcaattttatcggaagttagaaggatatccaaatgcatctggttcatcactgcgtagtttgatgctcagaccttctacagctattgaaaggaaattgaggtaaatattacatatatatttctgacaagttgtataatggaatcagtacaatgattggtataatagaaatgtgcttttcttccttcagcaacacctcgcatagtgaaccaaatgttgctactgtattctggaggcgtagccgcagaaaagtaattgctgaacagagaacagctagctcaaggtttttccgtaccctttctggcttgtattatagttaatgaaaaagaaaataatacattggcacgacctcttgttgtctttagatacagtaatgagatggaacatataaaattatgtttctcttctttttgctgattctatatttaaatctcttgattagcgattctgttatctgaagtgtgcctttcaagagctaccctttttttctctatacctaactgatgatagttggccatttgttacatttgcagcccagaacacccatctatgcgacgtggacgatcaatgttgagcactggtaggaattcttttagggattacactggtgaagcatcatctccttcaaggtaactcatttttacattagtgcatgcgaaaattttcagtatgccgctcctatcatatacattccagtattagttaagttgcttatacaagtctgcatgtatatatttgattggctgtgcaagcaattttttaatattctctagctttcaaacagttcatccacatcagaaattcgtaaaactagacggcgaagttttaggatcacaccagaaattggcgatgacattgcaaggttggtattctcatccatgtgcattgtttctactttcatcgtttagcagtttttttctatcattttcaccttgcatttaaagagctctatattggagtttattctgtaaatctagttggtaaggtatttttaaaatctacaatcatctgagcagctgctagatcacatgaaagtatggcatgagtcatctcgaatgcaaaactgctatctccaaacttctagatgcttaggttaggtgtctgtaagatggttatatgataaacatggaactatatatttactttgatagtcatagaagctgtaagccatttgatggtactccttttaattttgtaataatgatactgagattcgtgagaactaattaagaacagtgattttgtgatttgcttgtgtattgactctgatgttacaaattattgaagcgctgtacgagaaatgtatgagaaatcaaagcaaaaccgtctcttgcagggtcgagaggatgaaaacagctcagttatcgataacaacgtaagttttggctctgttagtaagagtgattgttttgttgtgttagttcctttctcattgtataaccagtctaaaagttctgagtttcttctgaagttcactgctctattagctcttacctctaaatttcttgtgatttttgtttgtgctttctcaggtgtctggtctccatcttgatgatgagttaaattctaagaagaca

SEQ ID NO: 12131 - DNA, 3000 bp, Unknown
  misc_feature (1)..( 3000): cDNA_ID_2711511_gDNA_ID_2214532_Annot_ID_184982 3000 nt of promoter + ATG
tttatcaagtaatttgcggagacatgtctgatattgttatctttatttacttttgtcagataattcgtgacttgtaatctatgtatttgcagttgtactatttttgggtgcatgcacaaaacctccacgcttatccatgatcacggagtacatggagctgggatcgttgtattatttgatccacatgagtggtcagaagaagaaacttagctggcacagaaggctcaggatgcttagagacatctgcaggtatttaagctaccctgcatagctcccttgattatatgttttaagctacatatgcttatctcatgctgttttgtatttcttatgggatgcataaggggtttgatgtgcatacaccggatgaagatagtccaccgcgacctaaagagtgccaactgtctagtggacaaacattggacagtcaagatctgtgattttgggctgtcaagaataatgactgatgaaaacatgaaggacacttcatctgctgggacaccagagtggatggctccagagctcattcgcaacaggccttttacagagaaatgtgatatctttagtcttggggtcataatgtgggaactttcaactttacgtaaaccatgggaaggagttccacctgagaaggtataatatgctgtgccatgatttctctagagatgtgatatctttagtcttgtgattacacttaatgaaatttgcttcttaggttgtctttgctgttgcacatgaagggtcacgtttggagattcctgatggtccactcagcaaactaattgcaggtttagtgttgttgaataccatgtttcttgaacttttttgtttattctcttatatttctcaactgcttcagtctgagttaaagttaaccacaatttctgtgcagattgttgggcagagcctgaagaacgcccaaattgtgaagagatacttagaggcttactcgattgtgagtacacactgtgctaacaacacttctctttcggggggatatgagccggaagatgttttagctcagaaaacatcccagcttcttttaaatctcggctcttaaattatcaacctgagtggcataattttttaagatcatgagaacttagaggctataatgagacaagttcatagttcagttttgatagctgtggaacaggcagagacaccaaatgtaggatacaaacaagcatgtctattaagctgccactggtgtgattcatgttctcacaggcaatacttcttttgttggctattgaagagcattttggtctatcttaagaaaatatataatacacactattctttgttgggagaataaatagctcttcgatttctcttgtcttcatgacttcatccattattctcttgtgtctagccactttctttcttcttttctttcgtgtcaagcattcgataatccgactttatttatagactcatatcatatcccaattaaattttatgaagaagagtttttttttttctttttctgtcatataactttataaacttataaacgtatatgtggattataaactaaaaacaaaatatttttattacaaattatctgcatcatgttaagaaatttgaatcaaaatttattttgttgttatgcattagaaaaatctgagatgatcgggtcaaactatctaagactatactataatgtaaacgagattggtcggcaatcagctctagtctgtagtagtgtcggaagacgtgaacccaagtcaaaagaatatttataactatttagaccaattaagaggaaaaattagcctttattttaaaattataattttgtgtccaatgtttttttttttaaattatatctatacgtgaaattacttatcttaaaaaggtgattacaactaatcttcaattttctagtgcaacagtatttttaaattttggaaaaatctttggcagcggagaaacagatcgtgactttttatttttaataataaaaccattttatgccttttcatattccgcttcaaaacttttcttttgttatttttttttccaggaaagatttagatttgtccatatggtttcagtcaaacgaataataaaaaatagattagaatagaggacccatttaatttgtagaatagatataaaaatgaaatcaaatcttagagggctccacgttaatttgattgatagttaaattccaatgcactcatacttaatcattagggggctaatgggggtgtaaaagcacagtttggttttatataatatactctatattatacttaaatctcttgggttagataaggacttacggtcatacatatataatttcttttacttggatgattggatccattaattccctatacttttatcaaaaaaattataccaaaccaaatttcaaatcactcaagtgaaaatgttttgtacattttaaaacgaatgtagtaatgtacaatgtgtcccacatttcccattggaaccctgaagcggtaaagcctataaatattcgtgataaaaagtaattatattctcaactaaaattactatatattgtaatattcatatgggcatttttattcgtcatgtaaatctttgtgctttgtttattcgcattttacatagttgtttctgattacatcatgataagcactttatataataaggccttacagttgttacataaatacaacgaaatgataacttttttaatattggataaatataaagtctctcataagataccgttgaccataattaaagtccttaatgatagagacaaaatttataaattcaaacttggcttctctccggtgaagtcctcctctctgtttctatccaacttcttctctctttctctataaacttcctcatccgccgcaactgtaaccgtaaccgccatcatccgccgcaatttcctacaacatttccatgtgctctttcttgttgtagaagattgttcttcacatgcatcctttctgttgtgtctccgatcactccccttccacgccgtcgttctcc

SEQ ID NO: 12132 - DNA, 3000 bp, Unknown
  misc_feature (1)..( 3000): cDNA_ID_3023974_gDNA_ID_2214532_Annot_ID_184981 3000 nt of promoter + ATG
aaatcaaactaatcatatatacaatttgaattcaagttataaattatagaccaaaatattactatccttttttaaatccaaatatggttgtgtgtgtactgttgaaaatcaagctagcatagcactggaatcctataaaacttaagtggactaagcatccacggataagcaataactacacatagaaataaatgagatgacgacaataatatacgtcacattctttggcctgtctctcttatataatccttcttctcattttgtttttctattctcctaatgttttttcagtggaatgccaacgttattatgtagtaatatagtaggagaactgagcaagcagaaccgtaaaacgattctattgttgaccggtttctcttatcttttaattgattaaataatgaattatcttaacgtgtatgttgcttcatatatagtagcttatagtaaaggataccatatcatggtaccccaaaatcaaataaaatgttctactacatggagaattttaaatgtttgaaataataattaatctaaattatactgtagttgcttatatagaatcacaattagttttttacggactaaaattaaataaagattgatgaaaaaaactatatcacatgtgtttgagaatcaccttacaaatgggccataggcttagaactgaagctctttggcccaaactaaaactatatttacttcatagttttattttcattaccaataagttgtatgaaaatatattttccagaatttctgatatttattttgttaagagtttctgtaaactttagttagtttgaagaaaataggtacaagttcaaaattttctaacaaaaaacagagcttttcaaaaatttacaaagctttcgatatatattttttttttttaggtttcgatattttgttttgttgttgttgttgtaagttgtagataattttggataataataaacatgttatcggagacttgaatgttaattacgatagtatgagaaacactacttcttttttttttggccaaaacatgagaaacattacttaaaaaagtatttccattcaacatcttttcaaaaaaatatgagaaacattacttaaaaaagtattgggaaccaccgaaaaatttaacatttcctcgtcagaaactgtcggttgtgccaaatagctagtgaaaataagaatatacaattcgactactggacaatgaatcataaggtcgagttttacgcaggcagataagatatgcttcttggtagtaactagctaggaaatcgactatggttttctttcagcggtaataacatgaccaaactatctggtcgtatggtttataggtttatgtttggtcgacatggtgtgtgctttacgtgctaaagtgctgacatgactttgtacctatgcaacaagccaacaaatatcttagtggctcaacagtccaagtcttaaaaggagttcacgaaaatggttttctaaaatgcgattccgctggtcaaaagcttgctacggtctgatattttcagaatgctgaatatgtcaccgactcgctttattacattttcgacatgcttatcacgattgtattgggcctattggctgacgaaaaattatttgtaacagtgcaacaaaccactgttatttgatacttttttaaaaaagatacttaggtaggatctatgattctcagctacatttgtgacagattaattaattatcgtataaattactatgtatccaccaaattagtgaagatgaaagaagatatttgtaaaagacgcgtgacgaggtctcatctatatatcacgtgcatcattttgttttatgtcctttgccgacagtgtctgtgtggtccgtcttagtcgtacactcgtacagagacctgtacctttcattttttcactttgtttatttttaggaatctctaactcctactactactactcttatactattattattatccacacatatctatttcataactggtaataacataaatattttagatcttttttttcgatttcactaagaaaagagtacaaacattatgtataaataaaaattaaatatatttaaaagaaactagtaacgtatgaataaataaagtagggtccaataggaggagccattgacttggaagcatatgagacagttgagaggcccaacagcccatcgccagctggatttcccctaaaagtcacgtgacctctctccccatctttcttcactatctccttccttcccacgtgaccttcctctctctctgtccctcgtccttcttcttcttcttcttcttcttcttcttcctcctccttcctcgatagagccttctccgattatgctctgtgtcctcattgttatctccggtacaatcatttctcttccccgatccttttctattccacgaatttcacatctttcgcatttgatcgtctttatattttatcttgttgattcaatcatacggatctgccggagtaaatgccgttgctctcggtcattgaatttgatatctgtaatgtgggtttttattggttttggtgattatgaggtttcattagtgctctcttgttaaagtttgcattttggagatttgagtttggctctttgatgtgagaatgtacattgaactttttgtgttgttgaatgatgaattgtaccttttgtgcggattttttgaggttactctcttgatattaaattctgtgggccaataacgaattgatgacataaagttgtttttactacagagaacagaacagagtcttcttattttgctcattttaaccaatgtcaaacaaaaacctcgttttaatccatgttacactttcagctaacttctctgtctaacaaaggttaacatgtctttctctcatttagtgcagaaacaagagcagatgggtctaattctacaccaatcaaagctttgttctcgatttagaaagcctcttttggggtaaagagatggtgagaaaataagttatacaaattatctggaag

SEQ ID NO: 12133 - DNA, 3000 bp, Unknown; identical to SEQ ID NO: 12128
  misc_feature (1)..( 3000): cDNA_ID_2708350_gDNA_ID_2214532_Annot_ID_184976 3000 nt of promoter + ATG

SEQ ID NO: 12134 - DNA, 3000 bp, Unknown
  misc_feature (1)..( 3000): cDNA_ID_3023988_gDNA_ID_2214532_Annot_ID_184974 3000 nt of promoter + ATG
caatatttaaaaatattttagaccttcattattaaagtttgtatatttatttgcagtggatgcggaattaccttgttgaaaagttgcggtaataattgcattattataaggtaaaaatgtgcatttagaaaaggataaagtaaccaaagatacaactttcggtgtcgcaaagtaatgataagaaaagaataaaattggttcactgtttcttctctttatttgagtattaataaggtacggaatgaggaacacatgattatgagagcaagtgggggcacatatttgttagcaacaacataggaaatgaaaaatagattcatgtctataaatcttcaattattttcaattttatcttagtaaataataagtcaagagtactgatttaagatccctattatccaatactaacaaaatgtgttaaatcgtaagccctaaaaactctatgatatttgttatagacagagtcaaaacaaaagttcttaacctcttatgctacatctttggattctaccaaatcttcttgcactctttaaaaacgtattacaaaaaaaaaaaaaaaaaaaaaaaaactcaaatgagaatgcaggagtggctagagattttactgattcacactcttattgattcatcatctttatcaccacaaagactcagagtaatgaatagaatcatatcatcacaaggatcagatttgatcaaacaaaaactctctcaacacacttccttcttcggcatcaagctatggatcctcatcacagcttctgcctccatagccttcctcttagttctgataatttctgtcctcctctgtttcatatttcacaggagaagatgtagccaagaaccattcagactaagatcaaagctttgtctacctttatcacacattcccttaactaacaaacaacagattccttataaccgttgcggcgacgatatagagagccagagaatctctcaggttggttggtcctctgctcgtctttcctactacacacgcagcttctcctctaccggcagctttggaagcttcaatgtgtttacgttcatggagatcaagaacgtgacagatagttttgcagatgataatgtgattactaaaggagattcttcaacggtgtatcgcggaatcttgatgggtacagtcactgttgctgtcaaacgattccttccaaggtttttacatttttgcttgatgtcctcgtatatcttagaatcttaatattttgatctgagataaagagtaatagcaggtatgaagataaagatttcattacaaaagctgagatgattgcaaatgttagacacaagaatgttgtgagactccttggatactgcatagaaggagatgagaggtatatagatatataacctatgatgtgtgacttacgttaaaattaatttagactcatacttaagtctgtataaattttagggttcttgtatatgaatacgctgagaaaggcgatttgcacgaatggcttcatggatctgcaggaagaaatcggcctctgacttggagaaagaggatgaagatcattcaaggagtagcaaaagggtttgatgatcaaaccacattttggttttcttgtcttcttttatgcatgaatcattctgatggttaattattaagtttatgttctgatcagccttgcgtatattcacgaggacatcgaaccaaagatcactcatcaagacataagaccaagcaagattcttcttgattatcaatggaaccctaagatacttgatgttggattcattggtcacagtgatattccaactttgattccttcacctggtaatatggatgagaaaatcgacgtttattcctttgggaatatgataatggagcttgtctctgggagagtctctgtagaccaaagttcaccacatgtgagagtgtatacacaatacataatttaccaataaaaaccatttttagctaactagaaacactgttgttcttggcaggtttatctagtggactggatcaaagagatggtggcaaatcatatgatagtagatgttcttgatcctagtcttcccgaatttcctacaataaaggaactcaaacggattgtgttgatttccctgcgttgtgttgatcccgagctaaaagagagacctaaaatgggagatgtgattcacatgctccaaccacatgacttgctgctgaataacaatgtaataaaactttttgacattcagtttcttgttccccaagctaaatagttatccttactttgttctttctctgtttccaggcaatacagaaggctcagaagattacccggtcacatgaggtttctgcaataagtatcagacaatgagtcctaagcaagcaataaaatgattgttaatataggatcttctgctttgtattaactaaattaagggttccttttaatttaggtcacagcaggctcagctgtattgattgtgttttgcatcctttccaactttgttatatgacttccctatatatcacatgtgttgctattgatgcaggatagtaatcaggaagataaatttcttgaaccaaatctgtataggaacactgataaaatagaaacaacgattttcacaatcttggtttccaaggaacttgaataacaataaaaactagggatagtataatgaagttacaaatttattactttgacccttcttttacttaaatttccactgttgtttttctttttggaaaattatcttttacaagtttttttgcgtttcattaattctatgttacgaacacaactttttgaccaatttataaaatcggtgagttacaataaccggtagacgagtaaaccgggattttataagtgctctgaagatcaccaaacaatctctcctcacgaagatcttcagcttcaaggacttttaaatcatcgaatctctctgtaagttacgatctccgactgactcttactgggtaaatttcgaaaacttgaaactgggtgtttccgaccgtcgaatcggattcgactagat

SEQ ID NO: 12135 - DNA, 3000 bp, Unknown; identical to SEQ ID NO: 12126
  misc_feature (1)..( 3000): cDNA_ID_2708354_gDNA_ID_2214532_Annot_ID_184971 3000 nt of promoter + ATG

SEQ ID NO: 12136 - DNA, 3000 bp, Unknown; identical to SEQ ID NO: 12125
  misc_feature (1)..( 3000): cDNA_ID_2708360_gDNA_ID_2214532_Annot_ID_184969 3000 nt of promoter + ATG

SEQ ID NO: 12137 - DNA, 3000 bp, Unknown; identical to SEQ ID NO: 12123
  misc_feature (1)..( 3000): cDNA_ID_1014113_gDNA_ID_2214532_Annot_ID_184965 3000 nt of promoter + ATG

SEQ ID NO: 12138 - DNA, 3000 bp, Unknown; identical to SEQ ID NO: 12122
  misc_feature (1)..( 3000): cDNA_ID_2711538_gDNA_ID_2214532_Annot_ID_184964 3000 nt of promoter + ATG

SEQ ID NO: 12139 - DNA, 3000 bp, Unknown
  misc_feature (1)..( 3000): cDNA_ID_3024018_gDNA_ID_2214532_Annot_ID_184959 3000 nt of promoter + ATG
ggagggaaaaatagtttcccgagaaagtgagagagaaagagaatgttggtggtggtggtgggtctgagtctctgtgagtcttttgttttcaaatttgaaaatccccaaatagcttttgcgagagatgtgtgtgtgtgtgtgtgagcttcgattttgaaatggcatcaaatttcgaatttgttattaaaagattcataatttcgtacgtttttacactcgcgggcgcgtgtgatcctacgtggcccaatcctcttcattccttctaataatattttttagctaattacagtatctgtgactgttaatgtgagtagtttctattgaatcttagtgttagattaggacgaattgatgtctaaatgttgatgtttagtgttgaattttcttagattgggtttggtgttagactattctagtattcttgaacattcttatattgaatttagattgtttgttgcacttaaaatgtttgtgaattttttttgaaccgaacttaattgagcatttttttcatttgctaaagagaattgatgtgaagatgttttgtgagcacaatggagtttactgctattaacctatactaagtatcaatagcttttatttgtttgtgaaaaaaaacaatagcttttatttgtcctaggaattatttaatagattaaataacagctatttttctcttatttcttagtgattaaaatatttaaaatacagaccaaaattaattgtttatgttaatatatttactccttaatcctttatattaaaattgtataatgcatgtagttaataaattgttttccaaaattcattcataattttattcctaaattattttggtcaagaaaacacatctttgaataattaaatgcttccttgtatttgataatttcttgatattttaaaataccttctatactatgccaatgttattggttataaataggtttaacattgatcctgaaatatatcataagaaaatcaaaagtgaaataagagatcaaaatgatgaagctcatagttgtctttgttatatccagtttgttgtttgctactcaattttctaatgtaaaaattattattattttcttcatattatgatttatgaattcagagaaataaagtttttttttttatgtgtgtatgtacagggtgatgaattagagagtcaagctcaagcacctgcaatccataaggtatatttaaattataaaatatcaaatactgaataataaataataaatatattacaacaagaatatcaatgttatttttcaaactacataattttaaaatattttattgataacacaaatgtatattattatcgtctccattgatttgcattctaaatttgtttttgttatccaaccaatttcagaatggaggagaaggctcacttaaaccagaaggtaaattgtttaaaagatattatttttatttatatagtaaatgattgatcaaatcacaacttaaataatttaattgttgatttatatttttctgaagaatgtccaaaggcatgtgaatatcgatgttcggcgacatctcacaggaaaccatgtttgtttttttgcaacaaatgttgtaacaaatgtttgtgtgtaccatcgggaacatatggacacaaagaagaatgtccttgctacaataattggacgaccaaagaaggtggaccaaaatgtccatgaaaacaaaaaattgtaaaagcaaaataaaatctatcgttgttatctctcaataaaatctatgtttgtaatccttgtttttcaatatagaatataatatggagttttcataatttcttctattacaaaattaaagttaatgcacaaataaattgaagggacttggaccttttcgtgtaagttctttctttaaatcacgaacaatttagatttatattttcactcttacaaacacaaaacatggatgctctttaactctcatccaaacaaaatgcatttctctctttctttttctaaacatttcacaacaatatcccatattatatctaagatatatgatctttttaaattgaatttatttaggccatgttttaaaatcgtgtttggttagattgacccatgaaatgttgacatattttaacattcctaaatatgactaaaaatgattaaagatatttaataatatatttgctctattaaaaatgattaaataaataataataaaaagtatttccaaataattttttaaaaaacatgtatttataatatctccaaataaaacataatcatgatcagaaaatccaattaaacacatatatccataaaaattaaaatagtttcgtcaattcaatgttaaatcattttcatctaagttaggaatgaatgttttaagtttgacaaagagacgagaaaactttagaaatctcctcccgtttaatgaatcaaaattatagtctttgtactttttggatgatctcctaggcgatgctccagatccggatcggtccacaacagtccatcgtctcacctcgataagtttgacaagatctcattcattctcctggagttggttagcattccaaactaccatttaccatctatacattttcttatacattttgttacttaacctgcacaattatagtagttacgtcactttttagtacttgtaagattttgccactagtttatagtatatacattacatataagtacaatataacattccttactcataagattttgcttatcaactacagacatacatagaagttggaacatttttagagcccaaaggaatgggcctagtatgccgaagcattaatttattttattttcatcaaaaaaaaaaagaaaaaagagaaggcggtttataatgccagcaaactctgcaagggcaaaaacgaaactcatcgaacaaatttcgaggctttgcttcttgaatctcacaagaagccgtacagtttctcagctttctagtgttttctcgggtagaagagagatagagagacagagcaaagcctaataagcgatg

SEQ ID NO: 12140 - DNA, 3000 bp, Unknown; identical to SEQ ID NO: 12131
  misc_feature (1)..( 3000): cDNA_ID_2711511_gDNA_ID_2214532_Annot_ID_134320 3000 nt of promoter + ATG

SEQ ID NO: 12141 - DNA, 3000 bp, Unknown
  misc_feature (1)..( 3000): cDNA_ID_1807419_gDNA_ID_2214533_Annot_ID_134325 3000 nt of promoter + ATG
gtctcaacatcgcacactgtacgtgaaaatagcttctcatctatatcatgtcttattgtgagagtgtagtaggtatggtataatgactatgcttggaaaaactaagaacggtatgaccgcaataaatgatcattcattgatacttttagtacaacacaataaataatccttttttgtatcatcttgaaataatatagtatatgccaaatttattgtttaaaagtgtagttcttaggattaagacatgcaatctaaaattagttggtactaataatcgttgataatcactacttggttttaatttgagaatgcatgttgttgacatataaatgtgtagttgagaatacatgcttctggttaaaaaggcattagaccttttggtttgggagaacctacaaagggtatatatagttaatccggaaagaagagatcagaaatattttcaagttttcaacagtcacgtttcgacataaattttggtcaagaacattgacaaagattttgtgtactggtgtaacttttcatccacacagactacttttctatattattttaggcattttctgacttgaacgtcgaaaagttttcgaaaaaacacaagttacaacaatgttacgacagtttagattgataacttaaggaatgtgagctaggtgtacgatcatctatagcaataagcaaaagtgagagatttctttaacaaaaaaaaagtgagagattttcgacattggacatgtgattgcgaatagaattaagacacgaagattttttcttttgccaacagacatgtggatcaaagatgagacgtagcatagaggattgctacttgatcgatggaagagaaatgtgtattcagactcaaactctcgacaccacagatgactcgacaagacagcagtagtcgaatctaatttaaaaggtattcgatttgacccttacttttctctattattcttttcttgaaggcatcttattttcgtttcagtcaatcctttatatacttttccaccatccactgattaataaaaagaaagtagaatctattagtttcatctctttggatacgcaaatgtgctagaatctattaacgagcactataattcataatttatctagccagttattttgaaactcttaagatattttggttcattatggtttaatcttgtttaaaccgattaaaaccgattaccatgcaatattataacgatcagttgtatgtaaaactcaacccgattactgtaaattcaaaataaatgacatgattttatgtgtttacataattatgaatatatttaacgtttgagccattcatattgcatgatgttaatctattgcaatttatgcagaattcatctcaaaatattaagtttatagcttcaaactagtagagatattttctatggtgaatttgtgactgcatatatccttctgaggttaacatatcatgtgaatgttgaacttacaagaaaagacacaaaatgtgaaaactagttgtctttataaggattgcaaaccctttgtgtcaattgtcaaaagataacgcagatgttttatctttctaaaagtagcctgttttatattgaaatctaatgactttttttaatgaatacttgagtgtgaaggctccagcgattacggatgaaaagtgaatgtttcaaaagtatgtggatcaacatgtaattatgttagaattttgtatatatatattccaagaacatattgtcctgacatgcgtcaagtacttagtgatttagaattaatatggaaaataaaatgacgcaacgatgattatgtttagtagagactagagagaggtggaacttttgggtgatgtcgttgtcgtcttcgtgacaccaccacgacaatgtttgtggtaactggtcaattatggtgacctacttttttgtatgtttttcctaacgagtcaaaacccgatattaacacattcctctaaaaacaactgatattattaagctttcggctttgattagaagcatatttagaaatggttttcgacgtgaatatccttatcgtttatttatcataccgatggataaaacgaatagttgcatgaaacacttggtctaaataaacatacggttatagttttaacaaagtggttgtaaagacaaatggtttacaacaacacttggcttttacaacaaatggtttacaaaaacaaatggtttacaacaaatggtcattggtctagtagttttgtattttcatttgagaagaattgtcgctggagactagtgatcaactcctctcaaacacaaaattatcaaaatcattccatttagtcagtcgaaatggtatcacgatccattagaaaattcagttagttagatattcgactcagttataaaaaatccagtaaaaacggcttacatacttgttataaaaaaacccctcttttttttggagaaatatagaaaatattttaaattttcaaatgagtgaaaatattttaatctttgaaattagcagtattttttgctactaatgcatactgatatgtatggaatattaaacacagctaggaaaaaagtgaatgaacctatgttgaaaacatttacctctgagctataatggtcagtaagaaattaagagttattctctcacggattcacagtacacccattataacaaaagactagtcttctctgaccttcttttgttgccacaagaaaaaaaaaggtttcgtcaaaaaatttcaatttcatgatgatgaaattgaggaattacctgaataaattgtataaagaaagcattatgattttgatattttctcaccataaaaccaatactgtaaaaatgatacaagttgttctggataaaagggtccacattaaatttaaaaagcccactaagaagtccaataacaactccagcgtatgttagcattggatcgtcaaacataaacatttcctttcttcaactactactctgttttcacttttcgatttgagaaaaaaaaaaacgatcacgaagatg

SEQ ID NO: 12142 - DNA, 3000 bp, Unknown
  misc_feature (1)..( 3000): cDNA_ID_2992396_gDNA_ID_2214533_Annot_ID_134326 3000 nt of promoter + ATG
ctattttatttatgtgacagtttggatttgttgagagtatgattctaatgaatttgataattagtatcctcttactgcaatagtaagaggtatccttttttttgtcgcaaaggtagattacttgttatattagatattagcacaattacaactgacttgcagaaagtcagaccaaaaaatgagatcaaggggcacaagaaacacccactaaaaggtcaaccctgagaatccaaaaattaacagggcaacaaaagaataagcctcccaaaaagcaaggagcctaaaagcaaaaagacttcagtccacagaggttagaactctctcatccctaaagacaccaagaagccaagcaggaaaacttacggccacgtacgattgaagcctacactccttagtaacactttgggcaatgagattagcacctctattcgaagacaccgattcaagcaccactttccaaactgcaatgccatttaaagctaacaagatctccgaagactgaaacctaaaagaaggccaagcttgcggcctgtttaacaccccaacaagcaccgcagcttccacaccaaaaaccaccctattcacatgatgactaaccatactctcaacagcccaaacaatgcttagaaattgagcctccaaaaaggaggaaatattggagaaggctcttctactgtgcatcaagacattgcctctgtcattcctcaacacccaagcaacccctgcaagtctagtaagaggtatcctattttgtacaaaaaaactattatgattttgaattaccaatcgaattaaatttaaatcatacaagcgatcaaattaatatttgaatcaaaatttactaatttataaattagctgaaaccaaaaatataattaaattgaaaagcagccggtagtccaatgatcaatgtttgtttgtctttaattggcctgaaaataataaaactattttatggtaataatgattggtcattgagtaaatttccttttcctaaaggggaaatacaaaaggagacctttgtggcggagaatataaaatgtggaagataaaagtaaaacaaaaaaggaagtttttttttttcttcttcatgattattaatgaaagactttttgaatgacaatgacaccaaaaacaaaaaagcatataaatggtggtggtggaatttataaaggagttggggcctaatcacttactcatgcttttattctttaccatatcacatccatctaatctcttaaaagtaaaattatatcactgtctaccactgaatatatgcttagttataattaagttgacttgttgttaatcatttctattatcttcaagttatacgtctcaaaatttaaataattgaattttcacaaaaaaaaaatctatttgtaaagtatcagtcagtatgcaaatcaattcattttaactttttctgaacaaaaatatttctatcatcatcattgtgtttaatttttttccaaaacactcgattacaatctttgtatagcttttaaactcttaacatagccatatgtaaatagatatccgacattttaaaacccgtaagtacacagattatctctctgaactgattctgtttagaaactatgcatcttttactagttaacttgttgtgaattctagcactatgcatctttattggcttaatacagtgcaatggccaatatatatttttcttttgtaacatagtgtatcttagttttatatttcgttgaatgaccttctagatgattgttacactgattcatctccattctcagcgtcttgtgataaatcttcaatttataatgtccaacatttaaccatctataaaagaactaaacacatcgaaatagacttctagctatatatgtgatttagaaaaagattcattgtttatgttccaaaatattcatatcatattgttaatatacgaacaaagtctttgacatttcctcttatagatcatctcttatccaagatttcttcgtaatatactaaaagaagtaatcatcattctagtttattatgtcgccaatgttttcaaacttggataattaatctgtttgtttggtaccgtgaaacaaattttggtttatttatcaaattacagtaaaattcttaatatttttttttccaacaatcaatataggaataaagctaacagaagttggttgaacaaaactaacaaaagctcaacacaattaaaatgaattacttggtctgaatcgaactattaccttttggaatatagttagttaatgttcacaatacgaatacaagttggaaaaaacggaaagaagaagatttggcatagatactcactcactcatacacttagatatttttctgtctagctactttagataagaataagagaagagagaaaatcaaaaacaataaaaagaagaataattgtgaaaaacaatgtggattgtcaaatccaaacttaattgaaaatttgaagagtttaagcgaatggaagcaaaggaagatctttgagttgggccatagagaatctatgctcaccacatgtgcctttctttgcctttcctccttcaatatacacgagtatttggggcaacacataacaacacataacaacaacaacaacaaaaattacacaaacaaaaacatttcataataataacaaataatcattcaaaatataaatataaaatatattagtgggttccatcgccaatagaccaccaaacagcgactcttctttcttacatatctatcttcacaagcttctgaggattgaaaccaaagaaagaaacgtacaaacataaaacataaaaactatatattataaattaaaaacacttctttttcataaaagcgactacacggttttcatttctttgtcgtaaaaatcccatttccagctttaaaaatttcacgctttgtttttgtttatagtttcttgtatgaattttattgattggtgttgtggtttggtttacttttaatttcgaattttttataactaaaccggcgacg

SEQ ID NO: 12143 - DNA, 3000 bp, Unknown
  misc_feature (1)..( 3000): cDNA_ID_3024056_gDNA_ID_2214533_Annot_ID_185000 3000 nt of promoter + ATG
cacagtttcaataaaaatattcaaactttggatacaaaacaatcaaacatagagaataaaacaaacctagattttggataaagcccttgacttgaagatgtaataggaagaagatgaagattccaatctttatcaatcgttggaaacctctcaatcagcttcaaatacgtctcattactcgaaacacttccaataaaccaaagtttctcacggtgaagcttcaacaaatcagcgagcttcaacacaaacttctcaatcacatcaacagagaaaacatcactagctaaaacctttaactctccaaggttcaaaaccatccctgacttcaatctccctaaatcatcaaactttatatctattcttgatccatcaactaaaacttcactaatctttatactaactacacttaacccactaatctccaaaggtaaaaaaccaaactttcctctgtttatagaatcagtaaacgttttaagagcttcaacaccacaaacaccaactagtaatggattcttcttatctttcctcgctaaaacttcaccgattcttctacagttctcgtcgagatcaccaaacggaaacccgaatctaacccgacccgagtcagattccggtaagttacataaaaacagaggaggaatacgagatcttgacgtgaaccgtgaagagaattgagacgtcaccggaggatgaagcacgtcgagtttaatgtcggtgcttctaaacccggcttcaccaaagacccgactcacaatcgggtcatctaaaatggatagtataaaatacttcaactcaactttcaaaaccgacgtcgtttccgtgttgttgtttccatggatttgatgaagatgataagtctctggatgacgtcgttgagtcgcttgagatcttttgatcgccgccatgagagagtttgagaccggaggatcttcttccaccgtcgtcgttggtgttgatttcgaagaaggtaatctgtctagagaaacgccgacgcagagctcaagcgcgcgaaactggagacgtgaagagtacggtgtgttgtgggcggcgcgtgagatacacacttctcggagaatcgatgaaggcattgttaaaagacctgaaacggcgtgaagtgacgtcgtttgtgcgtggcttcgacgacgcgcgacggagactgcgtcgtctaatgcacgcgctgtttcttccgttaaacattgtctcgccgtggttactggtgtcggcatcgtcgccggtttagttataaaaaattcgaaattaaaagtaaaccaaaccacaacaccaatcaataaaattcatacaagaaactataaacaaaaacaaagcgtgaaatttttaaagctggaaatgggatttttacgacaaagaaatgaaaaccgtgtagtcgcttttatgaaaaagaagtgtttttaatttataatatatagtttttatgttttatgtttgtacgtttctttctttggtttcaatcctcagaagcttgtgaagatagatatgtaagaaagaagagtcgctgtttggtggtctattggcgatggaacccactaatatattttatatttatattttgaatgattatttgttattattatgaaatgtttttgtttgtgtaatttttgttgttgttgttgttatgtgttgttatgtgttgccccaaatactcgtgtatattgaaggaggaaaggcaaagaaaggcacatgtggtgagcatagattctctatggcccaactcaaagatcttcctttgcttccattcgcttaaactcttcaaattttcaattaagtttggatttgacaatccacattgtttttcacaattattcttctttttattgtttttgattttctctcttctcttattcttatctaaagtagctagacagaaaaatatctaagtgtatgagtgagtgagtatctatgccaaatcttcttctttccgttttttccaacttgtattcgtattgtgaacattaactaactatattccaaaaggtaatagttcgattcagaccaagtaattcattttaattgtgttgagcttttgttagttttgttcaaccaacttctgttagctttattcctatattgattgttggaaaaaaaaatattaagaattttactgtaatttgataaataaaccaaaatttgtttcacggtaccaaacaaacagattaattatccaagtttgaaaacattggcgacataataaactagaatgatgattacttcttttagtatattacgaagaaatcttggataagagatgatctataagaggaaatgtcaaagactttgttcgtatattaacaatatgatatgaatattttggaacataaacaatgaatctttttctaaatcacatatatagctagaagtctatttcgatgtgtttagttcttttatagatggttaaatgttggacattataaattgaagatttatcacaagacgctgagaatggagatgaatcagtgtaacaatcatctagaaggtcattcaacgaaatataaaactaagatacactatgttacaaaagaaaaatatatattggccattgcactgtattaagccaataaagatgcatagtgctagaattcacaacaagttaactagtaaaagatgcatagtttctaaacagaatcagttcagagagataatctgtgtacttacgggttttaaaatgtcggatatctatttacatatggctatgttaagagtttaaaagctatacaaagattgtaatcgagtgttttggaaaaaaattaaacacaatgatgatgatagaaatatttttgttcagaaaaagttaaaatgaattgatttgcatactgactgatactttacaaatagattttttttttgtgaaaattcaattatttaaattttgagacgtataacttgaagataatagaaatgattaacaacaagtcaacttaattataactaagcatatattcagtggtagacagtgatataattttacttttaagagattagatg

SEQ ID NO: 12144 - DNA, 3000 bp, Unknown
  misc_feature (1)..( 3000): cDNA_ID_3024052_gDNA_ID_2214533_Annot_ID_185003 3000 nt of promoter + ATG
attggtgactagtttttcttatattcttttctcattaacaatatgcagtggtttgttgatatttgaataagttcataaaataacatttttaaaatttttgttaaagttaattctaaagtatttggggggtttacgtcaatcttggcatacctaccaaatgtaaatgcatcatgttgttaaaaaaaagcaaaatatgtcttaaaatgttataaagttatgcgcttgaagcaactataataaataaaaaaagtatatataatttaacaaagtcttcgagactaaaggccggtgtgagacgttttgtggcgtctataaatatacaagaggtgagagagaaagaaaaaaagaaagagtaaaacaatgggttattcatcatcctcaagaattgggttatgtttgttcctcttcttcacatttgctcttctctcttctgctcgcatcagtctttcattttcaggtactttttctccctctttttatttttctgtatactcagtttcaactatttacagttttgtataaatatgttcttggttatccaattttcacgaactaaatttattgcctcaccagaatctttatccgttatctcataagaattttttttttttttctctggttttactcaaaaaagtatcgataacatatactagttcatatcatatctttcctcacataagaaaaagtgaaaatgtttgatactacatttattggccggtgatgtggtggtgttcacatgatccgtatgtaaaacagtgtttgtcttaaaagatcagctccagaatatcaccaaaagaaaaagaaaaaaaaattaattctccaaaacactaagaaaaaaaccttaattacacaaacaaaataaaaactggtatatttatcatctttatatatttcgtagatactaatgatatatttttggagattataaatttatagaggtttactgtatatagatgtaatatataggttgtaaaagattctttgtacactaaacctctataaatttacgacctatatattacatttacatacaataaacctctataaatttataatcgtggaaactaatgtattttactaaatttgaataatttatcttgtttaataatttatagaaatgatatttgggctaaatatcaatttctgattggagaaaattattaattcaacaagatattaatttatagagtattaatttatagaagtttcactgtacatgtatgtatgtaaatgaattaagggcagcgaataacacatgaacccataaaaaaaaaaatttgctctgcaggtgaacattgttaaaaagacatttcaatttatttgcttggcttaaatatcgtttttgaaattatatgaacttgaccaattcgatttacatgccaatcgccaagtatccttacatttttacattagtgcatgtcatcgtaattattccatgcaaatgaaattgcgagtttcacttctatatatatatataatagtcagttttaaaaatccccataaaaaaagaatagtcagatttaaaaatataaaagtaaagtaaattgacaataaaatgatgaatatgtatgactgtatgagccgaggaagcctatttttgctgaaaatacttgtttaataagagttgattctttaaacaagttgcaaatatctaagttttatgtcctctgtttccagcttgtatgtatcaaatttctctctatattcaaatcaagcgaacatgaaacacgaccctcgagattgtcttccctagtccccccctttcgccgatgactttttcacacggccaaatcttatatcttattaaaacaatatgttcatattttattacgctaataaaagcctttttttttttctgatgccgacgaatccgatgagaaagtagtgtacgtcacataaaagttataaactatgaaatctggagataaaaacaatattagtattaaggcttttattagcgtaatataatatgttcacacttcaaaagcgttgacattacgacaaaagaacaaggacagatcatactacgactaattaatccaatctaatatatctttttaaactacataaattatcaaattgaaatggaacgtagtccctcgtatttgtaagaaatccaagcaaagatttcgattttaaaaacctccaaacagaagaaaaaggtcgattttgttttacccgagttcgtgtgttttacataaactttgatggacaaaacataattttttgttttgtttaatatacaaacataaattttgaatgagtgtcgacattgttcaaaaacaaattggaaacgagggtattgagagttgaggtttatcttaaatactctagttgttaataatacgatagttcttatatacaaaagttgttagtattgtttaccaattttatctagtatagtactatgtttaaatgtatataaacaaccaaatatggacatgacagaaaatgaaatgacggtggtgccagaacggtcattgatggtgagcaccaacgactacagtgaccctacagctaacggtagacatgatccaccccgtggaggcagaggacgcagacgttaagagagaggataattttcttaattttccgactcctcttgcaagcttgcaaataatctatatatatagaaaacagtaaaagtagttttaaaaacgagttatatatgtgatatcagagtgtgtgtgtgtgtaatatataatacttcatttgcatttgtgttctctacatcgacttcaacttgttattcttacctagattaatatatgtgcagtgtgctacatgtaattttatgaatatttgtttttgttaatgccggcatattccaatcgattttatatatagaaattgttgtgtattgaaaaattgttaaacatctacttttgaacctacaaaaacaaaaaaacatttgaataagaattgatattgatgtgtgtgaaagcataggtctgcaaacaaaagaaagtgacatagagcgacaaaaatacgaagaaaatg

SEQ ID NO: 12145 - DNA, 3000 bp, Unknown
  misc_feature (1)..( 3000): cDNA_ID_2708406_gDNA_ID_2214533_Annot_ID_185010 3000 nt of promoter + ATG
aatgaaaatcacatttcaatacttttttaaaaatgtattcttaaagagaagacgcaaaaagtatttaagtgtacagtgaacaaataagattttgttttagtggtgaaagagaaaaattacactatatttctaaattagttttttttctttcttttcggtttttgaggtcatttaatcagataattcgaaaatatttaaataacttatgtactaggataaaaagcaaacatttttttttggtatgaattagtagtagagaatattacgtgattagacacttttttaaaagtttgttcctaattaggcactttaaatggagaagtcactttagataaattattttacttatttaccctttaactacattttttccatcggtcatttcttctctctccttttcccatctcttctctattttttttttttctcactttatcgaagaaaaaaacatttcccagaatatcttcaattccaaatctgcaattaatctccaaatccactctacgcgatggctttcttttttctctggactaattagagaatatgaggtcttggtttctttaagattgtaatttattttgcaatttaaatatttgttttgatataaatttgagattcaattatctaagaaacatcttcttcttcaacaatggcggcttgatttgatttttgctctctctcatgtgtcaaactcgtttcatctatgtagcatcgagattccggttaatcgaatttcctgttattatggacatgatatacaaaatggatatagaacagtaaaaaggtttccgaatggatatatttaaatggactcgttattatggacaccaaaccattgtttgttgatttttctttcggtttgcagagacctctaccttcaaaaccttatggacatggaactttggtttctttacaaaacacggttaatcgaatctcctgttattattgacatggtatatagaatgaatatagataagtagaaaggtttttgaatggatatatttaaatggattcgttattatggacaccaaaacattgtttgttgatttttctttcagtttgaagagacctccacttccaagaccttatggacatggaactttggtttctttacaaaccacggttaatcgaatctcctgttatatggacatggtatatagaatgaatatgaatcagtaaaaggttttctgaatggatatatttaaatggactcgttattatggacaccaaaaaattgtttgttgatttttcttacaatttgcagagaccccacctccaataccttatggacatagaacttttaccaaattcctgagataatcgagatcaaattgtttaagaaacttctccaaaagttatggagacgtggagagagagagagagaggcgctacaaatcatggagagagagagagagagattttatttattttgggtaaggatcgtggaagaggaataacaaaaaagagaaattaagaattaaaaacataaatattgaattgagggtaaaaaagtctttaaaaaaaaagaattaatagaaaaagtgtctatttcctataaactgcctcaaacggaaaaacattctctaaaagtgcttaatagtggaacattaatcgcatgacaatataataagacgtaaaatttttggtcttatcatatgcaaatacttattaataaggaaattttggtcttataatattgcaaaaactgatttttctttgtttactattcatccctatcacaattcacaacattaacaaaaactttctaatggatttttcttcaactctagaacattgcaattccttttcaactctagaatatcaaataccgtttaaaagacaaaactatcagttaatgatgtcacaaattactcaaaaaattaacactctcttaataagaagaagacttgtattttaataataagaagacctcgtgtgaaacgagatcaattacaactttatgtattagactttttgacaaattcacaacggtcatcaaatggaaacaaacaaaacgaaggctcctcttcaggctctcaacggtcacttgcttagaagctgcgactacgacaagcaaaaatactcatccaatgaaaacgacgacgtatagaacctaacggtcgttttaaattctttaagattctatttttcatttaatttaaaaaggagaagaaaaaaaaagtgagtcatcaatgaaacacttctttaacacagatacgttacccacatgcccaattattagcattcgtttccttttagacgtgtttttgacttcatttgaaatgtctgttttaacctcacagagcaaacccaataaatcgcttacttcatcgttttagctattttagactgtgaatgaccgttttaccctccaacattctcttttgtactatctgctgtgttttattgaattttattctacgttacaaagggcctttcttcttatttgcaatactcctctttttgtttatgatagttctagtctactagacataatttgtttttattattaaattgacataaagttaccaaaaattgaatgattcttattttggttatgaaaaaatattggaataaaaaatctcatggatatatacatttttcattattaagaaaaaatgatattttcctttattttgccaacaaaaaaaaactggtcaacaagagtaggattcaagctaattttgttttcctcaaaataatatccattttgtagaaagtaaaaggacaacataaataaaggaaatgaaagttgtaagggcataaatgttatttacaaagtcaaagagactgaaaaactttgaataaagctcgataaacacggactctaattcattcaatattcattaccttcttctttcctttatatttaaaaaccttcttcttctctctctgtacatcgtcacaacaaaaaaaaaacagaaggagaagaaacaaaaacaataatctcagcaaaaacaaatctctactcatcgaaatcgaaatcaaaatatagaaacg

SEQ ID NO: 12146 - DNA, 3000 bp, Unknown; identical to SEQ ID NO: 12142
  misc_feature (1)..( 3000): cDNA_ID_2992396_gDNA_ID_2214533_Annot_ID_185001 3000 nt of promoter + ATG

SEQ ID NO: 12147 - DNA, 3000 bp, Unknown; identical to SEQ ID NO: 12141
  misc_feature (1)..( 3000): cDNA_ID_1807419_gDNA_ID_2214533_Annot_ID_184999 3000 nt of promoter + ATG

SEQ ID NO: 12148 - DNA, 3000 bp, Unknown
  misc_feature (1)..( 3000): cDNA_ID_3024052_gDNA_ID_2214533_Annot_ID_134328 3000 nt of promoter + ATG
aagaaaaagaaaaaaaaattaattctccaaaacactaagaaaaaaaccttaattacacaaacaaaataaaaactggtatatttatcatctttatatatttcgtagatactaatgatatatttttggagattataaatttatagaggtttactgtatatagatgtaatatataggttgtaaaagattctttgtacactaaacctctataaatttacgacctatatattacatttacatacaataaacctctataaatttataatcgtggaaactaatgtattttactaaatttgaataatttatcttgtttaataatttatagaaatgatatttgggctaaatatcaatttctgattggagaaaattattaattcaacaagatattaatttatagagtattaatttatagaagtttcactgtacatgtatgtatgtaaatgaattaagggcagcgaataacacatgaacccataaaaaaaaaaatttgctctgcaggtgaacattgttaaaaagacatttcaatttatttgcttggcttaaatatcgtttttgaaattatatgaacttgaccaattcgatttacatgccaatcgccaagtatccttacatttttacattagtgcatgtcatcgtaattattccatgcaaatgaaattgcgagtttcacttctatatatatatataatagtcagttttaaaaatccccataaaaaaagaatagtcagatttaaaaatataaaagtaaagtaaattgacaataaaatgatgaatatgtatgactgtatgagccgaggaagcctatttttgctgaaaatacttgtttaataagagttgattctttaaacaagttgcaaatatctaagttttatgtcctctgtttccagcttgtatgtatcaaatttctctctatattcaaatcaagcgaacatgaaacacgaccctcgagattgtcttccctagtccccccctttcgccgatgactttttcacacggccaaatcttatatcttattaaaacaatatgttcatattttattacgctaataaaagcctttttttttttctgatgccgacgaatccgatgagaaagtagtgtacgtcacataaaagttataaactatgaaatctggagataaaaacaatattagtattaaggcttttattagcgtaatataatatgttcacacttcaaaagcgttgacattacgacaaaagaacaaggacagatcatactacgactaattaatccaatctaatatatctttttaaactacataaattatcaaattgaaatggaacgtagtccctcgtatttgtaagaaatccaagcaaagatttcgattttaaaaacctccaaacagaagaaaaaggtcgattttgttttacccgagttcgtgtgttttacataaactttgatggacaaaacataattttttgttttgtttaatatacaaacataaattttgaatgagtgtcgacattgttcaaaaacaaattggaaacgagggtattgagagttgaggtttatcttaaatactctagttgttaataatacgatagttcttatatacaaaagttgttagtattgtttaccaattttatctagtatagtactatgtttaaatgtatataaacaaccaaatatggacatgacagaaaatgaaatgacggtggtgccagaacggtcattgatggtgagcaccaacgactacagtgaccctacagctaacggtagacatgatccaccccgtggaggcagaggacgcagacgttaagagagaggataattttcttaattttccgactcctcttgcaagcttgcaaataatctatatatatagaaaacagtaaaagtagttttaaaaacgagttatatatgtgatatcagagtgtgtgtgtgtgtaatatataatacttcatttgcatttgtgttctctacatcgacttcaacttgttattcttacctagattaatatatgtgcagtgtgctacatgtaattttatgaatatttgtttttgttaatgccggcatattccaatcgattttatatatagaaattgttgtgtattgaaaaattgttaaacatctacttttgaacctacaaaaacaaaaaaacatttgaataagaattgatattgatgtgtgtgaaagcataggtctgcaaacaaaagaaagtgacatagagcgacaaaaatacgaagaaaatggatttcgatacgttaagtgatgctgcattggccagaagaaacaaacacgagatcgaaagctcaaacaataacctaagcccatcaaacaagatgatagtactatctaacaaaatttgattttttgcattcattatgttagcgtgtaatcagtaattcagacataacctttgatctcctaatcatgtaatagttttatctaaccaatgaaccataataaattgggttttgatgtggaacactttctacaatgtttttagaacatttatcttagacctaattttctgaaaacaaatcatataagtttgttgtaaagtaacactcaattcatgtatatttcacatgcttaattatttcattttctaaaacatgatcctagcacatattttttgtttgaatatataattgattaatcaaactgaagagttatgtacaaatagcctaaaggtaagactttttataatgggacaaaaaagtagggttaataataataaataacatttttatgtgattggaagaaataaacaaaataaataggtcaatttgattattttttcatgaattaatttgtgtatgggccgtatttattcattaaacccaacaatcattaaacagataggcccaaatacttattaagaatcttcttcatcgagaaatattcaaatgctcccaaaagctcaggaggccaattcctaaacggaatccatcactttgactgaagaagattcttcaattcaaacacacacacaacgaagaagacgaagacgaagaagacgaagacgaagaagaagcgatg

SEQ ID NO: 12149 - DNA, 3000 bp, Unknown; identical to SEQ ID NO: 12145
  misc_feature (1)..( 3000): cDNA_ID_2708406_gDNA_ID_2214533_Annot_ID_134331 3000 nt of promoter + ATG

SEQ ID NO: 12150 - DNA, 3000 bp, Unknown
  misc_feature (1)..( 3000): cDNA_ID_2708468_gDNA_ID_2214534_Annot_ID_134335 3000 nt of promoter + ATG
aggtgagatcaaaagagatggtttttgtggagtttccggagtgatctaggttacgtgggggagaagattttgattttttcacaacggaagatctaactagaagaaaagcttctttcaaacaattttctttatataggaaaactcttgaacagtctaaactctaaagattcgacttcagttgaacagttgtgtagatcactcaattaatcaccaataaccataaagcttctccgctatctagatcttgaatctcatcaatagctcctaaacctaggattaagctaaagtatatattgtaagatagtgaaattctccttgaggagatagctttgcattgcactcaatatatacacggtttagcaacgatctttcctagattctaggtacatgagatattaacaaagtctaacaaagtcttatctaaacttgtaacaaacatatcgagacgaaatattgaatggaatattctatctcctaatatatataggtaccataaagataaggtcaacacaatgggctgaagttaaaaacataagtttaagatttcggattttaagaataataaagcccatgaaataaaatatatgatagttttcaaatccttttgtaattagaggcccaaaatgttattaatctcttcaaatctctaatatattaggtccgactcacagtcacacttaatcgagctagattcggtaaaaatagtgtgacaacgactttttcttacaaaaggatctaattaaccacataaacttctgaaatcagcaagaacgtcttctacacaagtacgaaaactatagctttttaattttgaaataaggaaaatgtaatgaaaaatgatatattgtacttttaaaagtatttctatattactatattaaagtaagaaattaatatagtaatatggtcaaatgaacctggatatatatggaaagcacttcaaggtaaggtgcgttaatgtgaaagaatccaatggatgggcaaaatcgagggaattgtatgacaagttacaacaattcattgaaaatgttcaacaataatatattaaagggcaaaccatattattttaattaaaaaaaaaaaaactgaaaatcactaataggtcaaagttgaaaactaattattatatggcccgatagtttttatcagagttaacaacttttgatcaattctattgacactcttcataattgaattacatataattaacgtacgaggttttgagctacaacttaaatgtatgtaacaaatttggtgggacttagatcaatctctctatcataatcaagaataaacaaattgcaaatatcaattagtgatataattcaactgatgtaggaaagactaagaaagtttaatttaagtttataggttctagtgttctactaatgtggtataattttacacatcctgaaatgaaaattaatatatttgaaaacatattttatattgaaatacatatttctaataaggaatagagaaattttataggcgaatttttctatgtaactaggcaattattttagttaaaaatttaaactaaaaatatttacaccaaatacatgtggttatcattcaatttttcaaataaagaaaaatttaagcgtattcaacgtcatttaattctttgttttgaaaagtaaaaaaattgcaagacgcgttgaactcgtgaatacatattatgtatatacgacaaattcattaatttgccttatttttgtcaacaattaacattttcaattagtagaactgtaatgaaaaaagttagggaatcttttaagaggagtgttctaatacaatttgacactttggaacaattttgctcttaaaaagaagtaattgcttataagactcaaactcttatgataaaaatgttgcccatatgaaaagtgatcatgccaacgtaattttgcatgaaatatcgcatacaatgacttctgatttatctttctttccctctacccttgaatatagaataaagaaaatcattacattatatattttctagatttaaaataaatgtttttttttaaaaagagcaagaagaaagacataaaaggcgtgtgggaaaaagaaaaggagtaagacaagtaaataagagaaaaacgcgtctttgaagagaacgtccccattccattaggcatgctatgcgcggccgtgaaagaagctcactcctctcctttttcttttcttcttctttaatttacaattttaaatctctaatcatatattgtcaagattcaagagatatataaactgatcaatttgagatgttacttccatttcttagtttttgatattcttagcttagttataattcgagtgtttgtctattgtttcataaaagtttataagtaggtggaacaagtcattttcaattggattctctgttaacatcaaataaaacggctttgactaattactatggattttattgagaacgacttgtaaacataaacttatctatgtcagaaaacaaaagaagattcaaacaaatataagactgagacaagaagaggtctttgatcaaacaaaaaaaacacaataagaggtgataaaagtaagagatataatttctcataatgatctcatcacaatttttatcaactctaatatatataggtctaaagacagacaattatctaagtctttctgtaatttcttaagaccactctgtcttttctctaaggaaagaccaaagagacgagaagaagacaaaacaaggcattaatagtttaaataaagcacgtaataacaacaaattattacgtaataatttaacacaaaatttatatttcttccaaatatacaccaaacacctctaaaaaaaaattcacccttttcttctttttctctatatatctaaaatcacaacacacaaaaatactcatatatacaaaaatatatacaatatacaaacatcgtatatatcaagtaacagagagaaaaatcttttttcttcctctccttgatcggagggtcgccgtgttgaaaaggatg

SEQ ID NO: 12151 - DNA, 3000 bp, Unknown
  misc_feature (1)..( 3000): cDNA_ID_2711567_gDNA_ID_2214534_Annot_ID_134339 3000 nt of promoter + ATG
gataaaactcgatgttaccaaaagtatacactatctaattcacaaccaaaaaaaaaaaaaaaatcgttcacccttatataaagcttctgttgaataagcagagtggaaaaaagcaaaatcaaacaaacatacaaaaaaaaaacatttctttttataactcttctctagtcttctccaaatggaatggactagaggaagaatcctaggccgaggctctacagccaccgtatacgccgccgcaggtcacaattcagatgaaatcctcgccgttaaatcatctgaggttcaccgctcagagttcttgcaaagagaagccaagattctctcgtcgttaagttctccttacgtgatcggatacagaggatcagaaaccaagagagagtcaaacggtgtcgttatgtataatcttttgatggagtacgcaccgtatggaacgttgaccgatgcggcggcgaaagacgggggaagagtcgacgagactcgggtagtgaagtacacgcgcgatatactaaaaggattggagtatatacactcgaaaggaatcgtgcattgtgatgtaaagggtagtaacgtggttatttcggagaaaggcgaggccaagattgcggattttggttgtgcgaaacgggttgacccggtgttcgagtcgccggttatgggaacgccggcttttatggctccagaggtggcgcgtggagagaaacaggggaaggagagtgatatatgggcggttggttgtacgatgatagagatggttacgggttctccaccgtggacgaaggcagattcgagggaggatccggtttcggttctttatcgggtcgggtattcgagtgaaactccggagcttccttgtttgcttgcggaagaagcaaaagattttttggaaaagtgtttgaagagggaagcaaatgaaagatggacagcgacacaactcctaaaccatccttttttgacaactaaaccagacattgaaccagttctggttcccggtttgatttcaaactcaccgacaagtgtgacagatcaaacgttttggagatcagtagaggaagaggaagaagaagaaacagaggaaatacagaaggattcgagagatcttgatcgtttaagcttgtggggttgttactcggagaggatcggacggctgaagtgtgttggtggtttggatgggaccagatgtgatatggagggtggggattggattatggtgagagcgaggtgtgaaggaacaatgattagtgggtcacaaaaggaattgattattagtgaaaatgtattggtgggggaattgtaaatttgatttggggtcattttgggtgaattgtagaaagtttaggggttgaaattagtgaagatctccaatttaggggagatcaatgtagctttattagtctccgaatcttcgattgatcacatgtatattattataatcacgatatttataaaccaaacccaattttttaagcttggacaagagtcgaatacttgaattatatggagtttcaacgtttgttggcctgttatagagaaaatagttgaactattacattcgaatcttagtattccatgtttttcactgtttctgttttgactaacgatagtcttggaaataatatagataaatcataacttttctaatgtcccaaatgtcaaattttctcaatcatataacaaataaatgaacttgttaaatcaaatttggcatatatttgagagttatgggtgatatgatatcaaaatatgttagaaaatagggcatggtaccaaatctaaacttgtggggaaaatgagaagtggagtaaacaaagtatttaagtgccaaatcggccgaattgggtcgttggttttggttgggcactttgtgtttttgacaaaacctaaagattcctttcgaatcataaaagatgatccgtgtaatatattcatttgtgtaatttggtagcttcgttaggccaatgtgacgattcatcaagtctttgcttccacttattaaatgtgtaaaaagttgacacacctcacataattagttaatcactattggatcttctcttcagaatgatttattttcatctatattttttgttgtcaaatatgcatttagaattgtatttcaacttcattatagttctatatattgatcagtcatatatttgattttgtattatacccattttctcaaacacaacaatagatttcacataattgttgtaacttgtcttaagtttcattttagaaacttccgatcgttaaaaacattataactacaacaacaatcttagtgaagataaggttaagtaatgggaaataatagatgaagataagaatactttgcttgcaagataagttcatgtttggagagttatcttttttacttagaaggtgaataacgaatcttttgttttatggttttgactcgtgttttggataaagttgtaaccataaatagtatgggcacttactacacgaatgcttaacttcaaagacgattatatgtcctgtgtatatttatctctttggaaattgaagagtaaattaactcatgtatacgtgcctaatctaactttgggatcgatcttgtatattaagtttttgagggttcaaaaaatattaaaaatcaatataactggcttggtacgattttaatttagattgatatcacaatatatctttagtttcaaattatttattttgttcattttttatttcgtacatcacctggttcgtataagagttatacaataaataaatgatcagattcagatgtgtattttaaaactatccttagaaattaattacaaaacatttttaaaaaaaagatcaaaaatcaaattagataataaatagagtaacgaattttgtggcgcaaaaaggattgtattacaaaactattaactaccacaaaccccaaaaatcttattcccttgttaaatctctctatattgggaagtgataaagaggcaacaatgcgagagacttagtccgccacactcgataatg

SEQ ID NO: 12152 - DNA, 3000 bp, Unknown
  misc_feature (1)..( 3000): cDNA_ID_2708443_gDNA_ID_2214534_Annot_ID_185036 3000 nt of promoter + ATG
aacctctcgaatgtattccgatactcgtgtttaaatcttccgccactgaatcatataaccagccgatctgcataactttcaatattatagaatttttcgaaacaatataatattatttggttaaactgaaaagtgaattatacggtgtttccccagctggtttggtactcgtactgacaatgtcccacttctcgagccgcttctatggagtttgtaagtatattttgtggatttggatttctttgtattgcatcaaccactgatttcatcatctctttagaattaccaaatcttctcgctaaactatccttaaccaaaaactccccttgatagcaacagcaagggtcaataaaaaaatgttttaaataacgctttgaagatttttatgaaagacttacttgtagcaactgaagaaagacttccatcaacttcgaaatcgtctggagataaaccatacataactcttctcgtgtggacgcatcctgatcctatatatatcggtccttggattcccgcgattcctcgtcccaaatgctaaatttagcaaagaaaacgacatatcataaataacaatgtattgattagaattatagataaacaaaatttaaaagaagaaatcacactgattgtaggacgactattagctcggtgcttgaatcatagaattcttgacggaattgaacaaaagcacaatgtttcatatttaatgattcttgcagaagtatacacattgcttgtcggactacatctgcatcattggcatacatgtcgcaatccacgttcaagatgtatggtgcgtttgtcatcaaccctgacactcttgcctgttcaaattcatcatatcatatgcttatcacattttcggtacaacaaaaaaaaaaaatacactatataagatgtgaaacttcagaaaaaaataagaagaaaaagagagagatgtgtaagaaaattcattaaccagaaagttcatggctccacatttttgattatgaacataatttggtcttttctctcttgatatgtatatgatatgagggatctctttctcgtctcctacacctcccttgttctcccataccaccttcacatatatacacataaaacaattaacgtgtgcgtatataactatagttagaaacttgattgtttttacttaaggaattttttttaaataccttaactagagttgaatgatcatttggttttgtgtttgagaatgcttcaaaatcatcttctacatccaacatatgagaatctccggtggcatcttccactttccgcctcaacttctcgtactccctctttgtatttacacaaaaagaaaacatcaagaaatttctcaatacataagatgaaagactaagaacaaatcttcagatcatgtgcaactttattaggtatctcaattgtttcaaaacaagaatttaatctgtaaataagcacaataatattatttgtaaacataaaaatgtcatacacctaaaaaataatcaaaccctttttaccttcgtcttttcccagtctctattgaattcataatcctctgttgcgacgcttataggtttcagaaaatatctagaaggagctctaactctagtgttgtactttttgcagaacggtacccaaatcttggcgaacttagaagcttccttgagagagaaataagtgagaggtgagcatccatcgtccgacacataacaagctagtttatttgccggataatttacagctaacagcgaaagcacggtgtccacaaccataatcggtggctctcgaaccggatctgctgtgggcacgaacatatccaccgaaggaaggtcatgaaccctgaaattacaatattttatatgccaggttaatgaattacgtaaaagataacatagaaatgaatattatcttgatgattaaactaaggctaggtagcaaactagctcagactttatacaaagttaataacaataatgattgtatatatgctaaaaataatatttgtatatatgatttatgtgtaaaacgaaaatgatacctttcatcaagtctatcaggaaagggtttagtatcagcaggactccattttaggcaagtaataagcagacataccaagaagaaacaagattcacaaaagaaagccacgagccaaacgttgtcgtattcgctcgtatgtcggattcggtgcaagagaagagaaaagaaaaggcctagaaccgtgagatatacagctcttagaaaatagttcgtgtatgagatcctttcacaaagaggaggaagagaaaagcttgaatccgccatgggaggagctttcttgcagtttttggatatgttttcgaacttcacatcgatgaatgcttcatgcttgtatataaatacgcatgtgggaaactcctaattaatgtgctaagagttaatgatgattccctataagcagggaagcttcaccttcgtgaagatcacgagaacaagaaacctaaaaagtcaaagtcttacttgtttcttgtggaagaagtaacgtaagacattgatgttcatgttttaaagcaatgaaattagttacacgcatttatttgataattaataataattttaaagtaatttatatcattcttattatattatcaagtagtgatttagcttgattataaattccaataagtgaaagcagaaattgtctgtctatctaggattttaatttaatcagtttatcattataatgaatcatgtatgaaataaaacctgatgacgttattttctctttaacacattgatgggctgatattgggccttaaactgtctcatcttattcgaaacccaacccacattagggtctctgataaaccacccaatctcccccatctgtgctttttttccccaatcttcataagtcataagaaaaatctcagcaattgtcaaaattttccagcaatcgagagagcagcacaagagagcatagaaggaccgattggggattagttagcgtgaaaggagatcctagtagcagctatg

SEQ ID NO: 12153 - DNA, 3000 bp, Unknown
  misc_feature (1)..( 3000): cDNA_ID_3024096_gDNA_ID_2214534_Annot_ID_185035 3000 nt of promoter + ATG
tatgttttcgaacttcacatcgatgaatgcttcatgcttgtatataaatacgcatgtgggaaactcctaattaatgtgctaagagttaatgatgattccctataagcagggaagcttcaccttcgtgaagatcacgagaacaagaaacctaaaaagtcaaagtcttacttgtttcttgtggaagaagtaacgtaagacattgatgttcatgttttaaagcaatgaaattagttacacgcatttatttgataattaataataattttaaagtaatttatatcattcttattatattatcaagtagtgatttagcttgattataaattccaataagtgaaagcagaaattgtctgtctatctaggattttaatttaatcagtttatcattataatgaatcatgtatgaaataaaacctgatgacgttattttctctttaacacattgatgggctgatattgggccttaaactgtctcatcttattcgaaacccaacccacattagggtctctgataaaccacccaatctcccccatctgtgctttttttccccaatcttcataagtcataagaaaaatctcagcaattgtcaaaattttccagcaatcgagagagcagcacaagagagcatagaaggaccgattggggattagttagcgtgaaaggagatcctagtagcagctatggatagagaatggggttccaagcctggtagtggcggcgccgcctccggccaaaacgaggccatagatcgccgtgagcgtctccgtcgtcttgctcttgaaaccatagaccttgctaaagatccgtatttcatgcgaaatcatcttggaaggtatgttactgtatttatgtatgctttgttgcacgagtaagtagcagattcaattgttggatgatcaacctgagatttatgaatactgtgattttaccaacttcatctacatttttgctccgttttgagtttgattattcatatgtgtgatagctcttgagtttgtttggctgttgtttctagaattaggttcttttttttaattttcccctcatgccactaatttgatttttggtgtgtttttatgttgtgcagctatgagtgtaaactatgtctaacactgcataacaatgaaggaaactacttggcacatactcaaggtaagaggcatcagacaaacttggcaaagagagctgctcgagaggctaaggatgctcctactaagccgcagccactcaagcgcaatgtctcagttcgcagaacaggtaataagttgttttattttctataattataatacagctttattcccattgttgatatcaaatctgcctaggcctggaattggatataatgggaaagtgattgtctagaagtaatagcaaaattgtatatctttgctattgagtacatagattttacttaattgattgctttaaagggtttattaataactccattttatgtatggtcttgcagttaaaattggtagaccagggtaccgggttacaaaacagtatgatcccgagctgcaacaaagatctcttctgttccaggtaagcatctaattgttattgttgaacttcaatgatcatcattagagacttagccagagtaaaatctcactgtgtctgtttactcctcaaacaatgttttacagattgaatatcctgagatagaggacaacataaagccaagacatcgtttcatgtcatcttatgagcaggtgagtgttacaactccttgtctatgtatctcataaactctttcttttccttcatactgaatagttttcttcctttttttttgtgtgcagaaagttcaaccttatgacaagagctatcaataccttctatttgcagccgaaccatatgaaatcatagctttcaaggtatgtgttttttttttcttttattcgtgacatttacattctacaagtcatctgggattatagctctagtagcccaacatatcttggtcgaattgtttactgatattgatggttgtgttttcgcattggtttcaggttcctagcacagaggttgataaatcaaccccaaagtttttctctcactgggatccagactccaagatgtttacagtaagtgcttctcatcataattctcataaagccataagcttagtttcttttccgagattggataagttttgtgtttggattaatcaaaatactgacaaagaatgtaataaaacagctgcaggtgtatttcaagcctaccaagccagaaccaaacaagcctcagtcagctgttggagcaaatggtcttccaccgccaccaccacccccgcctcatcaagctcaaccgccaccaccacctccatctggtttattcccaccgccaccacctccaatggctaacaatggttttaggcccatgccaccagctggaggtttcggacatcctaacatgtgaaagagaatccagcgaagcagtttaaaaacacagtactctgatcatggtttactaagagagacttgctctttgactgaaaaacaaatctgttttgacatggattctcaaagctgtgatctctacggatgtattagctctctagataccttctttgagtttcttctatctgcttctcgtatgtaccattttgacaagattgttttccgttaatagtacaattagcgttggcgaaacaaaattcatttgttatatatcggttaactcttaaccaagtcttaacccaatctatcagtcctatgaccggccatggatatttcatatttaaattatttctaacgatgatcaaagtggagtataccacgtcactcacctttcgacgggggtaatcatgtatttacacattctcatcagtgtctctgaaattcaaaagggtaaagaagagggaaaatcaaaatattaaaatccctaattcccaaattattttgaattttctcggatccacaaagctccggtgaacccaacaaacgcattttctctcattgagtttatacaagcggagaagttctgtcatg

SEQ ID NO: 12154 - DNA, 3000 bp, Unknown
  misc_feature (1)..( 3000): cDNA_ID_3024106_gDNA_ID_2214534_Annot_ID_185031 3000 nt of promoter + ATG
ctgcaaaaatcaatggattcaaaccattgtgcttttgttcaataccctcaagatttctatgattctaatgtcggtgaactcaccgtcttacaattagtaagatttatctctttactttttctttggtttatttctaatgttaatataataaatttcagtcagctcgatgatttatatttgttataccaatccgtacttaatcttagttccttttatttattaaaaaattaactagtacttgggacgaggaattgcgggaatccaaggacctcagtatgcgggttcaggatgcttccatactagaagagttatgtacggtctttctctagacgatttaggagacgatggaagtctttcttcaattgctacaagtaagtacaaccaacaaagacataaaaaaaccaatcttttagcatgcaaaattctgatgttttcattaattatactaacatttttgttattccatcgttctactattcacatgtcaaatcattcacggttctcgttgtaatttcattaagggaagtatttagctgaggagagtctaacgagagaatttgggaattctaaggagatggtgaaatcggtggtcgatgcgttacaaagaaaaccatttccccaaaaaaaccttaaggactctctagaaacggctcaagaaatgggacattgtcactacgagtaccaaaccagctggggaaaaaacgtaattctcttctcaaatgaatcactatagtattttagacaatattaatgtgttttcttatatataaatcatgtagatcggttggttatacgattcaacaacggaagatgtgaacacgagtatcggaattcattcgagagggtggactagctcatatatttttccggatccaccggcgtttcttgggtgtatgccacaaggaggaccggaggtaatggttcagcagcgacgatgggccacgggactgctcgaaatccttttcaacaaacaaagtccgttgatcggaatgttttgtcggaaaataagatttcgacaaagcttggcttatttatacgttttcagttggggtctaagatcaatccctgagctcttttactgtctcctgcctgcttattgcctactccacaactctgctttatttcccaaggtgaccctctttctcctttgttatgatactaagacaacaaaacaagaaccactagattacatgtctctcggtctctctttaactatatcataagccttattaatatttatctacttattttatagaatttctttaggggaaaagtctaatgtttttcttttgttttttgctctagggagtttacttaggtataatcatcacacttgtggggatacattgtctttacactttatgggaattcatgaaccttggtttttccatacaatcgtggtatgtcactcaatcatttgggaggataaaaacaacttgtagttggttatttagcgtccttgatgtcatactcaagcttcttggaatatcgaaaaccgtcttcatagtcactaaaaagactatgcctgagaccaagtcagggtctggatccaaaaaatctcaacgagaagttgattgtccaaaccaagattccggtaaatttgaatttgatggctcgctttatttcttgccgggcacattcattgtgttagtgaatctagccgctctagccggttgtttggtgggtctacaaagtcgcggaggaggtggttcgggtttggcagaagcctgtggctgtattttggtggttattttgttccttccatttctaaagggtatgtttgagaagggaaaatatggtatcccattttctactctttctaaagctgcctttttagcagcgttatttgttgttttatctgtgggaaactagtatagtgtggtaaggttttgttatgcacctatcgttaagtgtatcatgacattttctctattgataatgctatttatgcaatttgttttattgatcgtacgtaaaactaactaatgtgaaaccattcaaagcgttgaattacaaatgaacgttattctgacatacagcgatctagaattggcaagctagttttgtatgtggtatatatcaacacaagtatcacaacgaaagaagatgaaactaataaatgttttcttggttatttttttgttgttgttgattagagtcattttaatcaattgaacaaaatgaaatacatcaaaacttttgttaaccatatataattagatcattcagccattccagtgattcgataaatctttctctcgtaaagtctgtttgtaaatatggattatctactatggaaggtccttaaaagagaagaatatgaattttctgaattatctactcatctgaattttcttttggctagttttgtgtatttctaacaatatgtatacaccattttgtcaacaaatttatggattttactagttagtactttaaaatatattttttcgcatttgttcaatagtacaacaattaaaaaaaattgccgattgaaatattaaaaatactaaaaatagtaaatattgcttactcacaattacatagaaaaccacaatatatattaccaggtctaaaagtgtcataattatagattaagaaattatagctcactgtaatataattctcaattaacatcttacacttgtctgtggataagataacttcatacaaattaagctttttctctggtcagaatacagatttagatttctaacacaaaaataatatttaattaaaatccaacaaataaataaataaattaatttttctttctttggaagtattattactttttcacattgacaattaatactatcttttctttatatttaacttaacaaataaggtctacatagggtactttcgtctaatcacaattttaaagccatgcgtgcattgccttagtctatataacttattctcccactcatcgactgccacaacactcgtaaagaatctgcgacagagattttctccgaccaatccatgtcggaaaac

SEQ ID NO: 12155 - DNA, 3000 bp, Unknown
  misc_feature (1)..( 3000): cDNA_ID_3024110_gDNA_ID_2214534_Annot_ID_185030 3000 nt of promoter + ATG
acgtaataggttgttttctttatgttaaatttagtatttgggacgaggaattgcgggaatccaaggacctacatatgcaggttcaggatgcttccacactagaagagttatgtacggtctatcaatagatgatttagaagatgatggaagtctttcttcacttgcaacaagtaagtactacaggcgaaaacaaaaatgcatatatcattaaaccaatattttagtattgaaaattctatttctcttttttttttttcaatttattctaacacttaaatctatgttctgttattcttctaacatgcaatgtatagtacttttgtgattcatcgttatataatacgttcagtaattttattattcaaataaatcattttaatggtattgttgttatttcattaagggaagtatttggctgaagagaatttagctagagaatttgggaactctaacgagatggtgacatcggtggtcgaggcattacaaagaaaaccaaatccgcaaaatacccttgcaaactccctcgaagcggctcaagaagtgggacattgtcattttgagtaccaaactagctggggcaaaactgtaattagatttaaactatatcacagtagactattaatctaaactcaaattttcttcttattcatagtaatgtcatttgtaatgcataaaatcctgcagattggttggttatacgaatcaacagcggaagatgcaaacacgagtatcggaatccattcgagagggtggactagctcatatatatctccgaaaccaccagcgtttcttggggctatgccaccgggaggtccggaagcgatgctccagcagcggcgatgggccacaggactgctcgaagtccttttcaacaaacaaagtccgttgatcggaatgttttgtaggaaaataagatttcgacaaagcttggcttatttatacattttcacttggggtctaaggtcaatccctgagcttatttattgtctcttgcctgcttattgcctactccacaacgctgccttatttcccaaggtgactctctcttagttctttctgtctcttcaacttcaacaaattaccgaaactcaatttggattatgacatggtgactgaactagcacaaccactaaattcttaatttgtatcattttctcattagtatagtttctatttatttcatataattgattaaaagggaaatgtctaatgttttattttgtttgtggctctagggagtttatttaggtatagtcgtcacacttgtgggaatgcattgtctttactctctatgggaatttatgagccttggtttctcagtacaatcgtggtttgcctcccaatcattttggaggataaaaaccacttgcagttggttatttagcatccctgatatcatactcaagctacttggaatctcgaaaactgttttcatagtcactaaaaagactatgcccaagacaatgtcaggatctggatccgaaaaatctcaacgagaagttgattgtccaaaccaagattccggtaaatttgaatttgatggctcgctttatttcttgcctggcacatttatccttttagtgaatctagccgctctagccggttgttcggtgggtctacaacgtcacagaggaggtggttcgggtttagcagaagcttgtggatgtattttggtggttatattgtttcttccatttctaaagggtatgtttgagaagggaaaatatggtatcccatggtctactctttctaaagctgcctttttagcagttttatttgttgttttctctgtgggaaactagtatactgatatggctttaatttgtagctaaaaactgctaatatgaaaataattattctctaatatacctctggctaaattttagtttctttgatacaaaataaatctaggactataaattcgtaaatagttgatgtacattctgaagtagtgagtagcgtattacttccaaaacaactgcatcgcctcttctacggctttgtctcgttctcacaattattagcttatatccatataagacactatttatttgactgatcaaaaaaaaaatacactatttatctttgtgggttttaaaactatgacaggacctgattgattttgtttttgtaagattcgtggtttttcgatttcatgaaaatgactcaatgatttcatcctttctacttttggggtttgaagtcaactgtttatgtggacgttatttttttgaaaatttaagagataaaatagggcatacgaagccaatatctagataagtgatttaggaacaaaaaccaataacaaaatgaagaaacattacttgacttcattttgtgtgtgacgagtggcgactagtcatcattcaccacaaagcgcaaacttgaatcaggagtaagaagacatactttatcgttatcctaatttgaatcggaccacacaataacccaccacaaatagacaaagatacatatattattgacaatcttttattatataagataacgttctatataattgaattgttttattaataacgaaaaaaaaacgacttcgatatgagtaattaattcgttgaaaaaagtttcttcgggtctagtttttttaaacttctaatatgatattaaaaaccaacatgatagctttcacttgatggtaacttaggatcagtatagtggtggtatctatctacaagtttaattccagtttacgtgaagttcataaattttattggtcatatcaatgtgtacaataaatatacgttttataaataaataatatttgcattttttattcatgtatctaaataacaaactagtccaatttcacttgactatgacctctttgttcttttttttgttaatagttttcacaaaaaaagcttactcaattttatatcttctcatcactcctttttattataagtgtatacaaattatatatatattttttacttaattcttagaaacatatccaaaaacctcaagaaatctccttcc

SEQ ID NO: 12156 - DNA, 3000 bp, Unknown
  misc_feature (1)..( 3000): cDNA_ID_3024114_gDNA_ID_2214534_Annot_ID_185029 3000 nt of promoter + ATG
atgcacattccagtgacaccaacctgtcacaacaattataattcatctgcattttcctcaagaattttatgcgaactgaaagaactttgtttaagtttagcaccttttttgagccattggattttagccaattaacagaagcgcggatatctttgatagcacctggccaatcaaggccatccattagatgctgtgcctctgcagtatccaaaccaacctttcctcgatacaagctacaaaatataatattgtgagacgatactcaatgaaccataatttacaaaactgaatcttgcagttaaagaagcactcactcaggtataagggctttgaatccaggctcaagttgtgagattttaatagcatggttcttgatctcaaagtcaacaccccaccattcttgaatcaccacaatcccaggcgcatcatctttaccgaccacataggcatcaaatgtctaaccaacagaccacagtgtataagttttctttagagtaaaatcaagattatagaagaatcatacacaaaaaaatagctaaatcaaatgcatttttcacaatcctaataatcaagaaactccaatgttcaagagaaaccagtctatccatggagagagttacaagcaaagcataacatcgccgaaaactctgaccaaaacaatacctaaactgtttatcactatactgatcatttgtgaactgaaacctaaactcacaatcttccttcttaaatcaaccagttctataaccaaacctgataaggactatgattatacggagatcttcagaagtagctaagcaataataacatctcttactctcattcccagtttctctaccacagaacaacactacacaatcctgaagcagaaacgccattgaaatgataaatcaaatataatccatacatcatacacaacagattccgagatttgggggatatcaaaagaaatgatgattttcattcaacggaaaggataaccaaaatttttttttacttcaaaatcaggcactacggatacagtcgaagcttatgatacaccaaacacaaccataaaaatggcactaagtagaaaaaaaactcagggagagacaaaaaagagaagctcttacagtgtcatctctttggatctgaattttcctgaaagctgaatccgccattgatcgcactgataagcgagaaaacgaaggaatcgaggatctatagagcgaagaagtttttccgattgaagaagagaagaatctggatgaggatgacactagtgtacttaacattgtttttgtgtcttgtgaggaaagaaattcttcagagtcaaccccaaacgacacaaaaacgacgacgtatctgtgagtgtgaatctgggcccggtatatttttaaaaatatatgggccattaggcccaaataatcaagtccttttttgtatttgtatttgtatttgcgacgacgataatacgtaaatagtagtttggtaatatccaaaaagccagcatcgcctctgctacggcgttgtctcttttctcccaattattagcttatatcaatataagaaattattttttttgtggattttgtaaccatgacaggaccagcttgattttgtttttgtaagattcgtggtttctcgatttcatgaaaatgactcaatgatttcgtcctttctatagtattttgggttttaaagtcaactagttgacttcaaaacccaaacttaacgtccatatatatacacatacacagtactgtattatgtgtatatatatggacgttaagtttttgaaaataagagatatatagggcttacgaagccaatatctagataagtgatatcggaacaaaaatcaatcacaaaatatctaccaagagatgtcatatgtgatacgtattaactttatatacatatgattagttccatgaatttgaatttaaaaggtatagtgcatgtatcaaagggcatatatagccacatctcaattgggataaatgaaagagttcatcacgtttcttttcaattcccaaaatggcgatgcgaggaaataaaggcaagttattgatttcgctttctataataattttaaatttttgttgtataacaatgataaagaaacgttcttcaacaacaacaaaaaaatgttacgtacgtgactttaatttgcgtgacgactactcatcattcaccacaagagcaaacggaataaaaagacaaactttatcgttatcctaatttgaaccaaaccacaaaatagccaccacaaatagacaaagatatacatacagcgagacacatcatgcaaaaatgtatatatgtagcttagtggatcattaataatgtttagagaaacgatcgaatttaatgagacttattttcgttgaaaaagttttgatagggtgtaacttaatatatagtatcagtctagtgctaaacatctataagttcaaattccaatttctgtgtatattttggcctccattctacaaatctatatttatttaccacaatgtataatctagacatacaatacgttttacaaaaaaataatatgtagtacatacaccatttgtgaagtcatgtatctatttgacaaactagtccaatggaatttgactatgactaatttattattgtcctttctcttgtgtatctttttttttcttcctaactaaacactactacacattatgggttgattggtatccaataccgctgtagtatggagtatattgctttgataataatcaatcaaaggatgctactaaaaacgatattttaagttttatgatttttttttctttcgtaccgctactttatatcgtttttaaactatttttgtatctcttaccgttttttctacttgctaaaaaacttatacgattttgtgtggccaatcggtcctatattttatatatacaagcattcatagacgtgacgacgcattattttacttaaccctatataaacatatccaaaaaccgcaagaaagctcacaagaaatctcctccc

SEQ ID NO: 12157 - DNA, 3000 bp, Unknown
  misc_feature (1)..( 3000): cDNA_ID_2708446_gDNA_ID_2214534_Annot_ID_185028 3000 nt of promoter + ATG
aattcctaataattaatacgaaaatttggaacaattaatatcaaaagctaagaacaaattttgatcttcgtcccaattgttttaaacgcaaaaatctgattgtgctaattaattgattttgtttttctttatctttctataaatcacagcattgtcataatgttttaaagaacacaaattcgaaacatcaacgatttcttctactttaccttctacaatttacaaataatgtttgattgaaaataaattatgtgttcttcttgaaagtaaacgaaatcatttaatttgtaaacacaattgcaaaattaaactcatacgccgaaaaaacaattaaaccctttaatttaccttggttatttcccagtctttactgaattcagaactttctgttgcggctggagggttcaaaaaatatctaaaaggagctctaactttaatgttatattttttgcagaagggaacccaaatcttggcgaacttagaagcttccttgagagagaagtaagtgagaggtgagcatccatcatccgatacataacaagcaagtttattcgctggataattcactgctaacagcgaaagcaacgtgtttgctacaagaatcggcggctcccgaacaggatccgcagtagtcacaaacatatctaccgatggaaggtcatgaaccctgaaattatttaattactaagagtcttatattttcaaatttttactagctagtccactaaaatagaaagataacagaaaaaaatgaatgatatttcgtgaggaaaaaaaaacttaagagttaggtttcagctagctaggacttaggttttatacaaaattaaaagaacatatgcttttaatatgcatgattgtatatataattgtaagtgtaatataaattgatacctttcatcaagtctttcaggatatgatttatatgaagcaggactccattttatgctggtaataagaagccatatgaaagagaaaaaggattcacagaggaaagccacaacccaaacggagttgttttggttcataagtagaattcggtacaagagaagagaaaagagaaagcctagaatcgtgagatccacaactcttagaaaatagtttttgtatgagatcttctcgcaaagaggagggagagaagaacttgaatctgccatgggaggagatttcttgtgagctttcttgcggtttttggatatgtttatatagggttaagtaaaataatgcgtcgtcacgtctatgaatgcttgtatatataaaatataggaccgattggccacacaaaatcgtataagttttttagcaagtagaaaaaacggtaagagatacaaaaatagtttaaaaacgatataaagtagcggtacgaaagaaaaaaaaatcataaaacttaaaatatcgtttttagtagcatcctttgattgattattatcaaagcaatatactccatactacagcggtattggataccaatcaacccataatgtgtagtagtgtttagttaggaagaaaaaaaaagatacacaagagaaaggacaataataaattagtcatagtcaaattccattggactagtttgtcaaatagatacatgacttcacaaatggtgtatgtactacatattatttttttgtaaaacgtattgtatgtctagattatacattgtggtaaataaatatagatttgtagaatggaggccaaaatatacacagaaattggaatttgaacttatagatgtttagcactagactgatactatatattaagttacaccctatcaaaactttttcaacgaaaataagtctcattaaattcgatcgtttctctaaacattattaatgatccactaagctacatatatacatttttgcatgatgtgtctcgctgtatgtatatctttgtctatttgtggtggctattttgtggtttggttcaaattaggataacgataaagtttgtctttttattccgtttgctcttgtggtgaatgatgagtagtcgtcacgcaaattaaagtcacgtacgtaacatttttttgttgttgttgaagaacgtttctttatcattgttatacaacaaaaatttaaaattattatagaaagcgaaatcaataacttgcctttatttcctcgcatcgccattttgggaattgaaaagaaacgtgatgaactctttcatttatcccaattgagatgtggctatatatgccctttgatacatgcactataccttttaaattcaaattcatggaactaatcatatgtatataaagttaatacgtatcacatatgacatctcttggtagatattttgtgattgatttttgttccgatatcacttatctagatattggcttcgtaagccctatatatctcttattttcaaaaacttaacgtccatatatatacacataatacagtactgtgtatgtgtatatatatggacgttaagtttgggttttgaagtcaactagttgactttaaaacccaaaatactatagaaaggacgaaatcattgagtcattttcatgaaatcgagaaaccacgaatcttacaaaaacaaaatcaagctggtcctgtcatggttacaaaatccacaaaaaaaataatttcttatattgatataagctaataattgggagaaaagagacaacgccgtagcagaggcgatgctggctttttggatattaccaaactactatttacgtattatcgtcgtcgcaaatacaaatacaaatacaaaaaaggacttgattatttgggcctaatggcccatatatttttaaaaatataccgggcccagattcacactcacagatacgtcgtcgtttttgtgtcgtttggggttgactctgaagaatttctttcctcacaagacacaaaaacaatgttaagtacactagtgtcatcctcatccagattcttctcttcttcaatcggaaaaacttcttcgctctatagatcctcgattccttcgttttctcgcttatcagtgcgatcaatg

SEQ ID NO: 12158 - DNA, 3000 bp, Unknown; identical to SEQ ID NO: 12151
  misc_feature (1)..( 3000): cDNA_ID_3024118_gDNA_ID_2214534_Annot_ID_185026 3000 nt of promoter + ATG

SEQ ID NO: 12159 - DNA, 3000 bp, Unknown; identical to SEQ ID NO: 12150
  misc_feature (1)..( 3000): cDNA_ID_2708468_gDNA_ID_2214534_Annot_ID_185022 3000 nt of promoter + ATG

SEQ ID NO: 12160 - DNA, 3000 bp, Unknown; identical to SEQ ID NO: 12157
  misc_feature (1)..( 3000): cDNA_ID_2708446_gDNA_ID_2214534_Annot_ID_134341 3000 nt of promoter + ATG

SEQ ID NO: 12161 - DNA, 3000 bp, Unknown
  misc_feature (1)..( 3000): cDNA_ID_2708458_gDNA_ID_2214534_Annot_ID_134342 3000 nt of promoter + ATG
aattaacagaagcgcggatatctttgatagcacctggccaatcaaggccatccattagatgctgtgcctctgcagtatccaaaccaacctttcctcgatacaagctacaaaatataatattgtgagacgatactcaatgaaccataatttacaaaactgaatcttgcagttaaagaagcactcactcaggtataagggctttgaatccaggctcaagttgtgagattttaatagcatggttcttgatctcaaagtcaacaccccaccattcttgaatcaccacaatcccaggcgcatcatctttaccgaccacataggcatcaaatgtctaaccaacagaccacagtgtataagttttctttagagtaaaatcaagattatagaagaatcatacacaaaaaaatagctaaatcaaatgcatttttcacaatcctaataatcaagaaactccaatgttcaagagaaaccagtctatccatggagagagttacaagcaaagcataacatcgccgaaaactctgaccaaaacaatacctaaactgtttatcactatactgatcatttgtgaactgaaacctaaactcacaatcttccttcttaaatcaaccagttctataaccaaacctgataaggactatgattatacggagatcttcagaagtagctaagcaataataacatctcttactctcattcccagtttctctaccacagaacaacactacacaatcctgaagcagaaacgccattgaaatgataaatcaaatataatccatacatcatacacaacagattccgagatttgggggatatcaaaagaaatgatgattttcattcaacggaaaggataaccaaaatttttttttacttcaaaatcaggcactacggatacagtcgaagcttatgatacaccaaacacaaccataaaaatggcactaagtagaaaaaaaactcagggagagacaaaaaagagaagctcttacagtgtcatctctttggatctgaattttcctgaaagctgaatccgccattgatcgcactgataagcgagaaaacgaaggaatcgaggatctatagagcgaagaagtttttccgattgaagaagagaagaatctggatgaggatgacactagtgtacttaacattgtttttgtgtcttgtgaggaaagaaattcttcagagtcaaccccaaacgacacaaaaacgacgacgtatctgtgagtgtgaatctgggcccggtatatttttaaaaatatatgggccattaggcccaaataatcaagtccttttttgtatttgtatttgtatttgcgacgacgataatacgtaaatagtagtttggtaatatccaaaaagccagcatcgcctctgctacggcgttgtctcttttctcccaattattagcttatatcaatataagaaattattttttttgtggattttgtaaccatgacaggaccagcttgattttgtttttgtaagattcgtggtttctcgatttcatgaaaatgactcaatgatttcgtcctttctatagtattttgggttttaaagtcaactagttgacttcaaaacccaaacttaacgtccatatatatacacatacacagtactgtattatgtgtatatatatggacgttaagtttttgaaaataagagatatatagggcttacgaagccaatatctagataagtgatatcggaacaaaaatcaatcacaaaatatctaccaagagatgtcatatgtgatacgtattaactttatatacatatgattagttccatgaatttgaatttaaaaggtatagtgcatgtatcaaagggcatatatagccacatctcaattgggataaatgaaagagttcatcacgtttcttttcaattcccaaaatggcgatgcgaggaaataaaggcaagttattgatttcgctttctataataattttaaatttttgttgtataacaatgataaagaaacgttcttcaacaacaacaaaaaaatgttacgtacgtgactttaatttgcgtgacgactactcatcattcaccacaagagcaaacggaataaaaagacaaactttatcgttatcctaatttgaaccaaaccacaaaatagccaccacaaatagacaaagatatacatacagcgagacacatcatgcaaaaatgtatatatgtagcttagtggatcattaataatgtttagagaaacgatcgaatttaatgagacttattttcgttgaaaaagttttgatagggtgtaacttaatatatagtatcagtctagtgctaaacatctataagttcaaattccaatttctgtgtatattttggcctccattctacaaatctatatttatttaccacaatgtataatctagacatacaatacgttttacaaaaaaataatatgtagtacatacaccatttgtgaagtcatgtatctatttgacaaactagtccaatggaatttgactatgactaatttattattgtcctttctcttgtgtatctttttttttcttcctaactaaacactactacacattatgggttgattggtatccaataccgctgtagtatggagtatattgctttgataataatcaatcaaaggatgctactaaaaacgatattttaagttttatgatttttttttctttcgtaccgctactttatatcgtttttaaactatttttgtatctcttaccgttttttctacttgctaaaaaacttatacgattttgtgtggccaatcggtcctatattttatatatacaagcattcatagacgtgacgacgcattattttacttaaccctatataaacatatccaaaaaccgcaagaaagctcacaagaaatctcctcccatggcagattcaagttcttctctccctcctctttgcgagaagatctcatacaaaaactattttctaagagttgtggatctcacgattctaggctttctcttttctcttctcttgtaccgaattctactt

SEQ ID NO: 12162 - DNA, 3000 bp, Unknown; identical to SEQ ID NO: 12155
  misc_feature (1)..( 3000): cDNA_ID_2708454_gDNA_ID_2214534_Annot_ID_134343 3000 nt of promoter + ATG

SEQ ID NO: 12163 - DNA, 3000 bp, Unknown; identical to SEQ ID NO: 12154
  misc_feature (1)..( 3000): cDNA_ID_2708450_gDNA_ID_2214534_Annot_ID_134344 3000 nt of promoter + ATG

SEQ ID NO: 12164 - DNA, 3000 bp, Unknown; identical to SEQ ID NO: 12152
  misc_feature (1)..( 3000): cDNA_ID_2708443_gDNA_ID_2214534_Annot_ID_134349 3000 nt of promoter + ATG

SEQ ID NO: 12165 - DNA, 3000 bp, Unknown
  misc_feature (1)..( 3000): cDNA_ID_2711549_gDNA_ID_2214534_Annot_ID_134350 3000 nt of promoter + ATG
actcaatgagagaaaatgcgtttgttgggttcaccggagctttgtggatccgagaaaattcaaaataatttgggaattagggattttaatattttgattttccctcttctttacccttttgaatttcagagacactgatgagaatgtgtaaatacatgattacccccgtcgaaaggtgagtgacgtggtatactccactttgatcatcgttagaaataatttaaatatgaaatatccatggccggtcataggactgatagattgggttaagacttggttaagagttaaccgatatataacaaatgaattttgtttcgccaacgctaattgtactattaacggaaaacaatcttgtcaaaatggtacatacgagaagcagatagaagaaactcaaagaaggtatctagagagctaatacatccgtagagatcacagctttgagaatccatgtcaaaacagatttgtttttcagtcaaagagcaagtctctcttagtaaaccatgatcagagtactgtgtttttaaactgcttcgctggattctctttcacatgttaggatgtccgaaacctccagctggtggcatgggcctaaaaccattgttagccattggaggtggtggcggtgggaataaaccagatggaggtggtggtggcggttgagcttgatgaggcgggggtggtggtggcggtggaagaccatttgctccaacagctgactgaggcttgtttggttctggcttggtaggcttgaaatacacctgcagctgttttattacattctttgtcagtattttgattaatccaaacacaaaacttatccaatctcggaaaagaaactaagcttatggctttatgagaattatgatgagaagcacttactgtaaacatcttggagtctggatcccagtgagagaaaaactttggggttgatttatcaacctctgtgctaggaacctgaaaccaatgcgaaaacacaaccatcaatatcagtaaacaattcgaccaagatatgttgggctactagagctataatcccagatgacttgtagaatgtaaatgtcacgaataaaagaaaaaaaaaacacataccttgaaagctatgatttcatatggttcggctgcaaatagaaggtattgatagctcttgtcataaggttgaactttctgcacacaaaaaaaaaggaagaaaactattcagtatgaaggaaaagaaagagtttatgagatacatagacaaggagttgtaacactcacctgctcataagatgacatgaaacgatgtcttggctttatgttgtcctctatctcaggatattcaatctgtaaaacattgtttgaggagtaaacagacacagtgagattttactctggctaagtctctaatgatgatcattgaagttcaacaataacaattagatgcttacctggaacagaagagatctttgttgcagctcgggatcatactgttttgtaacccggtaccctggtctaccaattttaactgcaagaccatacataaaatggagttattaataaaccctttaaagcaatcaattaagtaaaatctatgtactcaatagcaaagatatacaattttgctattacttctagacaatcactttcccattatatccaattccaggcctaggcagatttgatatcaacaatgggaataaagctgtattataattatagaaaataaaacaacttattacctgttctgcgaactgagacattgcgcttgagtggctgcggcttagtaggagcatccttagcctctcgagcagctctctttgccaagtttgtctgatgcctcttaccttgagtatgtgccaagtagtttccttcattgttatgcagtgttagacatagtttacactcatagctgcacaacataaaaacacaccaaaaatcaaattagtggcatgaggggaaaattaaaaaaaagaacctaattctagaaacaacagccaaacaaactcaagagctatcacacatatgaataatcaaactcaaaacggagcaaaaatgtagatgaagttggtaaaatcacagtattcataaatctcaggttgatcatccaacaattgaatctgctacttactcgtgcaacaaagcatacataaatacagtaacataccttccaagatgatttcgcatgaaatacggatctttagcaaggtctatggtttcaagagcaagacgacggagacgctcacggcgatctatggcctcgttttggccggaggcggcgccgccactaccaggcttggaaccccattctctatccatagctgctactaggatctcctttcacgctaactaatccccaatcggtccttctatgctctcttgtgctgctctctcgattgctggaaaattttgacaattgctgagatttttcttatgacttatgaagattggggaaaaaaagcacagatgggggagattgggtggtttatcagagaccctaatgtgggttgggtttcgaataagatgagacagtttaaggcccaatatcagcccatcaatgtgttaaagagaaaataacgtcatcaggttttatttcatacatgattcattataatgataaactgattaaattaaaatcctagatagacagacaatttctgctttcacttattggaatttataatcaagctaaatcactacttgataatataataagaatgatataaattactttaaaattattattaattatcaaataaatgcgtgtaactaatttcattgctttaaaacatgaacatcaatgtcttacgttacttcttccacaagaaacaagtaagactttgactttttaggtttcttgttctcgtgatcttcacgaaggtgaagcttccctgcttatagggaatcatcattaactcttagcacattaattaggagtttcccacatgcgtatttatatacaagcatgaagcattcatcgatgtgaagttcgaaaacatatccaaaaactgcaagaaagctcctccc

SEQ ID NO: 12166 - DNA, 3000 bp, Unknown
  misc_feature (1)..( 3000): cDNA_ID_2706673_gDNA_ID_2214535_Annot_ID_134352 3000 nt of promoter + ATG
actccaaagttggttcgtcagatgatgaacatcaaagggcttagtattgctcatgtcaagagccatctacaggtatttgatctacatacatctaaaacgtacctatatatgtgttgtattttcgatttcgtttcaaataatctctgaaattagaaaaaaaaagaaatcactaaattgtgtattggaaaattttagatgtacagaagcaagaagatagatgatcaaggtcaaggtattgattctttctatttgtgttcattagttagttatcaagttatacatgtataggccaataaagtggggtttgaattgttggcagctatagctggtcacaaacatctcttcgagacttccacagatcgaaatatttataaactaagtcagctaccgatgttccgaggctataatcataaccatgattctccattcaggttgatataacttttttttttgaaaattttagattttatgtgttccttaatttgaatgatattccgttttaattatatttattcggaaactaaattaattgtcttcttttgtttttggtagatatggaagtaaaatttcaaatgcttctttgtggaactctagctctcaaggaacagaaaggagtttgatagaccaaattaggcccggtttaatccgcaacgcgtcggttagcaataacatccgtggtagtgattattggactaacaacaagtctttccaaaacatctactcttcttcaatttctaatcactttccgaaactacgacacgatcatcacgaacggaccaattcagtcacattcaacagcattcaaggacactcaagaacttttcaaaagttccataacggtgttgaggagaacactaatcattcttattgtagcaagacaaatggcaaaagagacgcaagtaggagcattgatcttgatctatctcttaagctaagacaaccggagaagacaattttggaagagacagaaacagcagcaacaacaacggatcaaacgttgtccttgtcgctatgtccagggtcgtcttcgtggaaaaagagccgactgatgaaagatgaagaggatcggacggttaagattggtcaggagagtactctggatctgactctatgaattatatttaagaatgagacaaattctaagtgagatcttgaggtacttaccgatatcttaatattcagtgtcgttgttgtttatcattaatcatgtattttctttattattagaaaggaaacaaaaatgtttgattatattaacggtcttgagtttgtttgataccgccaatttgtatcatcacatatataaacaaatattactagccacatcataatgattcgatcttttgtcttctcatagcaatatactatatgaaaattacatatacatataacaacaaatttacatcgattagagtatctctgctggtgagcttcattcatttgtagatgagacttttacgtaaatagtacaaaaattttggtttcgtatttatccgaacagtacatggacaattttgtagttccaaaacatgttatagttaatagtagtgttttcaataatttccaaaatccatcttcactcatttttcccttttcagagacatagtgaaacaattttacactatgcaaatccgaagccaattatttttgaggtttttactatatgtgaacaagattaatacttaaacaacaagacacacctcgttctttgtaaatattaaagaggttaaagatcataatacaaaaaaaaacatagaaaaagttcacaaatcatcaaatcttttgagttcattattctatataaaattttatctcgtgaaatgtttattgtataaggatgtgattagttgcaaaccaaaaattaatgtttaatagtatttgatagggaacttatttcaactgtgtaaaattttcccggtaaaattttcgttcaatcagtcgattctaagaacatgaatcttattgaatctctaataatttattgtataatatggtggcacctatacgtcaatacgataatgacgtcgttaatagtaacgttgagagttgagactgttgtataattttgattcgacgtgccaaatactacgttcgaccaagtatcaattttgattttccaaaaagaaaaaacaagaaacttaggatctccgttagtttgattggatacactgatactgtttcgatatttagacaaacaaatggaatctttgcttcttaaacattcgatgcgtgtgtgtacctggtcaacttcttcagacttcattatcaaacatggccgcacgatcagttttattttgctactggagaattaacttatccacctcagaatctaaactaatttctgaaactatataagtgttttttggggctaaaaataagatgcatgaagtgaaagtatcctagtggttaaaaaggggtgtaaacataacgtttaatgttgtatccctttatatgtacctctaatgtccctctttatttacttttaatgatttttaagactaaatatcttcagttgaagtaggtaatctttttgccaaattagtcttcgcaatacacggatcgatttccttataagatattaaatttaactcattcaaaaaatattaaatttgcaatgacttataagataaataaaaaccaaggtccatatcttatcccaatttgttttttttttttgtataccaaatttgtctcctatattgtttttatatgtttatattctttctcctagtaatttacacaaagaatttaagaagcttcattgaaatatcaagactagaattgaagaatgagaaacatatctatcaaacctcgaagacttttctccatcaaaatgtgcaaacaaaacaccaaacccaacttgtgtcttgtctattctacacacattattataattaaaggctttcacacctacacaaaaaaaattcgtaccattgactataaacatcacaaacccaacaaaaatttcatcaactccgggaaagatagaataacaaaatg

SEQ ID NO: 12167 - DNA, 3000 bp, Unknown
  misc_feature (1)..( 3000): cDNA_ID_1807810_gDNA_ID_2214535_Annot_ID_134355 3000 nt of promoter + ATG
cctctgcccaaatttccgatcgttggagaaaaggaaaataaaaataaaaatcgaatataagtgtatatgaatataattcacaagttgccacatattagtatatcgcttcttgttatataaagaggcttcatgtgatgcttctagaccgaaccacctacatcggcgtatggccataattgtagttggggtcgggttaaggtaatttatcatttgtactaattcataattctttttattttctgttataaatatcatctggaaggtccaaggccataagtattgacgaattgtttaagaatctttccaatagcctttttaatacatggcttttttgtatcatggagttgagtcatccgtgttataggacttttaaaataccgattgcagcatgttttcgatgtgaaaaatctgcattggtgtatttgttgatttgttataacgcgtaaagcatgcaatgtatgcttttagatggtaagttaacttgtaaaaatatcgatctgctaatgttaagttgtgtacaagaaatactatccacaaaagcgtatagagacaatcgtacctaacctaacacaatgtaacaaaatttgaaattagttttgtaacttaaaataaaccccccaaaagaaaggtttaaaacttctttttatgggcctatagcatccgcctgtatgcccaactggacccggtcatttctaagaatcgcaatcccaacctacgtgtaataactaatagtatgaatagtatgaatttcacgcatgcacgacgcatttttattttcttttacgccacacacgacacattaataaggtttagacaactttttttgattcgtgaatgccttctttgagaaagattgtgttaactatgtgtatatcgttccaaggttattagatgtagtccaaaatagatcacataagttatgtatttgtttaaggtttgcgcaccaatgatattgttgcatatcgaaccagttggtgagccggaatggaacttaattctcatcaactccactatggttatataaaagaaattgcatatgtaactatatgtaaattaatgggtgagattgtgagactcttagtgaattgagagaattttagagagagaacaaaattgtgttagagaaacatatcaaccaaaaagacatttgaaccaaaaatacaagtgactggtttccatatgtgatagtctccagtatatgcatctaaatcaattatgaaccaaattcatcattaaaatgggcaaaaatgtgtttggtcgcgggaagacccgtctgtcatccctattctaaactttcaatacaattcgttaaaaaaaacttaattctaactaattcagagtaagatagttgaaaactatacaacaaaaaatataagaaaatgatgaatttctacaattaacaaactaaaacataaactatcaaatagaaatagatgtatcatgtcatagaatgagataaatggttcactatttgattattgatttttttttttttaacacgactatttggttattgattatgtcaaaaacattaaaataataattttataaaataatacgatatataatgttttattagttttatctatccccctactataacaaaaacttatagaaatatataaacatatagaagaagaaaaaaagacagaacatatagaaacaagaaataaaattatactttcaaaaactacgaagcaaggaaaatcgaattttgaggtaacttgaaggcaacgaatagtatgaatgtggaaacgtcaacaacttaaccttacgtttacatattatattatttgaccatctctaaccatatttggattatgaaaatccaaaagggcgctcgcaaataccatagtgaccccctgtggccacacctttctcagatgtctattatgctttatgaagaatgccaagggggtttctcggtaacaccaaattaatcgatagtcgccttcacttgcaaaccaagaaagatacgaaactacaccgagaaagtacaatcttatttaaataaccaaaacaaacaacttagttttgtctgacccactaggccactacttctattcgacaactttaaagttgacgatacatatacaattcctgactcaactgagaacgacaatgtacaatcacacaacgctggtcgaacttaggagccaataaaacacttgagtcgtgacatgaaacacacggctacaatacaaacttctctcaattattttttgtaaagaccgattatttgctaagcaagtcctagacaaatatttacacacaatcgctataatatttaacaagagatcacggtcagattaaactacaggtcgaatgattacggtcagattatagacgcagcgtcggatttctatctcatagagtcttgacataactttgtttcctagagtcacgaccttatttcacgtctattggcgaaataacttcaatatatcgcattcacaatggacatactttttgtttttgttttttgttgggagtgaatttcttcttatccaagagcatgttaattaatgttttagagtgactttgacgacaatagtttcgcaagaattaataattaatgtttagtaacttaattttccaaaacattagaatcctactttgtatatgtttcaaacaaagcacaataagtattcaaagttaaatctcagagttcaaattaagcctttaagattttgtcttgaataattagcttacctctctaatcattaatcaacttaggaaaaatattatttttcaagtagtgggcaattgcttggcaaactgtcaacacaaaaagttttagaatttatattaggaaaatgattcataaatgtatatatagacagctacagaaaattgattgaccaccaaacaacaaaataacttcaagaaggctggagttaaaaggcaagtaagagaaagacacatcaatataacccaaaacaaaacatcataacagcaacaataacagacacataaccaatggcaaagcgacaactgttg

SEQ ID NO: 12168 - DNA, 593 bp, Unknown
  misc_feature (1)..( 593): cDNA_ID_3437550_gDNA_ID_2214535_Annot_ID_185070 3000 nt of promoter + ATG
tgttatttgctttttttatctagacgtccttgttttatataaacagtctatgtacgttgtattgtacaatgtttaatatcaataacaacaccctttggcaaaaaaaaaaaaattacatatcgtgtcaagcatagtagtgtaaattgtaaatcgtttaggtatataaaagtgatcagtttcttattgcacgatatgtggtatggttcttcacgtggaacctaaattaaacgtcatggattttgtgtcgctttaccgtgcaagttgcaaactatgcagtgtttgttgatccgatgacagtttctttcttcagcccaaaagcccaaaaggcccaaagtaaaatagcctcttgctttaatacacgtcggtatctctacagctaacacgtaaaacagacgtggcaagagttgcttccagaatcattaatagttaaaaaaaatcatcattggcacaagaaagtgagatatttcctagtcttgctttcaagtttcaagcaatctatctatctcgaaaaagcagcgatgcaagacgccgagacatcacgacagccggcgaagtctttgtccgatcgagtgaagactaactgtttatccatg

SEQ ID NO: 12169 - DNA, 3000 bp, Unknown
  misc_feature (1)..( 3000): cDNA_ID_3024137_gDNA_ID_2214535_Annot_ID_185067 3000 nt of promoter + ATG
caagactttcgaagtagcttggttctgtttgttcaacgttaattgcaccaattgttccactgctatcactgaaacttacctttaaccttaatgtatacaaagttgacacatccatcaaacttgactgtgataattgggaatctttcagtgtattgtgtactgcttggattccgattatagcttttaggtaaaagaaaatttcagtatgcaatgagtcattcatacaccatgttcacataaatgaaaggactggtaacaaaacttaacttctgtttttcttgacacacacaagtacaatccttgataaccttaaaacaacattattgtaccaaaacacagtagaaagtaaaagaaattaaaaagaaacttgatagaacaagcaacatcatatggttcttcatcatgtaagataggcatcgcaatgcaagaagtcccatatagttccaagagcatctcgtagcatctccaaaacacaacccctctcagtgttctgctcctgcagaccacaagtattatcaccataagcctcgcacttccattagagtttctaaaatagtacaagagcacaataatttacctgtattttagtgtcgatgtctttaagcgtcaaactcacctccctcttggtttcccctgttccagtcgtctcattgaatctatcagtctctcttaccctaagccttagagttttatttttgtagatagtagctctaacgtgacaaacttcaaattctttgtatccatcttcagataaagctttaccaaacggccaccttaaaccgccttttacatttggatcaacagttgctgattccaatagcgctttaatgtcacctatctctttatcctgccgatcaaagaaagatcacacaacctaagtctaagaagagcatattatttatccatatattgtaaaatatatataccaaacttgaacttacactgagatacgttatttccctcttagcggtgagcgttagtctcatgtcgagattcttatcaatgcatgacacatcaacaaccaaatgccttacaggattaaggtcgacctatataaaagcaaaactcaagattcaaagttagatattaaaggaagaccaagtaaaaatgtgacatctatcaaattcttgtttgtttttcttgctagtccgagaacaataaagaagagattttactattggttgtagtcactacacacataaaactcgagacttgccttgtacatactgagccgtccatcttccttacgggtacatttacagttgatggttgcattaggacgagaataatgcgatacctaaaaatagaagccaaacccaaattagcacattcaaatgacattcgaagtatagatctaaatctaagaaaatgaaacgagtaccttcacagtgtatgtttccttctccttatcaatagagaatccatggcttggtacaacattagattttatgtgttgtaagtaagacattgggagatcagtagagaacatcttattcaagttttttagtgaacattcagccacaggaccagcttgactcctggtttaaagttgtatatgttagaaaaaatataaacccattcctgaaaacagcaaaatgtgagatcagacggtgaatcgcttacccatagaagaaaattttaccaaaccgagcaaccagtctcgatacatgatgatgctccttcatttcagtcttaactcgctcatatgccaacacaagatcctccataaccttctcagctactaatagccactgagttctctcatccttcctctctccaatattcatattcactgaatataaacatataaaaaaccatactcaacatagatacaatgcatcttcttttggcaaaaacgataatagcacaaacaaaatagttaatagtattgtttatttcagcatctagatgatattcattttgtcaaacacatagccaaagtctactaatagtttcttaccattttggacattgttgttcatcagtattgaaggcttttctccttttctacactcgacagaatctgaggacaagggcacaaacttaacatacgaaggaacatcgtcctcaattccatttgaaccaacaagaaaccatttggaaatggaatctcctgaatagataatcttgttgcgtttaacactgctagtgctactcttaaagtcaaggttcttcttgaattttgtaacaagagaatctggaacaggggtaggctttgtcggatccttcgaatgcctcttatgtggtggaatataagacatgtctaaacctgaaactcacaacaacatcaaccaaaaacgatttcaagataaaacaaaaaaatctcaaacttggagctcaaataagaattgctttacaacgagcgaagaagaatataaagacagaaactttaaggtgagaagagagaagtcgaatcatacctgtaggctgtagtcgaaactcaacgtcttttaatattcctgcagagaagtaacagtgacactcaaatagactcttcgctccctttttaatctttcaattaactctcatccgtttctcaaaaatgactttaattagattgtgtttggtttcgatagggatcacaattggacaaacctcaagcctgaaactatcaggttcccgaggggtttggtcttaaatgcaggttttattgcaacaaggttttggttttgtaagaatttttcactaaaagtaacaattttttaagtatttctggctatcgaaaaatagaaaaagaaatgttttcttaaaaagtcttttagcgttgaggttctcagactctctctctctctctttgcccctacctatatccgccgtcttgaatccacagaaagtccgttttagtttccagctaagtgatgtcgtcacatatctaatggtggtcggtcactacttaaatgaagacagagaagcttttctagtcttcttctttctaaagttcttacctttagaatttgaacaaaagtatcagcgagctgatcagacagagaagctcaaaca

SEQ ID NO: 12170 - DNA, 3000 bp, Unknown
  misc_feature (1)..( 3000): cDNA_ID_2708489_gDNA_ID_2214535_Annot_ID_185066 3000 nt of promoter + ATG
ccttggacttgaacatgtaccattcgaacttaatgatgtctggccatctacattgctgctactaactgattcctgaacattcaagtcatgagacactttgttggcttcaggagtaacgtgagacatagaatccaccaactcactcttaaaactagaagtagaaggtaaacatcccgaaagtttctctccatcagattgatcatcaatggatatgcttgcagtgtccgagtaagaataactagtgctctttttcccaaacgagcttcgcccattttccgaaactggtgtgtttccatttgaatgagaaaatgaaaactgaggtgggtcctccattctctcttcaaccgcatcagaatatatatgatggttcccatccttcaaagtatctgatctactcttaggtctacactcatcgtctgtttctgtttccgactccatggtggctggtgcgtccacataattgtcagcctcactggttaaatcttcagaataactcctctgttgaaaaaatcctggcttcccgttcaaaaccgtttgtgaatcctgtgtaatagttgttccacggacctcattgtatgtagattcaggcactgtctctatatctttttcaataaaacccccattcatgttaacatttgccacattttcctgctcacttgggaatgaaacctctgctctgcttcctccatgagacttatccatagcacccaccatactgatttcaggtatatcggttactacatctctagcactatccatattccatgtcaacaatccggggttttgggtaattatttcataacttatcttactatctacacgtgtctgcacaaatttctccatgtagctttcccctgattttgaaataagggaacacccatctagctttctggttttcaacttcacaacgcgcgctggatctgaatgatgagcctctaaatgctcctccaaaaacaattcatgcaatctgtgccagttgaataattgaaaccagccatttttagtcacagtcagataccaatataggaactacatatatatcataacagaaatgacaaacacacaagacataaaatagataatactcacttggcatgtgatgataatgcattttcaggtgtccctccattcctccactgagatgctctcctctacaagagaatagaaggaaaactatgagaatcacaaaatggaaggtaagattacacattcaaaacaccatgagcataagaaaatctactattcagaaaatctaccatgtaatggaaaccaaaatataaccaagaaggatcacactgcaacccataagctacaacctgaactaagaagctagtacctttgctttctgtgattttttctctctctgaatatcatcccatgattcttcatatgaagacgtttcaagcctaacaaacgatggatcggtgtagcgtttcaaacaagccccagctccggaaatatcaaacctaatcaaaaccatcagaagatgttacatatatccttctctaacaaacgactaaagaagaagtcctatcaaacaaggctaaatcatacttgtccagaagaaatagccttggaggacctcgacattcctcataagaatccatcacacaacgaggtaagtcaccacttgtaaccacactctgttccaattgtagattcggatgccattccacacctgaaatagagtcacagaatcatgttgaaataatccaacatcatagtagctgaccagatcatgaatgttcatagcaatctaacctttgttagagaaaaacggcgaatgatcggtttgacacagtaatgccttctctatagaaggaaactctgcttccaactgttgcacacgagccattaaaccatggcttctagaagcagtagccattacttcttcgtgcaagtcatgaaacatctcagcagcaaaccttcatcacaaattacatgaatttaaagacaattccatcaaaaaatcaaaactttttccacttccacaaccaaatccagattcatcaaaattgtcgctttacaacaacggattccaaaacttcgaattcgatgcgcttagagatcaattagagaaatttcgattggagagaaacttactcagcgagatcaccgagttgacgcaaaatgccaacgagaccagccatagcgactccttcaagcagagcttcagggtcatctttatcagcagcttgatacagatccggatctgctaatccatactcgttacgagattggtacctcgtcaacggcattgtttgagcttctctgtctgatcagctcgctgatacttttgttcaaattctaaaggtaagaactttagaaagaagaagactagaaaagcttctctgtcttcatttaagtagtgaccgaccaccattagatatgtgacgacatcacttagctggaaactaaaacggactttctgtggattcaagacggcggatataggtaggggcaaagagagagagagagagtctgagaacctcaacgctaaaagactttttaagaaaacatttctttttctatttttcgatagccagaaatacttaaaaaattgttacttttagtgaaaaattcttacaaaaccaaaaccttgttgcaataaaacctgcatttaagaccaaacccctcgggaacctgatagtttcaggcttgaggtttgtccaattgtgatccctatcgaaaccaaacacaatctaattaaagtcatttttgagaaacggatgagagttaattgaaagattaaaaagggagcgaagagtctatttgagtgtcactgttacttctctgcaggaatattaaaagacgttgagtttcgactacagcctacaggtatgattcgacttctctcttctcaccttaaagtttctgtctttatattcttcttcgctcgttgtaaagcaattcttatttgagctccaagtttgagatttttttgttttatcttgaaatcgtttttggttgatgttgttgtgagtttcaggtttagacatg

SEQ ID NO: 12171 - DNA, 3000 bp, Unknown
  misc_feature (1)..( 3000): cDNA_ID_2708481_gDNA_ID_2214535_Annot_ID_185064 3000 nt of promoter + ATG
agcagaacactgagaggggttgtgttttggagatgctacgagatgctcttggaactatatgggacttcttgcattgcgatgcctatcttacatgatgaagaaccatatgatgttgcttgttctatcaagtttctttttaatttcttttactttctactgtgttttggtacaataatgttgttttaaggttatcaaggattgtacttgtgtgtgtcaagaaaaacagaagttaagttttgttaccagtcctttcatttatgtgaacatggtgtatgaatgactcattgcatactgaaattttcttttacctaaaagctataatcggaatccaagcagtacacaatacactgaaagattcccaattatcacagtcaagtttgatggatgtgtcaactttgtatacattaaggttaaaggtaagtttcagtgatagcagtggaacaattggtgcaattaacgttgaacaaacagaaccaagctacttcgaaagtcttgccaagcaaactaatcactcttctattaagttctaacaatcatcaataagaccaaatacatcaattttacaactatttagagatgctccacattgcttaaaccaggtgtgctaaaagttcgactgcttgatccatcaaacctttctcacataatctgctaatgacttcctcaattctcgaactcttaacgaacacgttcatgttaaatgcttcttccaataaaccatgagcacaaacaacctcgtctacctcaatatatgcactaatcataatatcaaatgtgtggctgttccggttaactccattcgtctccatctctttccatagagtcttagctcgactcagatctccagcttttaccaatgccttgatcaatatattgtatgtaactacattaggctcagaacctagcttgttcattgaagacatcatctttaaggcgccttcaatatcgttctgcttgcataacccattgatatacacattataggtataaacatcaggagccaaacctaacaagagcaactcatcaaacaacttgtctgctttcgggtaatcctcatccgcaataacgccttgcaacacgattgtataacaaacaagatcaggctctactctgtcacatttcatctgattcagtacacttacaacttctttcccccttcctccttccaccaagaacctcatcacaactgtataatcccgcaaacctggcgaaaaccgagtctttcgcagatcttccaaatatccaattacatcgaaacatgacgaatccttgtgtttacatacagaactcagtaaccgagagtataatcttggatcaacaataacactatcctgactcatgtatctcactaactcagtagcacaatctacctcacctattctacaaagcgcatcgatcaatatcccgaaagtagattcctctaacctaacacccattctacaagctttcaccaaaatctcaggaaccaattcaagactctgtctttttctcacaagaactaagagcaaagcattgagcgtgtaagcagaaggcacgcacctgaaattagggattttgaagaaaacctcaatcgcctcttcgattctaccggagaagccataagcagcgatgacatctctgaaaatggattcaggtgtatcgaacttctcagagacttcaaggtggtaaagaacagatgaaatattctcaagctgagaggatttagctagggttttgataacgaatctgtaagcttgaggagtgggctcacagttatggagttggaatgagcttaagagggttcgcataacagaagcattctctgaatctgtgagaaggttgcttcttagctcttccatggcatacttctgcttgagattctcgttccatttggttttgaaagacgaatgaggaatttttcgatactttctcatgaaatttgacattcggtgccatgacgaagatcttgccatttcttcaattcgataaaactggaagacatgtcatatacgatcttgtcggtatataacatctgtaaaagcccaactagattcaaaagcccactactggcccagcttcatttagggtttttatgtatcttctattgttacgtgtgtatacactcccttcaccgcagaaatacagaattaaaaaaaaaaagttttgaacgatgatgatctcaatcttccaaagatttgatagaggagattctttctaggcttccctcgaaatctatgaaaccagtgagattaacttacaagagttggaacaatatatcaaaaagtaagagctttacaaagatgcacattttaaaatgttaactaaaatacacaaatttaagtctttataaaattggttatatgatatcaaatagagtacacatatctaaagttataagagaaattattttaaactatccttttcatctttttctaatagtatagcaccaatcaaaaacaacgtgtcaatcaattgtagataaaatgtatcccaccttttattatataccctttttatcatacatcttcttagataattctcatccaacacgtaatcgtataaatatagtattaaaatccaatctcttaagaacaagataaacaacattagaaagagaattattatccacgtaaaaaaatcattagtctttaatagttttaacgttgactacataatacaaacgcgtggtttcacgcactaaagaaagagcgtgcagcgggaaaatttgccgtcattaaaaactcagaacaaaaaaaaaaaacaaacagatcgatcagaaataaatagaaaaaaaaaagattttcccttttttaaattaaaatttctttgtttcatcctctggagatagaaaaggaaagaaacaatttacaaaaggccttaaaaaagcaaagattcttcgctgacttcgttctctctttcgctggcgaagaagattttctagggttttttgtttgattttcgtgaagtcggaaaaattattattattaatcgtgttgagctgtttgatcggtgaagactatg

SEQ ID NO: 12172 - DNA, 3000 bp, Unknown
  misc_feature (1)..( 3000): cDNA_ID_4378596_gDNA_ID_2214535_Annot_ID_185062 3000 nt of promoter + ATG
ggacaaaactactttatataccatttacatatagaatttgctaaaagccttttttttttttaatgtaaaatatatggtttttgtagggttgtgatgcatcgatcttgcttgacaattccacatcattccggactgagaaagatgctgctccgaacgcaaattcggctcgagggtttaatgtcatagatagaatgaaagtagcccttgagagagcttgcccaggaagagtctcttgtgcagatattctcaccatcgcctctcaaatatcagtgcttttggtatataaatatacatacatgacgtatcttttattaaactaatcgaaaatgttatcaattaaaagtctatgttttatatagtcgggaggtccatggtggccggttccgttggggaggagagacagtgtagaagctttcttcgctctggctaatacagctctgccctctccgtttttcaatcttactcaacttaaaacagcctttgctgacgttggcctaaaccgcacttccgatctagttgctctttccggtaaaaaaattcatgttacatcatctaactctaattaagatatgcatgtgtttaaaatgcaattcctttttatatattgatagctagctaagctagacagacacattcctagactaagtctagaatttacatagtaatttgtaagtaataaaattacaatgttaactcaatgttttagattattttgttagagtgatctacaaaatttactttttatgtattttttttctttcttatagatatgatttggtttgagctttgaaattgtcttataatatttaagggttttatttttctacaatgtttgagttcgaattttagcaatatttatttattagaaagtttttgaaggtatatgaattagttaacatgagttaaagatagaaaaacattttcttggaatacatgaccaaatagctgttaagaaaaacatgaccgaatgtaaatgaaaaaaagaaagaaaatctaatcaaatacaaatcatctagcacgtgatttttcaattttaactgagttggtaaacgacaaatcatgtttatctttaaataaaatcactaattccatttatctaaaccttaatgttttgtcaaaacgttttaggtggtcacacatttggaagagcacaatgccagttcgtgacgcctcgtctctacaacttcaatggtacaaacagtccagacccaagtctgaacccaacttaccttgtcgaactccgtcgattgtgtcctcaaaacggaaacggcaccgttctggtcaacttcgatgtcgtgactccagatgctttcgatagtcaatactacaccaaccttcgtaatgggaaaggtcttattcagagtgaccaggaactcttttcgactccaggagccgatacgatccctttagtaaaccaatacagcagcgacatgtccgtgttctttcgagcattcattgacgcaatgattaggatgggaaatcttagacctttgactggaactcaaggagagattagacaaaattgtagggttgtgaatccacgaattagggttgtggagaacgacgatggtgttgtgagttctatctgattatgcatgttgccatgttggggatatatatatggatatgtaagaaagtataaaatgcgcacgtgagaacaatttcgactaataaaagttttcacgagttatgagatttatgaaattggtattaagtacacttacaatgcatatatacgtggtgtttataacacttcaatttctgacatgtattcaagtagcttttgatttaacatcacgtcgaaatttataatatatattcaagcaaattgttgaaataaaatgtcctagtttttgtcagctttcgttacttataaatgagaagaaaagacaaggagctaaactgctaaagtattagattaggttaacttttgttaaccacaaaatctagcacatggacgcgtatgaagttgataaatcatatatgtattaggtaacattgttatttcagattaaattgttttgagcaagaattgtataaaaagtttatcgatttgtgaaggtggcttctgaggctacatttgcgggattcacggggaagagaaggacaaaacataaggaattctatttttcataaaatattaattaggaagatagtttgaaaatgtttgccaattaggaaggacaatccttttagaaggttttccgagatttttttttttgtcttgtatccaattataaatgtacgtacctcgtgtataaattaaaaaaaaaaaagtttaaacattcctttgaaactacaacaaactcatttatacaaatatccgtcccctcaaaaattcagatatatcaacaagaacacgtcacaaataaaacgtaattatggtaacatgatgatattatattttcctacatagacataacttgtgtctaacatgaatcaacaaacatatcttttacgaccctacataatccaaaattgatatcaaatatcgtactaatttcattttccgtaccactgttgaaatttgtgtcgtttataaattatttatcaaacttgaaaaatatctaagaataagaatatattggcggaattgagaaacattagatacgtacgtcgatttgtagtaagtaaaaaatgtaggggagacggttctaaaaagttgtaattgaagttaaaatgatcaatcttacttgatttatcacagcgtcggacaaatacagccaaacactacgagcaagtttaattctgtccaaagaatatatagcacgtcgaaattagtttattttaaattctaattattatttatccttcaaccactctagtaaaacacatggccttaaaaaaagacctaatagtattttttaagaacacaatacctaatagtctaaaataccattaaagaaagactcgaacatctctatatagtgttccttctaggcccttagttaatacacacactcacaactcaaatcatctttttgtctccctcctgaaaaa

SEQ ID NO: 12173 - DNA, 3000 bp, Unknown
  misc_feature (1)..( 3000): cDNA_ID_1807757_gDNA_ID_2214535_Annot_ID_185061 3000 nt of promoter + ATG
agactgtggctttagtcgcctcaagctccttcaacacctctagcgtttcgcgttctttaacaattagttctctttgtagctcgaaagcttgtgctttgagtcccatgatatcaggttcttggatattttcctgccaccaatatcagaaagacaaactttaccttacatatcctaatttgaacaactatgatactttaatatatgacacacaacacaaaatcttcactgatgtgatgaatcaggttgcaaaatgtaggtaatgaacaattccttaaaatgaggtttaagttttcttcatcattgatgctaaacatgaaagggaaatcaagtatcgtcatcatcattatcttcatcataatgtcgtttaaggcataaaccaaacatcattaaacatcaatttcaaagtttgatgatatctttttgttgtttcagacaacaacagccaaacacgcttaatctaacaacagtaaaaccctaaatcatatttttcagagagaatttaaagaaaagactgcaagtgagggagatagagaaagggaaagaaacctgagaagcatctgggagtttattgagagaaggtctccagaaaccaaaaccgccgaaacgagtggctgcttctctcactgactcgaacggagccgaagtgtctatctcaggcttctcagctcgaccattcgatagatccgagtcagggtttacagtgcccggttctggaaattcggccattgaagcagaagaagacgagtcttcgatggggaagaagagagtgaagtgaaaaagagagagagagagagattagggaggaaccaaagtcttgtgtttgtgaattgaaactggtttgataaagacgtgtcggaacacgcgccacggtcgtctcgtgaacagtgttagaaagtcatgttttttttttgtctcaatttaaatttgaaattagcaaaaatttcgcgtcttttcccctcttggatcatataattgctaatctcaattcttaaattgggattaaggaataacctttaaacggctaaaactatctgaatgttttgatattttatcagattgttaaaaagtgatcaaaaaaaaacaaagcaatatatttatcttcacatgcctattcaatttaagtgacgtgttgttatttatcacaattaactgacagaattttgtaaaacgttaccatgtgactgtttttttttttttcttatcacaaacagaaaattatttccgttccaatctttcttgccatggaagaagctatgttagaaaatgagctctagcttaccggtaatagggaaaccagtcttgacaaccatcgagaagagggtgacaacgatacatgagcgatggatagcacataagaataaaatgatgaagggttcaagcaaaaaaaaacttggtaagagtttgaacccaaaacatcagatttgtcatcttttaggtgagacaaaaaagtcttgataacaatgtgtgccggacacagtttttttatctagaagattaaactttgatttttctcacctaaaaggtgacaataaagtgagctatgtagagtgtcgtcaattatttgtccatcttcttgtttgtttttttaatttcttctttttgtccaaccattagactaatattttcattttgtttctttctcttttgtcttcgctttcatcttgttttcaggaatgactaatgcattcgaatgttttttcttttccttttatgtgcattcctactttatgaaacaattagttttcaattcaatttcggtgatagttttagccatttctgtccactttggttgtcttagttagtttattgatgagaagaaaagacaaggagcaaaagtattagattaggttaaccaaaaagtctagcatatggactcgtatgaaattgatatttgtatgtattaggtaactttgttttctcagagattattgagcaaaatgtttataatttatcgattagtgaaggtggcttcggaggctacatttgcgttatttacgggaaatggaaggacaaaacacaagtgctttctagtttgaaaataaaatcaaagaaatattggttaaaatagaacacactttataatcactgatcacataatattacattattatgacttatacgatttacaaaaacaattcaggtcaaaggcactcgtcgatataacataaagttggacattgaaactgagaatacgttggcgttcgcggatttaacatatatttttttgtccatatttttataccgtatcgtctcaacaattctatcatcaacaagaacatgtcactgataaaaacatgtttatcgcagcatgatgatattatacatagacatatcttacgtttaacatgaatcaacaaccatatctttagcgaccctacacgaattcaaatttgatatcaatttcgtacaatttctatcttactactttgaaatttgtgtcgtttataattatttatcaaactcaatgatgcgtattctattctcagaaggagtcatgtatgtcttgaaataaatctagaaagaagtataggcgaaattgagaaccatctcttcatagaactatacgtcgattcatagtaagtaaaaagtctacatctgcaataaaaatgtatggagttagctagttttgaaaaatactatatacaattgaagtgaacatgaaaatcttaattgtttaattaaagcgcgcgaaaaaacacaataataagttaaattatgtgcacataatagatagcattgtcaaaaggatcggttaatttatgatttcactaatttttattatccttcaaccactctagtaaaatacatattgccttaaaacaaaacctactagtcttaaaacgaaaaaagaaaaaaaaaaaaaaaaaaactcaatacctaataatcaaaaatagtactcaagcttccctatataatgttccttcttggctttagctaattcaccatatacccacactcacaagtcacaactcaaataatctttgtcttcctcctacaaat

SEQ ID NO: 12174 - DNA, 3000 bp, Unknown
  misc_feature (1)..( 3000): cDNA_ID_1807810_gDNA_ID_2214535_Annot_ID_185054 3000 nt of promoter + ATG
gtttcctataatttgattggacctctgcccaaatttccgatcgttggagaaaaggaaaataaaaataaaaatcgaatataagtgtatatgaatataattcacaagttgccacatattagtatatcgcttcttgttatataaagaggcttcatgtgatgcttctagaccgaaccacctacatcggcgtatggccataattgtagttggggtcgggttaaggtaatttatcatttgtactaattcataattctttttattttctgttataaatatcatctggaaggtccaaggccataagtattgacgaattgtttaagaatctttccaatagcctttttaatacatggcttttttgtatcatggagttgagtcatccgtgttataggacttttaaaataccgattgcagcatgttttcgatgtgaaaaatctgcattggtgtatttgttgatttgttataacgcgtaaagcatgcaatgtatgcttttagatggtaagttaacttgtaaaaatatcgatctgctaatgttaagttgtgtacaagaaatactatccacaaaagcgtatagagacaatcgtacctaacctaacacaatgtaacaaaatttgaaattagttttgtaacttaaaataaaccccccaaaagaaaggtttaaaacttctttttatgggcctatagcatccgcctgtatgcccaactggacccggtcatttctaagaatcgcaatcccaacctacgtgtaataactaatagtatgaatagtatgaatttcacgcatgcacgacgcatttttattttcttttacgccacacacgacacattaataaggtttagacaactttttttgattcgtgaatgccttctttgagaaagattgtgttaactatgtgtatatcgttccaaggttattagatgtagtccaaaatagatcacataagttatgtatttgtttaaggtttgcgcaccaatgatattgttgcatatcgaaccagttggtgagccggaatggaacttaattctcatcaactccactatggttatataaaagaaattgcatatgtaactatatgtaaattaatgggtgagattgtgagactcttagtgaattgagagaattttagagagagaacaaaattgtgttagagaaacatatcaaccaaaaagacatttgaaccaaaaatacaagtgactggtttccatatgtgatagtctccagtatatgcatctaaatcaattatgaaccaaattcatcattaaaatgggcaaaaatgtgtttggtcgcgggaagacccgtctgtcatccctattctaaactttcaatacaattcgttaaaaaaaacttaattctaactaattcagagtaagatagttgaaaactatacaacaaaaaatataagaaaatgatgaatttctacaattaacaaactaaaacataaactatcaaatagaaatagatgtatcatgtcatagaatgagataaatggttcactatttgattattgatttttttttttttaacacgactatttggttattgattatgtcaaaaacattaaaataataattttataaaataatacgatatataatgttttattagttttatctatccccctactataacaaaaacttatagaaatatataaacatatagaagaagaaaaaaagacagaacatatagaaacaagaaataaaattatactttcaaaaactacgaagcaaggaaaatcgaattttgaggtaacttgaaggcaacgaatagtatgaatgtggaaacgtcaacaacttaaccttacgtttacatattatattatttgaccatctctaaccatatttggattatgaaaatccaaaagggcgctcgcaaataccatagtgaccccctgtggccacacctttctcagatgtctattatgctttatgaagaatgccaagggggtttctcggtaacaccaaattaatcgatagtcgccttcacttgcaaaccaagaaagatacgaaactacaccgagaaagtacaatcttatttaaataaccaaaacaaacaacttagttttgtctgacccactaggccactacttctattcgacaactttaaagttgacgatacatatacaattcctgactcaactgagaacgacaatgtacaatcacacaacgctggtcgaacttaggagccaataaaacacttgagtcgtgacatgaaacacacggctacaatacaaacttctctcaattattttttgtaaagaccgattatttgctaagcaagtcctagacaaatatttacacacaatcgctataatatttaacaagagatcacggtcagattaaactacaggtcgaatgattacggtcagattatagacgcagcgtcggatttctatctcatagagtcttgacataactttgtttcctagagtcacgaccttatttcacgtctattggcgaaataacttcaatatatcgcattcacaatggacatactttttgtttttgttttttgttgggagtgaatttcttcttatccaagagcatgttaattaatgttttagagtgactttgacgacaatagtttcgcaagaattaataattaatgtttagtaacttaattttccaaaacattagaatcctactttgtatatgtttcaaacaaagcacaataagtattcaaagttaaatctcagagttcaaattaagcctttaagattttgtcttgaataattagcttacctctctaatcattaatcaacttaggaaaaatattatttttcaagtagtgggcaattgcttggcaaactgtcaacacaaaaagttttagaatttatattaggaaaatgattcataaatgtatatatagacagctacagaaaattgattgaccaccaaacaacaaaataacttcaagaaggctggagttaaaaggcaagtaagagaaagacacatcaatataacccaaaacaaaacatcataacagcaacaataacagacacataacca

SEQ ID NO: 12175 - DNA, 3000 bp, Unknown
  misc_feature (1)..( 3000): cDNA_ID_3024157_gDNA_ID_2214535_Annot_ID_185050 3000 nt of promoter + ATG
ttaaaattatcataaaaatcaaaaactcgcacaaaggacgggttctaatatagttgatatatatgttttacatcttttcttgctaacattctactaatatctatatatctacataaaagtactagagagaattacctgcaagtgagatttgagatatacacagatgagtgtataatatggtcagcgggtcaggatatgtaacttttgtttgattatgggtttgaaaatgtgcaaatagacagacattacttcaactaattgagaataatgttggatccgtatttgtaggaataaaaaataactgttaattagaggttgacttcacagttcacaagtcgggttcgggtgtacaagaatcttgtcaggtcacacctaactcttatgatcgtctcttagttttttttttctttttttttcacaggcttaatggacccttttgtctaatttgatggcatatctcacaaaccatccagttccatgtttttataaacatgctttttaaacctttaaaatgaaggacacaaattaggattctcggtgcaaaattgcatgtggacgtgtagaagcagaaggaagatggaaattaagtgtaaagaagaaaggagtggtgacgagaagcttgtgaaggatcgatggcaagtctctttacacgtggggggaatgacaaagttcttcttttttctacttcatcaaagcttacaatttcctctcctcaacaactttttttgttttttttggtagggaacaactttttttgtttggctagcagaattttatttactaactggaaaatatgaacttaagcctatagtttaatctcatgaactcataatctccatttaattctgcaacgaagttttattggatggcatgtacccgaatctatagtagatatatacaactggaaaacagtattgtatattgttttcgtgatgcaccaaaaacttatgattgaaatttacgtagaaataaaacagtacaatttgttagacatgttaatagaactgatcttgtgagtgctcatatttcttggaattccaagaggacttcgaaagcataattggatctaaaatatattatatcataagcatatatacgtgagaatgtatttatcttattgttttcataatagaagtggtaaaggtaaatattcaaactaattgtcgaaatatgcggaagaggtagtattcaatggcttacgatgactaaaatcgtaattacaaaaatcaccataaactcgtctaaaaagactttctttgcaattaaaattaaaccatataggacttcgatttatacggtgtcaaattttataactatgtatgttaatattacatatttttggaacgaacgatgtaaaaaaacggctcaactaacaacgctattcatcgcttcacggggtcggatgtgtaacgtaaaccaagcaaggaccactttacacataaactaattctctcatacgaatctacaaaaatacatataaagataatatataattttggggtaagagaggagcattgtcccgtgattctcgtcgaacaaaaaacagaaaaagaaagaaagaaagaggtatgtgtgatgatgtggtctacatcaaagacagctgagcagtcacacgccttgtaatcgtaatttattcgtctatctaccactctcgctcttccattttttgcctttagcattcaattccacgcaaaaccctaaacctcataatctcatcaaaaagttttaaagataaatatatatgaatctacccattaatcaatatattagttagtattgtgatttatcactttctaaatactaaaaagtactcagaagattagaaggttgattttaaaaataaattttctaactaatttgatcgctatatcaatagaaatgagaggatttaaaatccatcaagtatagttcacttcgataaattaatattttgtataaattgattcatgtcacgtactggatcttttaaatcgttgaggatcaaaaattattttgcaacaaaaagaaaaacagaaggaaaagaaagtttagttaacattaattttaaaccaaatgtcttaagaaaaagacaatgatctcgatcatcaatgatcctaattccgacaaaactactctgaggtatattataattttgtgaattcgattttgtatttaattatttttcctggaaactgcatcacggtatcaaaaaatttaaaattcttcatttttttgttttcttctaaactcaaataacgtctcaactatactaatatctttcttattttcttataattattaattttttttttttttttttttttgttgttgttgtaaatagtcttacttatactaactaattcattcatagactgttagtcccgatacatgaattttatctatatcgatctttgtaatcgaaatgtttgtttgacgaactaaggcaatctaagactactaagaatatgctatatatagagcctaatttctatcacactcatcttagcctttggtgaacaataatatagaataagtgttacttgtaatttgttggcatgttaagggtataaacaacaatttatctcatttataggagtaatagttttctccctccatggttgatattaatatgcatccacatattaaaatatacaactatttatatatagagctgtctatagtagaaaagggccgaaatcaattagctgtgaacagaaaagaaaactttttaacatatgcaacaagatttaggtgagggtttgtctacatgttccgggaagagagagagagagaatcagaagtgtatcttgatctagggttcacagacaaaatctccatgctttgaactaagcagaattcatctggtcttttatctctttcatatcaaaccaaaggattgatctatccatatcgtccaaaacctatatctagctaagcctagaacttctctatcgtttaccactttctttctatatttcttctgaatttgtaacatcagaagtaataatgattccaagtatg

SEQ ID NO: 12176 - DNA, 3000 bp, Unknown; identical to SEQ ID NO: 12166
  misc_feature (1)..( 3000): cDNA_ID_2706673_gDNA_ID_2214535_Annot_ID_185049 3000 nt of promoter + ATG

SEQ ID NO: 12177 - DNA, 3 bp, Unknown
  misc_feature (1)..( 3): cDNA_ID_3024161_gDNA_ID_2214535_Annot_ID_185048 3000 nt of promoter + ATG
gcc

SEQ ID NO: 12178 - DNA, 3000 bp, Unknown; identical to SEQ ID NO: 12173
  misc_feature (1)..( 3000): cDNA_ID_1807757_gDNA_ID_2214535_Annot_ID_134361 3000 nt of promoter + ATG

SEQ ID NO: 12179 - DNA, 3000 bp, Unknown; identical to SEQ ID NO: 12172
  misc_feature (1)..( 3000): cDNA_ID_4378596_gDNA_ID_2214535_Annot_ID_134362 3000 nt of promoter + ATG

SEQ ID NO: 12180 - DNA, 3000 bp, Unknown; identical to SEQ ID NO: 12171
  misc_feature (1)..( 3000): cDNA_ID_2708481_gDNA_ID_2214535_Annot_ID_134364 3000 nt of promoter + ATG

SEQ ID NO: 12181 - DNA, 3000 bp, Unknown; identical to SEQ ID NO: 12170
  misc_feature (1)..( 3000): cDNA_ID_2708489_gDNA_ID_2214535_Annot_ID_134366 3000 nt of promoter + ATG

SEQ ID NO: 12182 - DNA, 3000 bp, Unknown
  misc_feature (1)..( 3000): cDNA_ID_2711571_gDNA_ID_2214535_Annot_ID_134368 3000 nt of promoter + ATG
tcccaagccatctctggatcaaaggaacagggacacagaaaccaaatctcctggtgagagcattcttgatgataattgcatagattccacacaagtgtataatctgaaccttttagagagtgaggctatcgaccaggcagttagagagcaaacatcttatgcaagccatgaagttgcagatgaggaattgctgcagtcaaatgttttcaggggcttagagtttgaaccacaatcagcaggcttagaatttgcaccacaatctgcaggtatagaattgaacagacctaagcaagagttgaatctggatcctacttttcctagctttggttttatccctgagactattccgcccaatccagaggacatgccaccccttcctcctatgcaatggcttattggaaaggttccacattcttttcctaccttcatgggggaatcagtcgaaaccagtagttctgctttatcagcggcaccacccattggttctagcttgaatgttcaaattgggtctccaccatcagagctatctgtatctttaggaagtgacgaatcagaacgacttcctggagggtttgttcacaatgcatcagaaaagccattgcaatcatccattcagttcccaaccatgagcactgatttgaatagtcaatacgacagttctgagctccctacaataccttatcaggagtgcatagaggattttggttctgaggagaacaatcttttggctgaccatgcagctcagaaccacgagctcgtttactctcaagcgtcgtcattgcagctgcctcaggttaaacacgaagatttcaaggacgatgctgatgtgcatgaatctcaaagttcaagcgatgatcaccattgtcctgaaaccaaatccctgacgccaactcaatcaacaaaggtagaagataagggtcattcggttcctgatgcttcaaatgcagaaactgcagaatcatcaaacacgtcagttcagaagataaatcctgtttcagtgggagatgctatgtggcctgttagctgtttctctgtggcacctaccttggacacatataagacagaagtggtccctacggttaggcttcctaggccaagaagtccgcttgtcgatgctgttgcagctcatgacagacgcaaggtacaaaatttcatcttgtctgcaataccatgcctttgctaagattatgtctctaatcacttgttctgatgatttgccagatgaagaaagtctctgagatggtccatccaccaatcaaatcaaagcaagatgacaaagattcgttgcttgcacaaatacgaaacaaggtagcacatgttgatcatgtaaaatcccagatggtcctgtgaacagaattttgtatttggaattttatgagttgtgttttgtttatgcagtccgtcaatctaaagccggcagtaacaacacgacccagcatccagactggtcctagaacagacttaagggtagctgcaatcttagagaaagcaaatacaatacgcatggttcgttactctctttccatctccttcaaagatagtaaatgttttcaagttttttcacctttttctgtggtccttgctaatcgtagaggcttcatgtcaaagcatttcaatttgacatgaaaatctgaggagtttagtctcacattatgtcttagattggatccgaagcagtctcttaagtggaaacaatgaattataagcctgatcatagaccaaataaaatatcactttttctctatcgcacacacatctaaaaccggttgaacactggtgcaggcaatggctggaagcgacgaggatgaagattcagatagttggagtgattcttgaaatcgatgatcgttggcttttccgtggtgttcgttcttgtatcatgatgagtgcgcaagcacttggagtcaggtaggttatacaatctctatttcagacatataacattaaatacatacagtcattggttatttatatatgtatgtatgtatattgtgtactgttttataggtgtgtgtatgttgtaatgtaagtagattccgaaatttgcagtagttttacggaaatttgtgtgtaggaatgtttcgttcttttttttagctcatagaacattcttttagtaggctatgtatgtgtatttgaatacatacatagatatgtattgtgtgttctcaatcatttgcagtgtcctttgactgtatatttggtcatttggataacgaatatctatgagaatcagctagttagtgcactgcacacacttcaaaggtaatatttggtttctagaggactgaaatgatatgatggtttgcttgcttagtaccaataggatgatcttcacaaaaatcatttgcaggcataactgagtttcaatttgaacccaaatagagtagttggatcgagaaggaggattggaagtatggcaatcctcaatcctcatatgtaaatcagttggaagcctacttaatacttgatctctattctcggctggcaccacctgtatcctgtctgaatacttgattatcgggatcagaccacatcgtccgcgcaaaataccacccggaacagcaccaccataagcaacagcctcgaccgggttcacacctgagacgttagggctaaaagaaactatatgagagtgaaaaatcctgagatatcattcttgattaccgttatagtgtctgaactcaaaaccttagacgaactcatgctactaaaaaaaacaaggagacgagagcgaaagaatgcaattgtgaagaatttatgatggcctttatatagacagagctctttattcagtaaccgttatgaaatagcaaggagctagtcttaatttctagtgggctagggaaaaaaataaaaaaattctagtgggcttaagagctaggcccataagatattttaatattattttatacaatgagaccaaaccaaaaccaaacaagagattgagaagaaaaccgattttttccttttatttatttttatgtttataaattaaaa

SEQ ID NO: 12183 - DNA, 3000 bp, Unknown
  misc_feature (1)..( 3000): cDNA_ID_2709684_gDNA_ID_2214536_Annot_ID_134371 3000 nt of promoter + ATG
ccaggtcattttctgttgacgaatctgcttctggacaaaatgaaaagtaccgcaagagaaagtggagtccaaggaaggattgtgaatctgtcatctattgctcatacttatacttactctgaaggtatcaagttccaaggcatcaatgaccctgctgggtaagtttgttattcaattttatgctaatgaaacgagactaaatatttttaactgatgtaaacactaattctctatcctatgcattatctagatattcggagagaagggcttatggacagtccaaactctcaaacttgttgcactccaatgcactctctcgtagactacaggtaatatattatttacacattgatatactttaattaaatcaaagtttgatgccataaaatgatgaatatgattttgggatgtaggaagaaggtgtgaacatcactataaattcggtgcaccctggtcttgtcaccactaatctctttcgctactccggttttagcatgagtacgtataccaattctccaatggtcattcaaacacttaaattttaatattttcttatcttaaaatcgacatttacttgcatattcagaggtcttcagggctatgactttcctcttttggaaaaatatacctcaggtgaatttaaaacccttttcaaataaatgttcttatgagattttagtttttattttacaaatataattcttttgggggcattttcagggagcagcaacaacatgctacgttgcacttcatccagatctcgaaggcgtcaccggaaagtatttcggcgactgtaacatcgttgctccgagcaaatttgctaccaacaattctctcgccgataaactttgggatttcagtgtctttctcatcgattctatctctaaataatctatcatcatcaagacaaattcttagacattcaaaatttatttatccttcttgatattgttacattaatgccatatctttttcaccaccacatatttctttatggaataccataatttagaaatcattatccatattttttcttgaataaaattataaaacacaatttgtttgtgtaagaaaataacttttttcatctagtaatctatttatatctcccaaatgaaataacaaaggttatatcataaccagttcatgggcctaaattaatgggcttcgtcggcctcccaaaggcccatagtccttacgacgacggcggaaagagccacaacaattgctgcaaaaaccggcggcacaacgaggtccatcttcgacctccggaaaagattcgccggtaaacacaagacctccgagggaagatccagcggaaccaatatggctgcataagaaccgcaccgccgcgagaacacctcagaagaagacgggaaaatcgccgacacgaaagcgaattccggtgcaagcgagatgatagccaccgttaacgtcagaaacaacgtccacgttgcgccgtagacgaagtgtggaatccgccatgcgaatctgtgagtcagagaggagaacatatggcgaatcattggttttaagttcttaaaagtgttcttcgttctctttatatatttatagttccatcgatcgtaaagagttccgccataggaattggagtagcttcgatgaaaaagagaagtagaaagagaagataacctaatctcttacctgctcttggtgacgaacgaataaggaaaagtgaaaaatacaaaaattatgttatcaatcctaaaattccaaaatataccaagttactagtaaaatttacaaaattatcttaaatgaatttacaaaccttacttaaaagttaaattaaaccgttttagttattaaaggcttgtataatttgtgttttgggttgtgatatatattgtaggatattttattcaagttaaaaacactaaaaaacatctctaacacaaaaggtcccacatatacatgtggatattcacttaaacagaaactgaaatgatttgttctcttctcgtactttcttccaagttgtcatcactcaccagcaactgccacgattttcttcccctttttctttcgatttacataatcactccaaaggttttaatttattcttaaacagtctccatacttttaattatctcatattttcccctcggttaactacaatatccaattttactctcataatttcgtgtaaccgacttaaactgatatttaatatcataaaattatacatagaaattatcatcgcaaccaaaattaatacttactcgaatcaacatttttttttctaaaagcagattgaaatttaagagataaagtaatccggtcaaaaagttacatttaaaaacaagggccagtttgtattttctcacgattcggatattattttccttctttttatctcctaattactattttttccaaaaatataaaaaaatatctgttttttttttctgttttcttttttctttcttcatctctctctattctttgctttgaaaagtaatctggaccgcgaacaaagctttttcgttttctggttcgttgccgccttgcacgttccttcttcttccttctctcccccccatcttatctctttccccccctttaccctaaccctaattttcttcgccgtcctctcttttctctctatctaatttcgttcccatattcgaaatctcttaccttttatctccagatcttttagatccgtaattccctactattgattatacccaaacttttactcttatcttcctcgtttgattcttatgcttccttttatgaattgatttcttcataaagtcatcatctttggattgaattcgactcattaatcaatccgttaaccaataaccaccttgacagtttcttctccgaggattccagattacaattctagtggagctgtaattggattcagatctaactcaagttagtgttactgttgtgtctattggatgcaatcgtgttgtgatattgaatatatttctgatgggagaaggaactatttgtttggagatg

SEQ ID NO: 12184 - DNA, 3000 bp, Unknown
  misc_feature (1)..( 3000): cDNA_ID_2708534_gDNA_ID_2214536_Annot_ID_134372 3000 nt of promoter + ATG
actgcagcagctacatactataccacttccttgcttgtaaccctgtagtagtttctgtatgggaaaaaatgtaagcaaaactaaagttcgattcaaatttcacggaaataagcagtacgagttatttgtctgcaataacgaacctgcgttttcacatagtaagccaattcagtcccgtctggaagtccattaggcataaacagcaaccgatgtaaatcattatccctagaaacagaggattgtatcttttcatcaatatcggatagaaattagagattcaaaggctaacagaaaaaacacaaatgatgaggttgatcaaaaagtaacacaaacctttttctattgcttccttcagaaactttcttatggcaacccgtaccagatacatgagaagtaagcctacaggattagcgaccaaataaatttcttacctccatagataattgtccataaggaccataagtaatacttagattactacagtgattaatttgtaaatgaaaacatcaaatatgcctacttctttgctatccgcttcggctcatctaatgtgtcctttgcatatgttttctctgaaaaataatggttctccacagagcatggagtaaggctctgactctcatcaagaccaggaccaagataactgcagctttcacaggaatcagtttcagatagtaacacaaaatggtaacttaatagtgcattaactaaaagttatacgaaacggaaaaggtacgtcactacagggtccaagtatattactgactatctactcaaataaaatccctaattagtaattacagatcaagttctaaaccagaagtaggaggtgatagtacctgacagtggaatgatccgtaatataattccggtcagacatgctattactctgttggaaacttgctgcaggaaataacaacatatcaggctcagcagtactaatcaaaactacggaaagcgcatagatgcaccaacaagctaaacacctggccatcacctttccaagctcgtaagccctcctcattcagagcagaaccagctacattccttatcacttcctcgagaacaacacgaggagcagtcttcagttcttgaactatgttataaaccgcccttctattctccaaaaatatgtgattattaggatgtctagtttttgcaccagcatgctgctcaaactcatacgcacttagaacctttatacataaacaaaatatcacatcgttaaaatacacagaataagaaacaagaaaaccataaataataaaataacaatcgcaaaacaactcactttcgagaaattgcaagttgtacagccacacaaatagccacccgaatggattatccccagaagctgtctctatcagccatcaaaagtggtataagtcagatacaaaacaccctaaaggaaaatatcgaaacacaaagattcaaactttaccacaggtggggttgaaatatacttcactcgagctccttcaagtatacccgtttccaatagcttcttgacattagatgggtagctcaaagaaacaatctttttcttcggcatcttcacaacaccagcgtcccaagtatgatcctttatcaaaggcaaatcatcaaattccttctttggtttactcaacttaaacgtgatcttcgtgatcccagtcgagctaagatgcttaggaatctccaacacaaaacgagatggtaaaacatcactcgactgctctgtttgtgagctacctacaacggatgcatcgtcacttacagtctcttcggacccaaaatcactcccggagcactcaactaaaccggatttaaccggctggctagagacatcacgaaaaagagacgtgctttcaaccggagaagcgactggatttgaaatctccgatgtaatgtcatcattagaagcttctttagcttgtttcttactgggaaagtgatctcctttattaccttcatcagtatcatcatcaagcctatctcttttcaattgaccattctcttcctttggcatctccaaacaaatagttccttctcccatcagaaatatattcaatatcacaacacgattgcatccaatagacacaacagtaacactaacttgagttagatctgaatccaattacagctccactagaattgtaatctggaatcctcggagaagaaactgtcaaggtggttattggttaacggattgattaatgagtcgaattcaatccaaagatgatgactttatgaagaaatcaattcataaaaggaagcataagaatcaaacgaggaagataagagtaaaagtttgggtataatcaatagtagggaattacggatctaaaagatctggagataaaaggtaagagatttcgaatatgggaacgaaattagatagagagaaaagagaggacggcgaagaaaattagggttagggtaaagggggggaaagagataagatgggggggagagaaggaagaagaaggaacgtgcaaggcggcaacgaaccagaaaacgaaaaagctttgttcgcggtccagattacttttcaaagcaaagaatagagagagatgaagaaagaaaaaagaaaacagaaaaaaaaaacagatatttttttatatttttggaaaaaatagtaattaggagataaaaagaaggaaaataatatccgaatcgtgagaaaatacaaactggcccttgtttttaaatgtaactttttgaccggattactttatctcttaaatttcaatctgcttttagaaaaaaaaatgttgattcgagtaagtattaattttggttgcgatgataatttctatgtataattttatgatattaaatatcagtttaagtcggttacacgaaattatgagagtaaaattggatattgtagttaaccgaggggaaaatatgagataattaaaagtatggagactgtttaagaataaattaaaacctttggagtgattatgtaaatcgaaagaaaaaggggaagaaaatcgtggcagttgctggtgagtg

SEQ ID NO: 12185 - DNA, 3000 bp, Unknown
  misc_feature (1)..( 3000): cDNA_ID_1807383_gDNA_ID_2214536_Annot_ID_134373 3000 nt of promoter + ATG
aaaaggatggctgagaatgagtctaagcctgagggacttcctccttcacaaggtggtaagtatgttgggtttggatctagtccaggtccagctccgagaagcaatcaacagagtggtggtggtgatgttttctctgttatgtctgaggtaaatttggaagctttttgagagtgatttggttagatgcgacatgcgagtgacttctctgtttatcctgtaaatgaatgtgtttgttttacgcgtatatgcttatagggttttggaagattgtctcttgttgctgcatcagctgcaaatgttgttcagactggaaccatggagtttacttccaaggtacttcttttatcatttctgcttcgatgttgtggttgattcgtttgcatcgtgatcagtaagctcactccttggtaacattctgtagtctagttgttaagtttatattgagatcgtgactattcgcttggtgtctgtctaattgccgctatgctcattgctctgtttgttagattatcccatttttgacattgttatgtaacacaaaattagagtcttttctagctgcataatcttcttactttaattgcagtgttaaagctctttttttttttttttgtctttatgcccctgcaaaatctctagggagatcctctaaaacgctgaactgagcataatgccggatgctcgtccttcttttcaaatactgctaacattagaaattatagaattttgaagacaagtgagataagaaacctttgttcattgtgcaggtcaaagaaggtggcttagatcagacggtcagtgagactgttaatgttgttgcgagtaagacaacagagataggacagaggacatgggggatcatgaaaggagtgatggcaattgcctcacaaaaggttgaagagttcactaaagaagaagcatcaacttggaatcaacagaataaaactgagggcaacggttactaccagaactctgggattggaaacaaaacagcaaattcatcttttggaggatcacaatcatcatcaagtggtcacaacaacagttatcgtaactcgaattcttgggatgactggggagaagagaacaatagcaaaaaggaagcagcaccaaaggtgtcgacttctaatgatgatgacgacggcggttgggctggttgggatgataatgatgctaaagatgatgatttctattatcagcctgcaagcgataagaaatctgtaggtcacaatgggaaatcagacactgcttggaccggtggaggttttctctaacggtaagcaccaaatcaagttaaacgaatcgaatatgtaaacgtctatataatcaccacaaaacactattccctaaatcgcaggtgttacaggataatggtgaatgaagtttgtacaattaaggaatagcagagcctgtggtcttctcgtgctctgtcacaagagagagcagagtggtcatctcaaccattaagccaccactggtctttcttttcacatatcaattgcttggcgttcaatcaaatcgatcgtcactatttgttcttctacaatatatatagtttttttttttatttgtacaagtttcacagtcacagaggattgcttgctaaactattcgggttagtcttcagctctttttttgagattcaaacttttatttttcttgaaatttgtaatgatcacaaaagacaaattttccgttttattgtcttctttctcattcgcatactacttttggtcgggttgctatcgtttcttacttcactgaatttctagtttaccgggatctgatcggattacggatttacatattcagaatgaattttcagtacgtcaaaaagaaaatgggttataacgtttttctcagcttatttcatacataaatttcttcagtaccttgaggaaaagaagtagataaatagaggtgttatgtccgaaaatggcggtgttaagcggagatgaaacattatggaagaaatactatgacttcacactaactaaatctcgatataccaagcaatgtctctttggaatgttgaaagtttgaaacttaaggaaggctaagcttgcttaacgtatacgatgcaaattggttaatgaatgcatgtcataatttcatttcacgtctcatttcatgtttgtattttaaaattttaattataacgaagagaagttggtcaatgaaggatgacagagagagcatgtctctgtcacgttttatgttctatcgttcaaaccggaccagttcacacttccattcaataatccgacatcctgaaccaggccaggtaaactcttaaagcacttaaaagagcaagagatatatggcaatccattggagtcaatcgatggaaagatagttaaaagacaaatattcgtaccaatctaaccaattctcttaattataaaaatcaagaatcatctaatgtatacgtaccaactcaaatgttttatttgtctttcttttttattagttgtaaaagtctatttcaagattacaactttacaaaatataatcccttgtacattttaatttttagtatgcactttacgaatataaactataaaagtctctagaagtttaacaaatatatagtcaagtcaatttgaatatttgagaaatcattgtccaaataaacccctttacagtaaaatccaaattttaagatttctgtggattgatgtttactatatcagtagtaactttcttttctagtcattcaacgaaaatctaaacattgattataattagctgtcatataaaaacttaattaattactacctgtcaacagcaaactttctctactcacgcgtgagcctatttaaagccacacagttttcttcttcgttccttaccatccatccaacttgtaactctctttctctatttcttctccattctgtttgctctgcaacatcttttagggtttattattgttggtttcttcattttctttctctaaaatatttgcagaggaagagagagagagagagagagatcatg

SEQ ID NO: 12186 - DNA, 3000 bp, Unknown
  misc_feature (1)..( 3000): cDNA_ID_2708530_gDNA_ID_2214536_Annot_ID_134374 3000 nt of promoter + ATG
tcgggatctcttagagcagggccgtcaatgttatgaacaacaacgcatatgaagcagtctttatctccagactgtggaccatgtagaaaggaaagaatatcatccatggagcgtgaaggaaatgtttcttgacctttagacaaactcccggaactctttcttttacatttcaaaagctcggatagaagttcagctaatgccaaaagaacctaaatttgcaacacagaaaagaacaattagtcatcatttaaaactacttcttttccaacctgaagaacatagagctgcgcaagagaaaaaattgctgcatccaaactgacaaaagagtacctgctttagatttacggaagggaggtagccattgatgaccacaacagaatagtcagtcaaagaagcagaagcaaaatcttcaactaaagctttcttagatccaaagccatacattagaaggccaaagccacacctggaagcagcaacaagaattgagaacaccagaagtatatagacaaactaaaatattcaggttctagcttcaaaagtaagagcttttctcacctgagctcaaagacccactttgagtacatagtcttgtaatcactcataagctcagatatctctttcgagtgcttcatttcaattgtagaagccgtttctctaagctcctgtaaacacacaatgcttctccatcaacttgtcaaggaaagtatctattaccaaaagcataatttaaaagagcatacccaacaaaactcacctgctcatcaacaatatgtatatcagagagcttgtgggcagaacgcttactcgccccacccaattcttttgccaagaagtagtttcttgaaaacccatactcatcttcttctatgttctcaatgtcctccattttcgtgcaacaacaaaataacagaagaattccaccttaaactcaattcctatgtaggaaagaatctcctgagacaacagtaataagagaatcaacactatttctgttttcactttgaacaatggtatgaagctggtaagaattggatcagacccaatcgccaaaagctacacagaaggggaattacggtaattccgaaaacacactttaacacacggtaattcagacccaatcaactgttgttatcctgaagagcttatagaaataggaaagtgcacaacatacataggaaaagaaacacacatcagttctcttattctctcataaatatgagattctaattaatcaatcctccctgaactctgaattcccatggttccatcacaagattgatgccatcaatcaatatgttattgctgctataagagaactgaactaaacagaatgaatctcgcaaacagaacccaactatgatgatgttggagttaagtaattaaagtttaaagtcccaaagagaaagacttttcttcccacaagtaaaccaatacaaacaccaaagctagattatattcttacatgaaaaaccgaaaagatagatctcgaatcgccattttctcaattcagaattgaacaaagaatcaaacgaaacatagaaatgaattagatcgtaaagaagaagctgaaatacgcaaaggggcactgagagaaatgaaagaacatacctttaggaagaggcaaatcgtttggcgacgacgacaccgttacaatgtccctctagccaatgaaagtggatgataagaaaaaattatgacaaatcggtttggttttggttttgacggagaatatatgaatcgatccacacagtttaacctagatttatttgagctgagactattaaaccccaaacatatgaatcagattccaaaaaatagagaatccctacgatgattaagatgcagtctctcaattttcccgcgcgtttttcttcgtctttcccggttaacaactttacgtcgtcgtttcacaatcataaaaattaaacggttccgatgtgatgatacggatgacaacagatccaacggtctatatgtgatgttcacaaaatcacatggctgtgacagaaagactgtgacggctatggcctattgagatttgttaattgggggagttgagatttctcagctgttgttagggatttgtatgaaatgttctaattgtttgaatgaatgaatcaaatgttataatttgtgcattggaaaataatatataactagagttgaaaagcttctaatgagcattattgttctaaaaagatagtcaacagggagataacaaggatttgagttcaaaagaaaagaaagaaaaagatacaacaattcagaatgaaagagtaaattctggtaactgtgactttgctgggatttggctactctaccgtaccagacacgtggaccggaataatgtgaagctgaacaattcctcaagtccatgcttcatgaagtgttctgccgctttttggcctttagttatgttaataagactctacattaggttcacctgttggacaattccagtaccaatctttttttatctgcttattagtgaaaaataaaagaatatcatcaaagacttatggtttaaaacagtgcaatgcataacaatcaatgaacaagaaacaaaccttgacactcagaatctgtccctgcttcatcacttcagttaattccttcttcagacccccatcagttgttctcccgttcatattcacagcaaggacatttggtgtcttaatgctcacctggactttaaactgacttccacaagttagggttgagcggaagaagaaaacgagagtagttttagtttttttggttgttccttccagacccggcccgatatcgaagcgaccaaagcccatgctttttgagcaaacacgtttttagcagagaccttggaaatattgagtgaagctctcacgtgacaaaaacacgcacaaaattattcaagttaccacgtttattaagcaaaacgattgagccaaaaaaaacgcatcagaatctggaacctggatcagatctagtcaggggtcagatcggagagccggcaatataatg

SEQ ID NO: 12187 - DNA, 3000 bp, Unknown
  misc_feature (1)..( 3000): cDNA_ID_1011470_gDNA_ID_2214536_Annot_ID_134375 3000 nt of promoter + ATG
agcatatacgcgtaaaacaaacacattcatttacaggataaacagagaagtcactcgcatgtcgcatctaaccaaatcactctcaaaaagcttccaaatttacctcagacataacagagaaaacatcaccaccaccactctgttgattgcttctcggagctggacctggactagatccaaacccaacatacttaccaccttgtgaaggaggaagtccctcaggcttagactcattctcagccatccttttcgcaaagaaactctccttattcgccgccgacgcctccagctgagaccgtgaatatatatcctcagacgatttcgacttcgccggagcaccacgacctcccgatgacctaaaatcacccgccgattgattcctcctcatatccgtagatctaaacgaatcatcgttatcccaattatcccatccaccattaccagaatctctaccaccgccttgagacaacggaggcttcttattcatcaatccaccaccaaccgattccttaacaatcggcggatctctccattgtcttccctcagctaaagcttggatccgatctcgatacacagacgcggcgttggaattgtacttggagatgatatcagtctctttcgagatcccgtactgagcgagaaaattgttgagacgctcgttgcctccagcgtccattttcttgatctggatctcggaccatgaatccatggtgacggatctgacgaatgagatgtgaacacctaaaccacggtgcttaccggagcattccaagcacatgaagattccatatgaaatcgatgcccattgtggattcttctgggagcaatcgacacagaccttgttctccggctgagattggagcgtccgtaatcgtctcgccgctgccattatattgccggctctccgatctgacccctgactagatctgatccaggttccagattctgatgcgttttttttggctcaatcgttttgcttaataaacgtggtaacttgaataattttgtgcgtgtttttgtcacgtgagagcttcactcaatatttccaaggtctctgctaaaaacgtgtttgctcaaaaagcatgggctttggtcgcttcgatatcgggccgggtctggaaggaacaaccaaaaaaactaaaactactctcgttttcttcttccgctcaaccctaacttgtggaagtcagtttaaagtccaggtgagcattaagacaccaaatgtccttgctgtgaatatgaacgggagaacaactgatgggggtctgaagaaggaattaactgaagtgatgaagcagggacagattctgagtgtcaaggtttgtttcttgttcattgattgttatgcattgcactgttttaaaccataagtctttgatgatattcttttatttttcactaataagcagataaaaaaagattggtactggaattgtccaacaggtgaacctaatgtagagtcttattaacataactaaaggccaaaaagcggcagaacacttcatgaagcatggacttgaggaattgttcagcttcacattattccggtccacgtgtctggtacggtagagtagccaaatcccagcaaagtcacagttaccagaatttactctttcattctgaattgttgtatctttttctttcttttcttttgaactcaaatccttgttatctccctgttgactatctttttagaacaataatgctcattagaagcttttcaactctagttatatattattttccaatgcacaaattataacatttgattcattcattcaaacaattagaacatttcatacaaatccctaacaacagctgagaaatctcaactcccccaattaacaaatctcaataggccatagccgtcacagtctttctgtcacagccatgtgattttgtgaacatcacatatagaccgttggatctgttgtcatccgtatcatcacatcggaaccgtttaatttttatgattgtgaaacgacgacgtaaagttgttaaccgggaaagacgaagaaaaacgcgcgggaaaattgagagactgcatcttaatcatcgtagggattctctattttttggaatctgattcatatgtttggggtttaatagtctcagctcaaataaatctaggttaaactgtgtggatcgattcatatattctccgtcaaaaccaaaaccaaaccgatttgtcataattttttcttatcatccactttcattggctagagggacattgtaacggtgtcgtcgtcgccaaacgatttgcctcttcctaaaggtatgttctttcatttctctcagtgcccctttgcgtatttcagcttcttctttacgatctaattcatttctatgtttcgtttgattctttgttcaattctgaattgagaaaatggcgattcgagatctatcttttcggtttttcatgtaagaatataatctagctttggtgtttgtattggtttacttgtgggaagaaaagtctttctctttgggactttaaactttaattacttaactccaacatcatcatagttgggttctgtttgcgagattcattctgtttagttcagttctcttatagcagcaataacatattgattgatggcatcaatcttgtgatggaaccatgggaattcagagttcagggaggattgattaattagaatctcatatttatgagagaataagagaactgatgtgtgtttcttttcctatgtatgttgtgcactttcctatttctataagctcttcaggataacaacagttgattgggtctgaattaccgtgtgttaaagtgtgttttcggaattaccgtaattccccttctgtgtagcttttggcgattgggtctgatccaattcttaccagcttcataccattgttcaaagtgaaaacagaaatagtgttgattctcttattactgttgtctcaggagattctttcctacataggaattgagtttaaggtggaattcttctgttattttgttgttgcacgaaa

SEQ ID NO: 12188 - DNA, 3000 bp, Unknown
  misc_feature (1)..( 3000): cDNA_ID_2711609_gDNA_ID_2214536_Annot_ID_134377 3000 nt of promoter + ATG
aacttttatgattccatgtgtgagagtgttcctccaggagactttaacgctgttcaaatccacaaaaggaaggctgattatgatcaagtagccttcttcgtcctcatagatcgtttttgcagcagtaacaggtccataaacgtttttcatggccccagtaaactcgtttgaccaagtaggtagctcattctggtgagcttcgataacaggaggttgtgggtttacagttaagcaacactcctcctcatgaatcccatttgagaacaagtccttcctcttcttgtggctcgaaggagataaatcggttgcttcaccattagaatggttggatggttgagtcgagagattgagccccgagccattgagtagtttcttagagtggtttgcagtaggattcttcaaagaaggtgtaggcctctcaagctcaaagtcagtgttgggaaggtttctccaagaaccaaagtcactagcttcaggtggaatggtgaaattcaaatcacgacccgtaagctccatccaccttttcctctcttcttcatctagacacgtgaggtttggcaaaggaacaagctcaatcccatgaacgcactgcggattcgacaaacctctgtagtgtttcctctgcattctgtgagacctaacaaaccctttctcaacactaaatggaaacaaacgatccccttgtctagaatgaccattcatgtaactcctcaactgcatcttccctagtgcattctcaggtctttccttaaacacccacatatacatattctccatatcatgctgaactaaaaacacatcaagcttcaaatccgacttgtcaaaaccagatatcccattactatcccggacgattttcgcctttgatttctcgtttaacgcaggcttgaagtagaaactgaagaaaaaccaagcaccccagatactatcaacacgtttagcacatttcctcccaaccttaggtacaacactcatgtaattctcagtctcataagcttgtgaacctaacccaacatccaaaatatcacaagcatctaaattccacggcggaggaggaggacttctctcagctgagagaggtaaattgatatcaggagggccagagagcagagattgcctgttgttattcatctccaaatcaagctcctcatgagaagaagcacttgaatccatagacaatagagtagaaggatgatgattctccatagccaagacgttaaaacaaagtatctaccaccatctcagctcacaccagagacaagtctcatagccaataaccataacaacacttgtaattctcatcttcctctcccaaagttaaacacttgctaagaagaaccaaaccacttacagatatatctaacccctattttcccaattccaaattctccaattgttaacttctagattctaataaacaccaaaaaaaaacgaaactttgaagaagatatgaaaaaaggagcactctttttttgccttaagcacagataaacccagaaagaggagaaagctaagatgagcacgatgcagatggtatcgtcatcatcattagcaaacaaaatcgaatcgattactcagtctctgtggcttcgccaacacaacaaatcttgatttttcttcttcttcctctttttttttctgtagagagagagagaagaagatacggacccgacggagaaaacgcctgccctggatggaaccgtggagacttcctccgttacttaacggtgacgatgtttttttttttttttaataagaaacgatgattgtatattggtcgcttctcttgcttcgtataacagttttttctattaattatgaaatatgttaaatttttggtgataagaaagcatataaaagattgatttttcagccaacgttgtttggatttgtggtaaataaagaacaacaacatatttgtgtctacatcattactctaaagtgtctttatctttgtggtgaattgtatgtttcttatcacattttcttccatcaaacaacacttcatgaaatttgattattctggatttcttttttagaacatgtaattcatgtgactatttatgtggttagagtctctactatattttggagtatcccttaggtcttagctgtacatgactacatcatgttaccttggatagagatagctagagttttagatataaacattgtataatctttttatatgattctgataccgatcataaaccaattatgagaagtagcaaaaaaataaaattatctagtgattatatccatcattttaaaatttaaatcttcatttatgatcaaattagggcaaagatcttcactctcttttttttgtcaataaagatcttcaccctctttagtttcaaaactctcatgtaaaaccaaaatttagatatgagaatcgtgtaccgctaaaatccatcgttagtctccaatatacctcaaagctgaaaaaatcactggcccattgagtttacgacccaaaccaagagtcccaggtaaataaataaccaaggtggaataaagaataaaaatcatttttggtgacaccgacaaagcaccaaatttccaaccactacttccatgtacccatcataacaaaacaccaaagaagatcctacttcatatctcactcattcatttattaataccaaaattaattatacatgatattttgattacgaagacatgctgaatgaaagaaatatactatattgttttacaaaaagaaagaaaaaagactttaaaaagagttatgtaataccgaaagtgattgttgcatttgagattatcaaattatacactgaatactacttaattatcgttacaaataacatttggaagacctattggccggttttatttttgaatattccactcagtttaacaaatatataattttgacctttcgccggagaaaaaacaaaccaaacttacttagtaagaagcactttccattattattatctctgttcccccaccacatttcatattcacataataata

SEQ ID NO: 12189 - DNA, 3000 bp, Unknown
  misc_feature (1)..( 3000): cDNA_ID_1976286_gDNA_ID_2214536_Annot_ID_134381 3000 nt of promoter + ATG
tttcgggaaaaaaaacgttcagatattttccaaacgtgacctaaagatggtcatcaaaataaaaatcataaaaactaaagttaaaaatctttctctctctcattaatcttatttcttgatcgtcattgttgtcgtcctccactgcaaatccgttataaacgagttgacgtcatcttccggcaagaaactcaaccgtctccggcaatacattgttctacctctaaacatctccgacgaacgtttcatcggcgccggtggacattctctaactatagggattctattctccggacgagtcggtgtcttgaacccatcattctcttcctccacaacttcttcttcttcttcttcatctaatctcttccttttcagacaaatatccaacacaagtttatcgtcggaacattcttcttctctcgtctctttaacaccacctaacgttacctcttcctctttcaagctcgtctccgacatacctaaaaatctataaaaatcaagaaatggcacccaaaaaaaaaactcttgttcctagatagagagagagaagagaatgagaagaataagaagaagaaataatgattgatcgatgtagatagatccaacgtggtaaagaatattaatcaagaaaattgtcagcttttgtttttttattaaattatttttcaggtttatttatagtcggagattagagcgagtttgttgtgtattgttggatgtggtaaggagagtctaaaggcatacataacgtaaccaaaccctctgattcattgagaaggagacattattcgacataataccgttacgataaccataatatctcgtcgataaagtaatcaaaatatcgccgatgcctttctgcttctcgcaagttaagcaccaaattgacatctgcctttacgtttccaatctccatgtgcgcttttttttcttctcaggaggaaaaaaatatatttgttgccgttagactttaattacgtatctaactcatatttattaccacctaatcttattgctaataacttttgtgtatttataaggaggagacccactcttatagttttacattaatgacttctatgatcagtttagataaatatttttcctcaaccggactaaatgtattcttctatatatatataattaggataaacattttatgtaagaaatctaaatattgtttagttgaatgtaagaaagttttttggtgtaaatgttaagaaatgaatgtaagaaagttttcttccctattcatttttttgtcttaactttggtgatttcatgatatttatttcatttaagaataggaaatcgcttgtgaaattggaagcaaattaagaaaatacatgatagagcttttaaaagtgtggatgacctttcaatacatatttgcttggaggcgatggtgaaaaactgaaaatgacatcagatacacgcttgtgaaccatctttaaagtattgatggactcttcactatgaaagctctctttaaaattaattttctttgtacatgtctctaagcaatgtcaaattaattagaggtccaaattcaaaaaaatgtcgtattgaatcattccattactaaattggttcaatgtcagatttaaacagcctagggataatttagtgagatatgagattctactttcaacatatactaatcctaaatctctagcaactttttatataagctataaatatcatgaaaatgtattttaatcgtttcataatttatgcagtcacactaatggaaaaaaggccaattattattattttcttcagactataaatgaaaacataaattaaaatgcagattagtttaaaattttaataagtaagtaaaatgcttatagccttatacaaaatcatatttggaagtttctaacattgttgcaatttgttatcacaaatcacagtaatatttgtatactaattagtaattacaactatacacaaatttaaatgggtaatcatatatttgtgtccagtggattgaacaaatatgctcggcccatgcggaagtaatgccaattttgggtgagtaaagcccatgcgaaattttcacataagaaatgcatgctttttgttttcaacgacatgagttgcatgctttttatcattgcttatatagttgcaagtttgcaactccttgatattttttttatgtagacactactaccaccaaaaacttttggtctgcttattcttgtttactatgtaaaaaaaataaatgaattgtttatttactccgatttgatggagtctggtttatgaggttttatagcctttacagaaaattgatagttacaaaaatatttttcaaaaataaaagggtaaaaccgtcatttcaagttgttattgttttgggggactggatttgaaatgaaatatagaaccggaaaacaaggtgagccgaagtcgaagcctttggacccgtttttatatttactcctcccattcccttctccttcaatccttccttcctcctcctcccttcttcttcttcccctctttcattttccagccactacaaacttttctatctctactttttttcctctcgatttcaggtactttttgagaccctttgttgtgattttcgaacacacaccccaattacgtttgatttttgatcccgcatcgatttcaattcatccgtttctgagtttcttttggatctgggtgtcttgagctaatcttttcgatctgttgtttatcgattttactcatgcgtatgttcattacaccatttgttatttgtttaatcaaccaaaagactcatgtttttcaaatgtctttaatataatttttctgattgaattttataatatttacatgattctggatccagaatatccttcttcttcttccattttgtcctgtattgatttgtctttgaaaaaggattgttctttgtatctgtattggtgaaaaaggattgttatttgttgataaaaatttgatctttaaacaatgtttggttttgcataaaggtagaagaaa

SEQ ID NO: 12190 - DNA, 3000 bp, Unknown
  misc_feature (1)..( 3000): cDNA_ID_1808260_gDNA_ID_2214536_Annot_ID_134383 3000 nt of promoter + ATG
ggataaaaactgaattctccggcgctgctacaacggtgtttatatgatcggaggagagattgtaattgaaaccgtcgtatagtgttaccggagtgaagctatgcgaagaaggttgatcgggtaaaccggataaacggttccgattaaccatacctgaaatcccggttagacttggttcagtaatcatttctcgattgagaaattattaaggaagaagaagatgattaccgaaggaagaagagaagacgacgtttagagggtgaagagaggaatcagaataaatgcgtttttaatttttaaaataattaaaataaaaaggtcctaatctacgaggtagggaaaagcaaatcagagccgttggatcatatgcgttttgtggggacctgtcgtcgtcgtgctttatcatttttttgacaatagctaaaatgtgcttttcttatcggttcattgttcgccacgtgtcgtcattacagtaagtaaagcttacttaattattttttaatatgcaaattagtacgagtagtacagttttattttattttgggttagtggcaagtacacatttaatgagatttatgtatagtttttttccccaacttggatggtactaaaatcaaaccttaattagtttttaagaaccttaaatgttgacagagttctttaaactttttaataattttcttagttaattaagacccatttgattaagataatgagagagtctctcgaccttcccccaacggcacaatggctataaaattcgtttccaactttaaaatagaatcatatttttagggtattgcttgtgttaatccatgctccatgctatgtgttcagtagcaatcgaaaccagattttatacccaacaaaaatccatgctaagtgccattcaaaatttatcgatttatgtttcatacaaaaatgtttttgtgtttattgcttgcttaaaggagtaagatagtaatgttcgtgcaaacatttttcaactttcatattggttgcgtcttagtaatacgatggttatatgctcacgtgaaaaaaccgtaaaaaaaaaaacagatagctagaccacaactagtgttagatcaagcatgtaaaagtccttaacattttagcaagaccgcaaacgaactctcgcataatctttgcgtatgattcgtctatgatctattctctggatgcaagtattcatatatttgctgacttttctccctaatataaattcaatagttcattgtcattttatgcatccttctttctttatctagtttagtttattttagttacgtttgtaatgcttagttctttataaaaacacaaacaaaaaacttactcatttcgttttagctgtttctaacaaattaagcggccaacatctccatcttttgtagatttgaatcgtactgagatattacaaccctccatttgtagattacaaagatattgcatttgcgcacatgcgaccaccaactaacattaacgcatggattgcaaatggaattctagagtttatggtttccattgacgcaaacagggcagcaccgacatccacccatatgccggtggatagtcagggttaaagacttgattcatcacaggcttgttacatagtagagagcatgatctcaaaacttattagaccgtttatatagtagatctatctagtaattttttgtggagaaaattgtgatattctaatttgactaaatgctacatagagaaagattcaaagattttcatttttttagtccaaccgttcttttgcttctctatccatgtctttctattcccatatttctgcaaatgatttgctatacattatgtgtgaatagttatataaattcaagtaaatttctttgaacaattacaatgatcgaaacaaattgattggttcaacaaatttcttttaactgttgaaattatatatgtctttttactttttagtttctacatatgaagttggaagtgtttggaataatgtatttcaattattgtaaacagtaaaacaaagctgctctaaaatcagccattcggagccttggaacttataataattcacatggaacataaaccttgtgtaacaattatatcacagacactccacatgctcatataatatacgataactctcgagaagcttgtcattcaacttttgcggccctatgagaatgtgacaatgtcatccatttaatacaacttttattattgttcagaaaaatcataaataaacaatattcatatgctgatgctgcaaaactaatttatttatttgtatgtcgaccttagtctaaccacatgctcttaatgtgatgctcgattcgtttggttcatttataagatatgttcacaagaaaatatagaggaaaacttcatacatgtttttacgtttgtttaatacatttatatatgttaacaacttaacatgctctgtgactaaaaaaacttatacatgcgtgcatgcgtagataatggcaaataaaataactataacctttttacttcgtgaaaaggaaagacaaacatacgtgactgtgtttggcatataattttggtttgttttaccaaaaaaaatattatatttataattttggtttgattcggttatacgaaattcgagcttttggttttttcggttttcaactatgaataccgaaattaaattttgggttgagagctgtttggtttcggatataacataactaaaacaacatctatttttcagttttggtttactaatttatctgcactaatttaattttggcacataaccacaattgccaccttcggtttagtctcagaaagtgaaagccaatcaaaccaatgagatgggcagcaattaatttacctaccaaaacctataaatctgaaaaattacagaaaactttaactggaaggttaaaaacacccaaccagcatcagtccccataaatactcgtagtccttcccgctttctctcgtccctatccaatacacatctctctctctcttattaactcaatg

SEQ ID NO: 12191 - DNA, 3000 bp, Unknown
  misc_feature (1)..( 3000): cDNA_ID_2711601_gDNA_ID_2214536_Annot_ID_134386 3000 nt of promoter + ATG
tggtttcagcttttcttcttacgagttgcaatgatgaatgctaccaaaatcatcagacagcgccatatgatactctcgtctaaacatgcgatgcacgtgatccagtacattatgacgtgtcaattattataaattattagtaagatatttttttgcttagctagtagaccagaccaagtaaagaactaaaaatactattttgtcattatggtaccaagctaatagtttatctggaaaaagaacaaattgtccaaaaaaataattaccaaatagttgagaagtttttctaaaaatttttgtaaaaaaaatccaaattcttctaaaattaagtttttaatagaaatttaaaaagacagttctacatcatattattttctttaaataatgatataaaatttataaactattatctttgtaagataatgaatatttatacctatgtaagggaaaaattgataaatatttatacatcctcatccaaaagcccataaaatcgttatgggacaatagtaaaaaagattgcaaaatcgtatggagcgaaagataaaaataaaaaacggtcccgtgtaagaagatgggtcacctcgccaacacgtagactcttttcacgcgccaaatcaaacaccatgtcgacgagatcaacggattcaaatgtttcgtgtaatacacgctccaacgtagcgcgtcgtacacttgatgcttaatttatgtattttaagttacgcagtttccagattttcagaccctctgaaagtggaaagagcattttttaaaagagtaataagaaaaacaattatctttgaactctctctatctctctctctctctctgcgatctatgcctgaagtggaagtggataacaacaacgagaagccatctgagattaacaggtttcagtttctcaatctattcctatatattatcattagagatcaaatttcttattatgcttcttctcagtttctttaagatacagaggattgactgattatgtatgtattcatgtcaatggttgaccaaaaatcatagctgcagaggatgattgaagttttatcttgattttagcttatttaatcgttgagattaagaaagttttcctgttattctttcctaaacccttattaagttcaagattaataaagtcaatttcatatatttggtgattaagatccatccactatcttaatatgtgttgttctttttttttgcagtttccatcacatgatcataagtagtagtaaaaatgtgttgaaaatggaagaagttgaggtgagcaagaagaggaaatttcagacagatcaatctgatgagttatcgttattacctctgtcaaaacacacttgttttgccaatgttgcttgttcagagaatacaaatggtaactcggagattgatacagagtattcaatgtcttcttatgtgaactcaacaacttctatggagtgtaacaatgatatagagatgaaagaggaatcatctggatcatgcggtgaagacaagatgatctctttcgaaagccatctagattacatctatgggactcagaacttagaggatttttcagagaaagtcattgaaaacattctctatctcgatgaacaagaagaagaagaggaagatgctaaaggatgtagtagtaatgctgctaagtttgttctgtcctctggaagatggactgttaaccaaggtaaagaaaaccggattttggtttgaccgtattgattcaatgaaccggggattcactaacttggtttcatgtgtacagatgattctactctacatgagacaaagaagcctaccattgatcaagaatttgaacaatacttctcaacgctaatgctgtaacaaaatgatgttgagactcaaaacatatatgaagagatgtatgtacatagaactgtactcgttctgttttgattcttgtcaaccttaaaaaaacgttcaattcaaagtgattagagagcttctttgaaatgtttgcaactctagtcttcaacttttaagatttttattagcttgcaaaactaatcttgcttatatatcttgttctgcctggatcagaaataaaagttagtataaaaaaattctgagatgattatgacactctgatccttcatatgaaccaatcttgtgttcaagagtatccctgatgtatttcagtaccaacttaactgagaaatgagagtcaatgttctttaataagtttgttcagatgatatcttcttctttttttggttggtcacctatattcaatctgctctctccaaattatctccaatacactctcttctgaacataatacaaaaattcataactttttcttattatggtcaaaagtcttgttaatattcaacttgttcctttctaatgtaaaatctaaactgatttaataaagaaaaagatgatagcttattgatattcttcctagtaaaacattttggcatgatggtcaagactcaagatttgctagaatgtggttccctcgcattatcagtcttcttggtcaatgtctagtagttttaaattcgctataaaaatagcaaaaaaaaacaaaaacaaaaaattgttgattaaaaagaaattaacaccaaactttaaaaatagttatccttagtaattttatgtaagtatctttaacacgtaaagtcgaacatagtatatgattttgttcacactaatagtcgaacaaaacgtaaattaaggtttgaattataacgaaagcaaaacatgcttccacgacctttggttttgacttaagatcttaattaacatcatcaaacatttttattagttatggacttatggtaatgaaattgaacgtgaagagatcgatgtgtcttacaaaaagacaaaacacgtcttcaacactttcctccataattcccgatttgcccatcattccataacggtgcctctgaatcatcaatgatcggccaaattttctgatttcagatttcaatcaccattttcaaattcggtggagctagttggtagatgatg

SEQ ID NO: 12192 - DNA, 3000 bp, Unknown
  misc_feature (1)..( 3000): cDNA_ID_1833613_gDNA_ID_2214536_Annot_ID_134388 3000 nt of promoter + ATG
ttatcttacaaagataatagtttataaattttatatcattatttaaagaaaataatatgatgtagaactgtctttttaaatttctattaaaaacttaattttagaagaatttggattttttttacaaaaatttttagaaaaacttctcaactatttggtaattatttttttggacaatttgttctttttccagataaactattagcttggtaccataatgacaaaatagtatttttagttctttacttggtctggtctactagctaagcaaaaaaatatcttactaataatttataataattgacacgtcataatgtactggatcacgtgcatcgcatgtttagacgagagtatcatatggcgctgtctgatgattttggtagcattcatcattgcaactcgtaagaagaaaagctgaaaccagatcttccttcgttaactgttttcagctccagcttctgaaacggactgtccagaaacaaaatatcatcaggttttatctcaaacaacaacagattatatagtttgtatcttggactaacctgctgtttggatcataatagaaaccgctgatggaaccatcgctgcaggagaagcatacgtagtaaaatccagctattgttagtccacaatctgtgccaacgtttacaaagtattgctctttccatctctgcaccaccacaaaaataaacccgagttgcaggaattatggaatacttgagagaaaatgatgattggattcgataggaaaaactgagagttataccataaatatataaggataattgttaagatccaattgcctgccaccatcagattcaacttgtccctgcagtattaagtccagaacgttgcttaggagatgttactgactatacaaacaatgttactcgagtgttacctgaagaggcgaaaaagacgggaactttgaccaatgtctcatatcatcttccctcctgtgacaaacaaactttcaaaaatttattcacgataagaaatcatcagtttcaaatctacaagaatataggaattgggacatacgttgcttcccattttccggtgtaaaaggtataattctttccatcaacgatttccccttcccagaatgttatgacctgacactcacagaatcaagaatcgtgtcccctattagaaattcaaggggaagcaatatgaagaaaaaatgagtaagagtgtaagggcttacaggagtgtctgccatgggaacgtttagagcttccatggtgccacaaagataaccatgttcaaggtcaataccctgtatctggacgttgactctccaagcttcctccttctgttgattagagacattttgcgtaccagaaaatgcctgcagcacagcataaaaacatgtgtgttcctcatctttaggttcattatgaataaacaatctctttgagccaatgaatgttatacaatcccaactagatacaaatgcacttgaattaagcatacatgtcaacatgaaaaagatatgaagccaatcaaagcagacaaggccaacttctaattggtataacaaaaatcagcattactagagaatcgttatgcaaccagaacacttgaacaagttgcagatctaatgggaagaaagtaactagacccatgatgtttgttgcctgcctatgaatgatgctttgtgcctgaacaacgagacacgagatctttaagttcttttatgctaacctaagtagctaaacatcatggaaacttataactttccttctcatcttaccatagcctctctctcacaaatttcacataaagtatactagcaaacccttgtgaagcaaagtttcttctataactaccacagccaatcgacagaatcaacaataaaaaaattagctattcttgtgatttcaagtattcataagtaagaacttgtcaagtttgagagaaaattcacctttacacataaaaacccctaagataatgtctttataggtatactcagattctgcttacacataaggttatgttcataaaaagagtgtgcatacataaccacagatgcacaagcataactaataaagttctttctagtcctaaccaatattcccaagacctctatggtcagacacttgagagaaaaacttgtaaaaatccaagtatcatacgaatcctagaaataaatttctgcaaaataacatgttttgttaattcattaatcgttgtacctggccagcgccgagaagtgaactagggggaagtggtgatcgattcccaggatcagttcctaaatggcaacaaatctcaacaaatgagcgagagagccacaaagagggaacataaacaaacaaacctaaattcaaaacttgaagaagcgatcaaaaacctgaaacttgagcaggcgtgttgctctcaacaactctcaccggcattttcttccgtctcctcctttccgtctgataaaaatccgatctttggtgcgaccaaatcaaatcgtggagcctaatcaaaaaccacatctcatcatacccggttcggttttcttaaccgaatcaaattatacataaaacggattaggcttctccggttttcgactgcgttttgtataaaacctctcaaaaaccttttcttctctccccgtcagaccgatcttctctctcctcgccgccgcctccaaatccggaagaagcttttttccacctctattatcgaacttgctttataaaaatctaacctttggacctgactttccgacttctctctctgtctagctgcttctctcacccaggtttgccttcctctcaagttgaagctgcggctttattagtttagctattgactctaagaatgttacttgaatccattcacatgagcttcttacgtcgttttcattggtttagctattgacgttgacttgggttttgcttgagttcattctctattgtggtctaccatactttttcatgttacttgattgcatatttataaaacggtgctaaaagtattccgttttgtatagcattctag

SEQ ID NO: 12193 - DNA, 3000 bp, Unknown
  misc_feature (1)..( 3000): cDNA_ID_2708511_gDNA_ID_2214536_Annot_ID_185103 3000 nt of promoter + ATG
atgattgatttttgggttttatttctattgttttattttgggggataaattgtatgaaaagttcagctaaaaaaaaatggaaaaatctaaaggaagtattgagtagtatatgtatgtacacttgaggcttgagaacaaaatttcatatacaattaggtatattgacaccctaagtcattttgttataattagtagtacatgtttagacaatgtttccaggagtgaatcatacatatgctaccacataccattcatttctcagcttctagtttacgacgttgagatatctattcacagagaaaaaaataaagattggttaatggggtcagatgagcccatattatgattcattttctgggtaaagttttcgatatatatgatttagcttggatatgcaaatgactatatgaactctgtagtatattatttagtaatagtagtatttgaaatgataatgtacatgaaaatacgaaaccatgaaaacgagcaaaatacttttgtatatataaacaagagcaaagtattttgtatagcccagcttcactacctaggcgatcgtttaaatgcgctttaaaatctcagcttaattcgaatcttaccggaaaaatgactaactaagttgttatggtttccataataagaatacggggtcttaataactcttaagtccgaaacctcttggttaaaaattaaaaaaaaagtattgacacgtctatacttccttgagtgatttgaagcatgttgtgtaacaacaatccaaaataaaatcacatgaagatggaatattttctgtcacaatttccaagaaagagatcgaatgatgaataattctcccatagatcttagttagtaatttattaaaggaatttcgatagctataatataattaatatttacgtaaagtagaaaaactcggaagcaactaattattgttctttttcctatcataattgcaggaactctggcaaataagttcgtaactaattttgtaaaacaataaggaaatagtttaataatgactaattcctcgttgttaaacgtcgttataagctcgtttccacatacattcgcatctcagtacgtaacatgccattctgtcaaaatcataaaaataagcataagaaagagcacaaaaatccaaatatgtcacaacacatattccctttcgcttgttttgtctcaatagataattgaatagaataaaattatatactactccaaccatttagagtctctaccctaactttttagccccatgggttaccaactcttctatcgcttagacttaacttaatctataaattttcatatcgtatctgtaaactaggtttgcactgtttctatatatcaaaaacccataacgcattggaagaatctgtttatacttaattatatattacacatttacattacataaaccatagtattttcattcttaatttctatcaaccatccggtttctattgatacaaccaaaaaaactttttgaatacaataagtgaaagtttttacattagtggaaaatgtttacccaagttgcttcccaatcccactacgtagtacattaaataaggtggtgagctttataggggaaactatatatagatgcatatacgggcaagtatatatgatatatctacttgtctaaagaattttggagctaatctattagtgagattttactagaagtctaaaaatgaaaaacaattagtatagtctcttagtgatttgatttgatatgattttatagtgtaaaatatatatgttgtatgagattctaagaaatgatacagtgaaataacatagaaactttcttctttttgtgcaagttgattttgaaaagaatttaaaaacagatattttctcttgaatgtttttcgattcgttcatgaacccattggcataaacttcaaagctatcaactaattcttggtttacctagctagggtttggttattagttagatacgctctttagattgctataaatataatgaagtggtcttctctgtatataacaatacataggtggaagtgaagtcttcgaataaaagcagagcttccacatggggaatgaatctcattctctgtaactcacatatttcaatagttaaattaataattcaaatatgacaataatcaaatatatacaatacgtgaagggaatttttttttggattctaagaattaaagtgtcacggaattttggacgattctttagataataatataatgcatcaattactggacaaaaattggttatcaattatttcccaatagcaagaccagtcgacatatgtctgtttgaaactaatcaacaactagacttcgaatactaacagaaatataatacacacaagtacactggtacatatgtaagcgaaagttctacagaggatcctgacaacaagaaaagaccaaaaattcttggttggtccgctttaccagtctggtttcttttattttattctcagttttaaagatgtgagtgaggttatgtaagtgatgttttgtcaacgactcaaaagagtaaaatatacctttgattcaagtttgttactctcttagtcttatggttaagatttttggacatttccttcactccaccatgcttggcccaataacatacgtatgtgcaacagcttagggtccataacttttttaaaaaaatttggtggtcaacaaaggtccattactctagtcatacagtatctgatagtcatcctatatgcttcaaagttaaaaccattcctatgttttagaagatttgttttctcgaaaccatatatttcatcaacgaaaataaaggagtaggaatattcgtcgaatataaactttctcaatttgtatcgcaatatatgtaaactttagctgcaaaaatataaaaataaaaataaaaataaatgtcaatcttatttccactaaaccctattcgtacagtcgtaacatatttgtacaaaataaagttccacagaccataaacatcaaaaaaaaaaaaatg

SEQ ID NO: 12194 - DNA, 3000 bp, Unknown
  misc_feature (1)..( 3000): cDNA_ID_2711593_gDNA_ID_2214536_Annot_ID_185099 3000 nt of promoter + ATG
attaagcattaatcttggaagttgtaacacatatcacctaccttcataatctttctcaatcacgagtatatccccacacaaggaaaaataaaagagctagtgacgacttttccactctcttcacaccataaatcgtctctctttctctcttcacaactaaaaacaaagcaaaagaaagaacaacacagagcagagaaaaaaaagaggtagccatgttcttgaagcttttaaccatcttcttcttcttcttcttcaacctcatctttcaatcttcttctcaaagtctcaactttgcttacaacaatggctttaatccaccgacggacttatccatccaagggatcacaaccgtcacacccaacggtctcttgaagctaaccaacacaaccgttcagaaaaccggtcacgccttctataccaaaccgatccggtttaaagattctccaaacggcaccgtttcatccttctcgacatcgttcgtcttcgctattcactctcagatcgcgattctcagcggtcatggcatagctttcgtcgtcgctcctaacgcaagccttccttacggcaacccaagtcaatacataggtctcttcaacctcgcaaacaacggtaatgagacaaatcatgtctttgctgttgaattagatacgatcttgagtacagagttcaatgatacaaacgataatcatgtcggaatcgatatcaatagtttgaagtctgtgcaaagctcgcctgctgggtattgggacgagaaaggtcaattcaagaatctgactttgatcagtcgtaagccgatgcaggtctgggtcgattacgacggacgtacaaataaaatcgatgtgacgatggctccgttcaacgaagataaacctacaagaccgcttgttacggctgttagagatctttcttcggttctactccaagatatgtatgtgggtttctcctctgcgacaggctctgttctgtcggaacattatattctcgggtggagtttcggtttgaacgaaaaggctccacctttagctttatcgagactcccgaagcttcctcgcttcgagcccaagagaatctctgagttctacaagatcggaatgcctttgatttctctgtttttgattttctcgtttattttcctcgtttgttacatcgtgaggaggaggaggaagtttgcggaggagctcgaggaatgggaaaaagagttcgggaagaatcggttcaggttcaaggatttgtactacgcgaccaaagggtttaaggagaagggacttcttggaactggtgggttcgggagtgtttacaaaggtgtgatgcctggtacgaagttggagatcgctgttaaaagagtttcgcatgagtctcgtcaagggatgaaagagtttgtggcggagattgtgagtattggtcggatgagtcataggaatttagttcctctcttgggttattgtcgtaggagaggtgagcttcttttggtgtatgattacatgcctaatggaagcttagacaagtacttgtacaacactccggaggtaacacttaattggaaacagaggattaaggttattctaggtgttgcctctggcttgttctatctccatgaggaatgggaacaagtggtgattcaccgggatgtcaaagctagcaatgtcttgttggacggagagctcaatgggagacttggggatttcggtttggctcggttgtatgatcacggatcggatcctcagaccacgcatgttgttggaacattgggatacttagctcctgaacatactaggacaggacgtgccacgatggctaccgatgtttttgcgtttggggcgttcttactcgaagtcgcatgcggtagacgtcctatcgagttccagcaagagaccgatgagacgttcttgctcgtggattgggttttcgggttgtggaacaagggagacatcttggctgctaaagatccgaatatgggttcggaatgtgatgaaaaagaggtggaaatggttttgaagctaggtctcttgtgctctcactctgacccaagggctagaccaagtatgagacaagtgctacattatctaagaggagatgcaaagttaccagaattgtctccgttggacttgtccggaagtgggatgatgtttggggttcatgacggatttagtgaattaggaatgtcgtattcctcctccgtattcaaagggtttaccggtggatcttccatcgctgattctcaactttctggcgggagatgaatagaatgttttgaagttatataaagtatatgttatttaatggcgatagttatgttttaaatatatttgaacctttttgtgtgttttgcatttcatctgtagagactatttgggcgagatatgggaatgggactatgtatatatacttcagcatatgttgaaaattactgtctaaagaatattatggccacatgataatgacgttacaagattgtgaaatgattcctctatttccttcatttcaactctattccattcataatcatgtgggcataataagagttgaaatggttgtatgaatctaccctgtgaataagtactattgacaatatcttttaggaaaggtatacttatagatttttcagtcctctaacatggttgtatgaagatgtattaaacaaagaccccagcttcgctggaaaagcagctccttaaattcccaacaagaaaccaattaatgaaaacagtaaggcaattgtcaaatgattaacatagtatttgggaagcgtgtagattcaagagaatttaatgaagaaaaggcctcgtaaagtcgaccgataaaacgggatctcttatctgttaaacttaaatattaggtttagaatcttttttgactttcggaaaaaggaagtctcatgtgcctcacatgtgaatgtgattccctctattctaactatgcaagtatttgtatatatatagagcattcgtacatacaaaaagttggacggacgtgaccgagtctttgtgcggaagaaaaatg

SEQ ID NO: 12195 - DNA, 3000 bp, Unknown; identical to SEQ ID NO: 12192
  misc_feature (1)..( 3000): cDNA_ID_3024200_gDNA_ID_2214536_Annot_ID_185098 3000 nt of promoter + ATG

SEQ ID NO: 12196 - DNA, 3000 bp, Unknown
  misc_feature (1)..( 3000): cDNA_ID_3024204_gDNA_ID_2214536_Annot_ID_185096 3000 nt of promoter + ATG
tttatacaaaacgcagtcgaaaaccggagaagcctaatccgttttatgtataatttgattcggttaagaaaaccgaaccgggtatgatgagatgtggtttttgattaggctccacgatttgatttggtcgcaccaaagatcggatttttatcagacggaaaggaggagacggaagaaaatgccggtgagagttgttgagagcaacacgcctgctcaagtttcaggtttttgatcgcttcttcaagttttgaatttaggtttgtttgtttatgttccctctttgtggctctctcgctcatttgttgagatttgttgccatttaggaactgatcctgggaatcgatcaccacttccccctagttcacttctcggcgctggccaggtacaacgattaatgaattaacaaaacatgttattttgcagaaatttatttctaggattcgtatgatacttggatttttacaagtttttctctcaagtgtctgaccatagaggtcttgggaatattggttaggactagaaagaactttattagttatgcttgtgcatctgtggttatgtatgcacactctttttatgaacataaccttatgtgtaagcagaatctgagtatacctataaagacattatcttaggggtttttatgtgtaaaggtgaattttctctcaaacttgacaagttcttacttatgaatacttgaaatcacaagaatagctaatttttttattgttgattctgtcgattggctgtggtagttatagaagaaactttgcttcacaagggtttgctagtatactttatgtgaaatttgtgagagagaggctatggtaagatgagaaggaaagttataagtttccatgatgtttagctacttaggttagcataaaagaacttaaagatctcgtgtctcgttgttcaggcacaaagcatcattcataggcaggcaacaaacatcatgggtctagttactttcttcccattagatctgcaacttgttcaagtgttctggttgcataacgattctctagtaatgctgatttttgttataccaattagaagttggccttgtctgctttgattggcttcatatctttttcatgttgacatgtatgcttaattcaagtgcatttgtatctagttgggattgtataacattcattggctcaaagagattgtttattcataatgaacctaaagatgaggaacacacatgtttttatgctgtgctgcaggcattttctggtacgcaaaatgtctctaatcaacagaaggaggaagcttggagagtcaacgtccagatacagggtattgaccttgaacatggttatctttgtggcaccatggaagctctaaacgttcccatggcagacactcctgtaagcccttacactcttactcattttttcttcatattgcttccccttgaatttctaataggggacacgattcttgattctgtgagtgtcaggtcataacattctgggaaggggaaatcgttgatggaaagaattataccttttacaccggaaaatgggaagcaacgtatgtcccaattcctatattcttgtagatttgaaactgatgatttcttatcgtgaataaatttttgaaagtttgtttgtcacaggagggaagatgatatgagacattggtcaaagttcccgtctttttcgcctcttcaggtaacactcgagtaacattgtttgtatagtcagtaacatctcctaagcaacgttctggacttaatactgcagggacaagttgaatctgatggtggcaggcaattggatcttaacaattatccttatatatttatggtataactctcagtttttcctatcgaatccaatcatcattttctctcaagtattccataattcctgcaactcgggtttatttttgtggtggtgcagagatggaaagagcaatactttgtaaacgttggcacagattgtggactaacaatagctggattttactacgtatgcttctcctgcagcgatggttccatcagcggtttctattatgatccaaacagcaggttagtccaagatacaaactatataatctgttgttgtttgagataaaacctgatgatattttgtttctggacagtccgtttcagaagctggagctgaaaacagttaacgaaggaagatctggtttcagcttttcttcttacgagttgcaatgatgaatgctaccaaaatcatcagacagcgccatatgatactctcgtctaaacatgcgatgcacgtgatccagtacattatgacgtgtcaattattataaattattagtaagatatttttttgcttagctagtagaccagaccaagtaaagaactaaaaatactattttgtcattatggtaccaagctaatagtttatctggaaaaagaacaaattgtccaaaaaaataattaccaaatagttgagaagtttttctaaaaatttttgtaaaaaaaatccaaattcttctaaaattaagtttttaatagaaatttaaaaagacagttctacatcatattattttctttaaataatgatataaaatttataaactattatctttgtaagataatgaatatttatacctatgtaagggaaaaattgataaatatttatacatcctcatccaaaagcccataaaatcgttatgggacaatagtaaaaaagattgcaaaatcgtatggagcgaaagataaaaataaaaaacggtcccgtgtaagaagatgggtcacctcgccaacacgtagactcttttcacgcgccaaatcaaacaccatgtcgacgagatcaacggattcaaatgtttcgtgtaatacacgctccaacgtagcgcgtcgtacacttgatgcttaatttatgtattttaagttacgcagtttccagattttcagaccctctgaaagtggaaagagcattttttaaaagagtaataagaaaaacaattatctttgaactctctctatctctctctctctctctgcgatctatg

SEQ ID NO: 12197 - DNA, 3000 bp, Unknown; identical to SEQ ID NO: 12191
  misc_feature (1)..( 3000): cDNA_ID_2711601_gDNA_ID_2214536_Annot_ID_185095 3000 nt of promoter + ATG

SEQ ID NO: 12198 - DNA, 3000 bp, Unknown; identical to SEQ ID NO: 12190
  misc_feature (1)..( 3000): cDNA_ID_1808260_gDNA_ID_2214536_Annot_ID_185092 3000 nt of promoter + ATG

SEQ ID NO: 12199 - DNA, 3000 bp, Unknown; identical to SEQ ID NO: 12187
  misc_feature (1)..( 3000): cDNA_ID_1011470_gDNA_ID_2214536_Annot_ID_185082 3000 nt of promoter + ATG

SEQ ID NO: 12200 - DNA, 3000 bp, Unknown; identical to SEQ ID NO: 12186
  misc_feature (1)..( 3000): cDNA_ID_3024225_gDNA_ID_2214536_Annot_ID_185080 3000 nt of promoter + ATG

SEQ ID NO: 12201 - DNA, 3000 bp, Unknown; identical to SEQ ID NO: 12185
  misc_feature (1)..( 3000): cDNA_ID_1807383_gDNA_ID_2214536_Annot_ID_185079 3000 nt of promoter + ATG

SEQ ID NO: 12202 - DNA, 3000 bp, Unknown; identical to SEQ ID NO: 12194
  misc_feature (1)..( 3000): cDNA_ID_2711593_gDNA_ID_2214536_Annot_ID_134389 3000 nt of promoter + ATG

SEQ ID NO: 12203 - DNA, 3000 bp, Unknown; identical to SEQ ID NO: 12193
  misc_feature (1)..( 3000): cDNA_ID_2708511_gDNA_ID_2214536_Annot_ID_134392 3000 nt of promoter + ATG

SEQ ID NO: 12204 - DNA, 3000 bp, Unknown
  misc_feature (1)..( 3000): cDNA_ID_2711585_gDNA_ID_2214536_Annot_ID_134395 3000 nt of promoter + ATG
tggctacccgcaaatgaacgtaatatttttccttgaatatacagtaatttatagtattgtaattaatgtagtacatatatctgttttaatttttttttgaaaccaattataaatatcctcacggtaaaatggattatatatatatatatatatatatatttgctaaatgaaatatcatttcaagaatttagtttattagaaatattttattaaatgaaatataatagtttattattaaactaaattgtttcatttaaccaaaatattttctatgatgctatttcatccctgatttttgtgattatggatatattgttaactttataacaaaacaagagaattcaagggactgaaacgttttatgacttttaaatggatgactatatacaatggctgatccaaaaaaacaattttgggtaaggcatattcagtgagctctaggcttagcgccatatatgttacatcaaaatttattttgtagagtaaaaagctttttagaacaaaaaaacaacaccttaatttatgtctattttcgttgtaaatgtgtaatatataatacatttaatgaattacaacaaatggtaaaactcatgctgataaaatactgcaaactagttcataatcgaactcaatagaaaatagaaaaaagaatttatacttttgtaaaaaaaaaatgctactttgtttttctgttgtatcggtaaagatgagaacaacactgaccaagcgaggttttgggctttaaccatacaaggcccacatgaatacaaagtatagagtttagttgtccactaaaaacctagttctataaggagattattgccttgagaacaaaatgattttattcccaatgaacaagcaaacaagaagttcaatattttcttgtcgaactttttgtcttcatacctttacaataaagtgattaactcattacaaataaattgtgaggaatactagaaacttggatttattgacatatgtttattgttttagacattttatcttcatttgtaacatcgtgataatgacacatgttctagtttttttttttttttttttttggacaaacagatgttctagttttatctatcaaatttgaggagaaaatattttagtgttacaaaaatatatagaaaggtcttttgtttttcaatgttactgttaaccttaaagtcaagtttcaatcagataaagaactatatgatataatcacagtcatcatacaggcagatgaagataaccattaaatcaagacgatagtcaatcatactcaattggcttcttcaataccaacggattaattaattcctcaatagctaatatatatctttttaatattttgactatacccaaatagtttagtgggcacaatttcgtaaccttctcttatttttttacacctcaaacagtcaaacgtcatcatatatataacaaatcttttgacatcatacgttattttctataataatccaaacacatcccccacctttataaatatattatgatacacttcccattattcaaagattttatagcacaattttgttttttaaaagcaattaattaactactatagtatactttactaacaacatttgaaaaaatatacaaaaattaaaattttatcattatcaaagcagtccagctgcataccattatcaaaattggatgtggataaacttaatttgataaatttctgtataacttaacaaatattaaatatgtgttaatagttatgtcaacttatgttgaagataaatccattggaccggccgtggtttttatattagtttgaatgtagctttcagattcttcctatacccaaatttcacattcaaaggttgcttatctttttaacattcaaactcatttaatatttaaatacactaactaatgacgtgagaaaacttatggatgcagcaacaaatcataagacgccacgtgacaatcttgatcgctctataaaaaaccaaacctgctcttctttggtcgctacagcaaaaataacaataaacaagataaatggagggtctaattccgttagtatacaaagccgtcatgcaaatccgttacggtaacgagtcgcagcaactttcttcttcttactacgttcgtcttcccggtgattcgggtcggtttgtaagatccgatttagatgtatcgggtcctggatctaattcctccaatagggcgtcgtcgtcgacaagcacaactacgtttgctgtttacgcgggagtccagtcacctgtttctcgtcaggttgtcacgtgattcacacgcgctttttgaaggaacctgaagttgcgtgtgagggaagggttcgtgacttttgttttgtgcgttttttttttgtaagttaggcttggaccggtttaataaacctgatgtaataattcggtttggaaaattgatttctctaagcgtagactttaacccaaaagggtggtctcgtggcttttgatttgtcaattgtgtgttttcttttaattgtataaagtttctatgaatatatttagtttattcgagaacaattgtatgaaatgtttagttaatgttttcatggtatataggttgtaaaacaggttaattacgttacaatttcctagttttggtattaatatgcaaaaatgacataatatcaaacttttaagtaaattgatatttttcactaatgttaataatgaaaccaactaacaaaaaaaaaaaagaacaaaccaatttctatttgtttaagactttgacagtacatcacttttagaaataaatgccataattatgttatgtgcacactgcaaaagaaaatgaatacgcacaattgactataaagaaaacgcctttagtggccatacgatttttagcattttatgcggaagaaacaaagtgctatttctccgagttacgtatgtttcttttcttctgcatctagttttttttttgcatattcatcaccttctctcagttttcttctttcaatagaattatccagaaaacttttaagag

SEQ ID NO: 12205 - DNA, 3000 bp, Unknown
  misc_feature (1)..( 3000): cDNA_ID_2711582_gDNA_ID_2214536_Annot_ID_134396 3000 nt of promoter + ATG
gagttacgtatgtttcttttcttctgcatctagttttttttttgcatattcatcaccttctctcagttttcttctttcaatagaattatccagaaaacttttaagagatggcagctccgattcgattctttgaactgaacactggtgccaagttaccttgcgtcggtctaggaacctacgcaatggtcgcgacagcgatcgaacaggcgattaaggtatcaccttcggatcaaacttcgaccttattattatgccattggatataaaatttaactttgacacttttcttgtcgattattttagattggttacaggcatatcgactgtgcttcgatttacggaaacgagaaagaggtaaatttgctatctacaatatattttaatttatctctctttaaccatagatgtcatttgactggtcatcaaatgtattctctacaagagtgtatatttattatagtttttgagggtcatggtggaacaagaatctcacagtaagtgtagcctctatgcttctaatgaaagagttttttttttggtatgatgcttctaatgaaaaaggtatatgaatgtttagtttgtgggaactaaatgtgttctgctttcttcctattttcgttgttctcacactatgattgatttccatttattagattggtggtgtgttgaagaagctgataggtgatggttttgtgaagcgtgaggagttatttatcacttccaaactctggttggtgttctgtttctaccaagattctctctggtctgcactgcacacacacacacatgttcatgttttttgttttgttctgtaggagcaatgatcatttacctgaagatgtgcctaaggcactggaaaaaacgttacaggacttacagattgactatgttgatttatatctggtacataacttatagcaaatgaatcttgtttacgtgtaattttttccattttgatgtgtttttgcttttgttgaagatacattggcctgcgagcttgaagaaggaatcactaatgccaacacctgagatgctcacaaaacctgatataactagcacatggaaagcaatggaagctctctatgactctggaaaagctcgagcaatcggtgtaagcaatttctcgtcgaagaagcttacagatcttcttaacgtggcacgtgtaaccccggctgttaaccaagttgaatgtcacccagtttggcagcaacaaggtcttcatgagttatgcaaatccaaaggagttcacttatctgtgagtatacttacaaattccaaaatttactctgtttttgcaagtatgaattaacgaagatgccttttcatctgttttggattgatgatagggttactctcctttgggttcccaaagtaagggagaagtcaggctaaaggttcttcaaaacccgattgttaccgaggttgctgagaaacttggaaagaccaccgcccaagtggctctccgttggggactccaaactggtcatagtgttctaccaaagagctcgagcggggctcggctcaaggagaatcttgatgtttttgactggtccataccggaagatctgtttaccaagttctctaacattccccaggcaagttctttcatctttctttttttttctcgatgaatcaaacgacaatttcggtttggtttcttgtcattattgatcttccctcctcttcaccatcttgttttcctcgaccccatcatgttgattatagatcgtcaaataatggattttaccaatccctataaatcttgcaggagaagttttgccgagctactgagtttgcgcatgagacacacggcttctataagaccattgaggaattgtgggacggtgaaatttgagataatgtccctcctttctacttgtttaaccataaaccattaaggacattgaaataaatatgttatctttttatatttaatctttctatgagaaaacactaaacacatgcttgggatttcatgatgtttggcaaatgttgttattctgcattcttcaaacaataaaatgttttcaactagttacaacttcaacatgacatagtcgatagaacctaagactatttccttagttcgcgtcgggaattttctacataccgcaaaaaaatacgtgtatgataaaaagtaaaattcaaaccttatttcaagactagggaattgccttcttctttttgattctataacctacttactgaatccaaggatcttgatcaaattagttatttctcatgaaaacttacattaacatttccttaaataaataaaaacttacattaacaatttaaaacatccattgtgaagggccggaatgaagcattatagtaagtgttcccaattattctccaattttttctcttcaaaatgaattactacaagctctcaaccgtcgattctgcatttcgctcggcgcaatatatatgcgttcacccaaaaacgtgttacttggacgttcacactcgagataatctaaatgaactcatatacactcgagatgttatataaactcatctacaattttgttgttgttgtaaaaccacataatttttcttatcacaaagatttttgaaaaaccaatcacaatgtataatattctactattgctacattatttatgaaatatataaaacttttttcataatatgaaatgaattataaatcatgtacgaattgtcttggttgtttgagagttctgtcttctgtgatacgtgtgaattgtggacacaaaaaagtgtcagtcacactcgagattagcaaagaggaaatctaaatgaacgaatttaactcagatacgtccaccgtccattggtccatgtaatgatcaatatctgacgtgacaatatactaactaagaaagtactagtattacagaaagaagaaatcaatttggccacgaatctcccgcctctgtcgctctctcacttcttctcaccctttaatagctagtgccgagtgcagtgtgcgttgaacaaccaccaccacatctgata

SEQ ID NO: 12206 - DNA, 3000 bp, Unknown
  misc_feature (1)..( 3000): cDNA_ID_1397750_gDNA_ID_2214537_Annot_ID_134398 3000 nt of promoter + ATG
attaatacagaggagaggaagatcgtcctcacaagtatttgcaaaaatgatacacaaatcaatgccaaaatgatgacgcagtgaaggtttagacagctcaagaatgatattgcacatcaatcactgattcaatgttttatttttgtcttcttcttttttttttttgttgaatgatactcattgtcaacataatatcataagccttttatcaaaataataataatacataatgtcctgcattttgtctttttgtgatgatttttgctcattatataaattgcaagtaactatgttttgcaaggttttttctgttcgtgacataaattgcgagtaaccatgttatgttattatatatgtacctatggtgcgaaggttagattttacatatggagataataagtattggatttggagataacataatgctacgactttatactgtgtatgttgggatttcataccaaacaaaaaaaatgaaaccaactagccaagaatatgtttacgttttgagttttacagagttcacattatagttgattttatttgtgcaaattatatttactctgcaaaataacatcttactctcctacttcaagaaactttgaagagaaagatatggaatgcaacgagttacacaaatctgttacaagatttctaattaagaacttacaaatctgctacttatcatcttttgaatacgtcttttggtggttaggttctaatttgtctaacagtatatgttttccaacaaaatttgatccttttgaaagcattactcttttttttttttttttttgtcaattttgaaaggattactcatattccttaaatcatgttactaaactcacataaatacgtattaagccaaagacgactcttgacgtgctctaaaatccaattcattctttatagattttaattcttggctctttatcctatttaatatttcgccgaaaaatctttgaaatgattatctgattgtatttttttataaaaaatttgtcataaccaaatttagaattatattttaaaatttaggaatgagtttagttaagaagttggtttgaaggtatagttttttctggaatttaaagtttaactttaaaatttattaacgatttagtattagattagtttattaatttgttgaaaaatctggtctattttgttacttttttcaaaaatatggtctattttcataaaaatccctaaaatatccgaatttatcggataaacccaaaccccctatcgggaaaacccaacacaccgtctctctctcactctcacttcccatcggcgaaaatggcgtcggtggcggcatcatcgtcgatatcattcgctgcatcattcctcaaaatcaaagcattccctctctcccctcgcttcttccccatccgtacactccgttgctctgtctcctcctcctcctctgagcccattgaattcgacatctccttcgctcctcccaaacccaaaccctcctccactcacggcggcgtcacccctcaacaactcttcatcccttggatcgtccgtagtgatgacggcactctcaaactccaatctcaacctcctgctcgtttaatccacaacctcgccatcgatgccactactcaaaaccctaagaagaaagataaatctaagaagaaacaacctcaagctacctcctcttcctccgccaccaccaccgcctcatctccagcttcacactcagaggtaaagccaaagctatccaaagcggcgcgtaggttttacaatgagaattttaaagaacaacctcaacgtttaagcaaagttctcgctgctgctggagtggcatcaagaagaacctctgaagaacttatttttgatggcaaggttactgttaatggtattctctgcaacactccacaggtaaaacaattctcattgtgggaatcaaattttgatgttttgatgataaagcttagcaattttgttaatgcagactcgagttgatccatcaagagacattatttatgttaatggaaatcgtattcctaagaaacttcctccaaaggtttattttgctctgaacaagcctaaagggttagccttcttcatagctttttctcatacctagcttcaggattactatcacagacttgtaacctttgtttgatatttcttgcatcatcctgatggcagatatatttgttcttccggagagaaagagatcaaatctgctattagtttgtttgacgagtacttgtcctcttgggtaagacattttgttttcctgtacataaaacgttgtcttttaaagtatgttagattagaaaacttggtttaagaatcttgtctttgcaatgtaggataaaaggaatccggggactcccaaacctcgcctttttactgttggtcgtcttgatgttgccacaacgggattgatagttgttacaaatgatggtaattgtattaattgaactccatgtgttatgttatatatcttggtttgtacattttggttcaaggaactatgtttctcttcccttcttctaaaaagaatttcaacttcttgctatgcaggagatttcgcacagaaactttcacatccttcatctagtttaccgaaagagtgagtttacatattccttttatataccgttatcactcatgattaggtgatcataattggtaggaagaacctttggttaagtaaggtaaaagaaataggctagttcgtgccaaatatttcttaatgaatacaattcagatagatgtttactgcagagttattttttgagctttggttgctggtagtagtcgccaattccagaaattgtggttttaggatcctctcagttttataaattcaagcagtgattctttccttgaagatttatgttccgtctaagtagttcaaaggttttgtatatttatactgctcttattatctttcttttttgaaattgcagatatattaccacggttgtcggtgatatacacaaacgacacttaatggctatcagtgaaggcaca

SEQ ID NO: 12207 - DNA, 3000 bp, Unknown
  misc_feature (1)..( 3000): cDNA_ID_2711640_gDNA_ID_2214537_Annot_ID_134402 3000 nt of promoter + ATG
aggaaaggaaaaaaggctggtgtcgtgcaaattagagtacgggcaaaaggatttaatagttgactttgcatttaatcatatgttcgaatagctagcacatgcctttctccacgtgatattagcttaaacagtgccgttaattaaaatattcgtcatagcatttacttgttgtcaacattcgataatattagctataaccagtgtttttacgcccgaccggttaacctgtgacccgaacacttttccggtttgggtttagtgctaaaacccaacaagttcaaaatcgaaaaaacccacaaaaactcgcaattaacccgtgacccggtgaaccggttgaaccggccgggtgtgggttttaaaaagttctcttgattttacaataaaatatgggattttagactttattcaattatttttaaaagttttttcagttcttaaattcatttgatattttagattttggtgaagactttacaataccgccttaaaattgaatcgaatggtgagagagacaaccgagattagttgtttgaattcacgatgttttattaatttatttctgtcattgatgatctcttaatatatttgttacggtgttagacatttagttggatttcaaatttttaaccactttattattattgtttgattttttctatatatttgggtataaataattttatattttattaaacataatataattttatatttgattaaatatgatatgattatttttgttttatatttataaatactaaattttttttatataaaatactctaaaatttctattaatattaaatttattaaataaattttaactaattaatccgtggtccaacccggttgacccgatgacccggtgacccagaatgtagtccggttcatcgtccgggtcgggtttcaaaacatgttgtttcgattttgtaggattggattcaattgtttataaggtagttccaagggaccaaacactaaatcaaatctttgatgttatatgatttgcctaaattacatgaagttatacatggagtaagtgattcgcctaaactactttacatatgatgttaaaattaaatgattcaagttggatgacaatatttagtcgaaacagtagttatcactggtattttctctgttccaagttatttgatgttttgagttttgttatttgtttgatgttttggaaaactatcattatttttttgtaaccaatagtgaaaggagagaagtaaaattaatattattaaattaagccaaatattaatcatcataaattcaaaggtgactaattaggtagactcctttctgtttttaccctcttgattttattttttatttttttgttaagagaggatgagctcaactttctaaagcatatattgtaaaaaaaaaaaatcatgatggaaagactcgaattcttattcttcaattcttatcttcaacttaaccactagctaatagatcacggtaaattaataaattgattgtttttttttttgggtcaaatgtaatttgattgttcatttttaacactttatgcattaaaaataaattactgataagagaaaccaaaacattactagtgcgcaatataaaacctgaatactactcaacatattcataaatttccaataaccacattatgatagtagtcaacatttctcaaattgctcgcctaagtgcgtttacccatactttcattgaaaaaatggtttgttcagtcatcagtgtatgtataaagtacagatatcaaacacgagtttgtgaataatgttggtgcgttccgaatttaccgtgaaacgaacgcaccaaacgtggtcatatatattgttgatagtcgaattaaaaacttatttaacgtcaagtctccgattatgtgcttaattaaggttacgatctgtacattaaacgccaacgagaaactacgtaatagcatgtgagcattgaattaagaattaaacaaaatcaagtgtttaaagataataatataagaaaatcacacacaggatcacacaagatttagggcaagcttaaagagagaacaatgtttggaagggagagaacatcggcttgtgttaagtgggtcaagtagatactgtcttctctgtcttttactccaactcatattcatacatgatacatgcataaaattatttataatacatttatacaaaccacttgtcttttttttttttgatatgtaattgagttacaggttgttcttacatatttttgatttaatatatatatatcaataagacaaataaaattctcgattattaggaaataatataatgaacatttgatttaatttcacacataggtgggttgtgtccggtcgtcacgggacgagttagaagaatcgtaggttttgtaggctaaacatgccgcagattgcagactgtagaagtcattgtttcatacaaaattgcagaccagaccagaccgtgaaccttttgtatttgataataattgaagtacagatgttaaataatatattgtctatgctatatttaacttctataaagcgataaacaatgtaagacatatatatgtttatcaatataaaggtgataaaatatattattcggtttgatatgtttgtgaatgtccaacatatatcataatcatactattaatcaaagcgtatacgttttatgatttggtttagttggaatggttagggtttactatggtttggttacatattactcttttaattgttttgtttggtttagaaattgggccgataggcccgatactgccatattcttactgctttgacccatttatatatgagtgtcaaaattttcaaccttatcgcgacgactctttgaagcttccgttgctgacgtggatcactcctctccgccacaaaaacaaaacagaaaaacaaactcagacatgagcaagagctagccgtcactctcactctctgatgtctcacgaattccgatttcaattctaacttaaaccatatttctccgatcaaac

SEQ ID NO: 12208 - DNA, 3000 bp, Unknown
  misc_feature (1)..( 3000): cDNA_ID_2711636_gDNA_ID_2214537_Annot_ID_134403 3000 nt of promoter + ATG
tatataaagagtcaaccataattatttttatttccctaagcaatgtaaacgatatttcatgtcatgaatgaaatccataaataaaataatttgctgtaaatatttacatcaatatcatgcatagttttaagatattcaaaaaaatcatagagaattttggaatattaaaactgatatgatacataaatgaatttcataaaatacaaaccgtcaaaaacaaacatatatcgtgtacatttagttttcattttttatggacacaacgtacataattgcagatgatttttaattaaaatttatgaggagaaaatgctaaccttgtatatattttcctgtttccgtatactaattgacttgaaatgtaataacttccgtgttctgttttttgatttttttcttagttaggctatgaaagctcttaaattgttacctttttttgttcaataaagctcttaaatagttacctaaaattagaaacaatacgtaaatttctatgttttttcttcaaagtaacttaagtggcggtcaaccaagaaaaaacatcataaattttattgtccatccaacttggagaaatattaaactgttaatctatttaattaaagattaaatatgaatttaattaaaatttaatctgaattgaatacaactcattattaagatttgttcaacttgcagaaaaaacaagggaacaacacgttttcagggatgactttcaaaattttatattggataacgatgtggcaaagaatacaaaattcaaagaaggaaaccatatgagatcggttaagattgaaaaattggagctatgggtcaaaacaaagatggacacatggatgattttacaccacaaccttaccaataaagagtcaacgcttaggaagtttagatcagtacatatcatagaatggcaatgtcaatatgatttgagttgactctaaccttctttttttttaaatgacaaattatttaattatttcaacttcctgatgaaacggttgaaatattattttatcaatttgagtgaaaatgtggaaatccactattctatcgaagttccaactctaacttggtggaaataagttgtataggataaaaccataatataatgggcattgtattaataccaaaactgatcccattccaaaagaaaaaatggaattttacggtggtattggctatattgatactttacttggagaaaaaaaaaaattgattgaaaatatgactaatattattagtcggacagtcatatcaaaatggagttgaaaaacaaaaatggctaatttggtaaatgctccatcgagattggaagtaagaaagaacatcttttcatgatttttaaattgtaaataccgttagtgagtgttttctttgtttagtcaccttgtgttacaagtcctttctataagccactgatcgttttgtataaataatcaagaaatgcaaggcagacccataattattttaataaacaattatcatagtcaacccaaagtacttccaattccagctatggttaagtttgacttcacgataagtttcacctcacgcttaaatatatatttccatctatcttttctttttgttaaaggataccttcattatgggttaaaaaagtgtaactgtcaatctgtaaattttttattggatacaaagaaaatttatattaacgacaacaggtatgtttaacacatgagacgataatcaattccaaatttccggtaacggcaactatgtcctaagccacaccttgattgagtccatttaccacaatttgattttttttttttttttttggtttgatatttagtaatatcaattcacaataatatttatgaaaatatcttaacatacttgttatcaatgctgatccaacgtcttaaccaacatacctaactgataactagttccagatgaatagtcgtccaacccatagcacacgatattacatgtacaacacatgattcaaaataaatcatactggattttgcgaaatgtttaccacgtatagctagaattttccaaaagtttttaaaaaatttgtactttggagatttaaatcctgatatggcatagaaacatgaattctttttaggccaccaccaaaccaaaatcgttttaagtttttatgtaccgttttcgtcagaaattaactcactgagtaacatgttggctctataattgtttagttaaaacaagaactgatgagaatggaatatcaatcattaaatgaccgcttcaattttacctcggtttatcgcttggccactattttatttccgaaacccaaaagtagataaactagtttcttttgcatggaaattttttccaccttactttggttagagattcttttacttcgtttttctttaaagaagattttacataatctcattcaataaatttatgatatattaaaaagtatctttttcagttcaacatcgcagacattcataataactgccaaaacccatttctttgatcgtaccgtaaaatgtgaatgcgaggcatgaataaatttcggtcttttaaaaataaaaataaaataaaaaatttcagtcttcatcagaacgaccgaacactacatttagtttttaaaattgaaaaaatcgttttaaggtatgcatgacccataagaagtggtagctaagttcacacggcattaccagtctcctcatgccacttcatctcaagtcgttatctttgaattagtcaaagtcttcgtttcccttattttttaataaataattgcggctttcacttgtttgactttctttttattctctttacaaagaaataacaacaactcatgtataggcatcttgtttttaattgaattatgtatatatagagacataacaggaacaaagtccatatcactttctttctccttttccccttatcgataaacttgcgaaaccctaaaagctaagaaacttaagagtttaaagtttaacaaaaacaacttaaaaagagttttgagcagtgaaattaatg

SEQ ID NO: 12209 - DNA, 3000 bp, Unknown
  misc_feature (1)..( 3000): cDNA_ID_2711632_gDNA_ID_2214537_Annot_ID_134404 3000 nt of promoter + ATG
catatcttcatttatttattttcattaaaatcaaaataacttaataaatacattattatatagggttgactattaagataaacctaaaagtacttgaaatgtataactttgttttacaatttcttttaaaaccatatattaaatttatggatccaattatttacttgatattttacaagttaaaaattttttattaaattttgaaaagattttattttgaattttaaggtatttgagtggtttaagaaaaaataaaattgggatgctaaattaggctaattaaattgaacctaatggactggaataaccaagaatttcaaactgcatccgaatttgaattaaaaacttttaattttattttacaaattaaagcgatagataatcaaaaatataagttcattcaattacaaaccataaaaaatactatttatagaagattctgttttatataagtagcaacaatttttctaaatcgaaaacccaaaaacctccaaagttgaccgtttagaaagagaagatcccgatattagacgcagatttaccgtacagcaatacttattaagatttggtttttagctcttttttgtcaacctacatattaagattaaatgcaccgcaatttaatgtcttgattctgtgattcttcttcttttcgtcttaatattctttcgccgaaaaagaaaacatattcttgagctatgtcatggaaactaatatttgttccaaaagaaaaaaaaaacaatagtcaaaataagatgttgaaaaagaagagtcaaattaagagaaacataatattggagaatctttttgatgattcatgtcacgcgttgatctagacatcaattgaactaacgctgatatcaattcccaactactaaagattttaaaatttgggacgatgttattatcatgaaaaatattaattcttataaaatttgactgtttatttgcgtttgaaaattataagttaaatagtacttttctattcagagacaaaaaaaataagtttctgtcaaacgttatctgaaatgtaaataaatatatacattttttgtactgtttgtaacatggaaatgatatgtgattacgaaaataaaaactatcatgtttttatatgtaggtatactacttaaacgttttttaaaaaacaaatatttcgaggaccctatttaaacgtatttgagattggaaaaaataaacaattagaatgtgagaacatatttcattaaaaatagagtcctcgaaaactcttctttttttacagcacctcgaaaactcattttccataacttaatttgcattgaatatagttcgaacttctacacctaattttgtgttgcctatgccttttctgttaacgatcactctacttccatttactatgtttattgatacaaaaggtacactaattttgcaagatgaatgtttgtccaacataattgaacacttgttaggtgcattatttattatttaaaaattttcataaataattcaacaatgtgtaggttaaaactggaaatccgctcatcaatcggtgttcacatctgtctgtacacctagatattctatagaacattattgatcatgtaactgtatttacacgtggttaattactgaatttgctggtgacatcattctcgtattgtttgtagcttaagatacaaggaatcagacgtcagggttttcttcgaaaccactttcataatttaatcgtttttgaaacagaaatgagttatttacagtaagtaaattttactgtttgattagaaaaatgaataaaaaaataaccattcgaatataatttgaaaaagaaaattgaatatgccgcataaaagaatctcatacctgaccagaattttcaatacgaaaatctaggttatagatctcgttctcggtaatgcttgcttcttcgtctcaccacctaggtttttttctatctggcctctaacaccacggggcaaccacaccgttagccaacaaagaaacttatcatagtcttgtttggaccttgactgatagatcatagatccaaattctctcataatatgcatacgacgagtcgacgacatataattcaatcacattagaggggtgaatttatcccaaccatgttatattcttccactattttacactagttttactatgcaagattttttaattaataattgtaaatttcttagaaatatacatttgtttctttttggtcgggaagtatacatttgttttgaatactgttaaagtttatattttttggtcaaccctctaaaaatttctaaagcattccaatagtaaggatatttaaatggctgatcacttattaaaatttaatataattcatttgtcgtttttaaagacatatttctaacaatccaattgtttccaaaaatgaaattaataattatctataattaagaatgtttattataattgtttctttgagaaaaatcatagagatgacatcatggatatacttacgtatatgtctagatacatacgtatatatgtccatttacatacacattcacactacggattccttctaagttctagcttagtccactcacccacttaatatgggctgtctttatgaatatatatcttatcttattttttgaagaactatctatattctatactagctagctaccataaatgtaatagtcaaaatcttttcaaatttttctacttcttgtttctatgaaaaataggaaaaattgaaaatcatccattcttgggttgaatttcttgacatttttcttttaatatatggacaaatcaatataatattttggtactattatataatataggatgaaggatagcttccaatgccaaccttcctctccttatcactctccaagtcaatgtcaacggtcttcgccctctaactcctctctcttctctcacacacacttcgtggctaatatattccaccaagaacacaaccaaagagcatccctctcgacacacacacttctctcctaaaacccaaaaatg

SEQ ID NO: 12210 - DNA, 3000 bp, Unknown
  misc_feature (1)..( 3000): cDNA_ID_2708550_gDNA_ID_2214537_Annot_ID_134405 3000 nt of promoter + ATG
gagaaaagtgtctattctccctatttctaaaaaaactacctactttgcaaattatttgtgaaaaaagtgtctagtttccaacttatctctaaaagatttgatagcctatagtggctttagttcctccttgtcattcccagctgtgtatatatattaacccatggatgggtgattaaatggtgatatagtttacgactaaactagaagacaacagaaaaagatgcagatttggagttggcgacaaacatagataactaaatggttataaaagaaaaagagagaagaaaatcgaataaggccaataatatataaagtggggatgggaataaacatttttatatttgtcttctattcccttcttgtccgtatcaaattatcaatcttcaaacacaataagtatatgttattgttaaaacaagtaacgagcaacataaaattagatatttgtaactttttgtacaacataaaatttggattatcctttactcgttttactttttttgtatgcttatccgtttatcgtttttttctaaattacttgtatagttatttttactatcttaccaatgtaacaagaaaaaagttatactacatgcagagactaaacaaaagaaatttaaaaattaggtatatataccacgagtgagagtaccccttccttatctcataccacgagtcccattcgatatatgatctcacgtaatgaaacgggacaaataacatgcaagtagacaatttgttaacgtgtatataaaatctcgaaatagccgttttgaacaagttaaatacggatagacaaaatttattactcaactaagttaagtaacaaacccaaaatcacgggcaaagtaaaccacactcttatattatgcttaaaataaagaagatcccatatttgtttggcaaatagatcatcaatgtagtcgaagggctccacgcgcagcgacaaaaacggaacaagaaagaagaaaaaatcaaaagattcaaaaacctttcttcatctttattaacatcaactattcagatttgtgtaagacaaaagaaagaagcgaagattacggggaccaacagtgacgtggacctctccccgtcggtgcccataccaccaactttactactccagtactggtcacttgcttgttcgaattaaccaaatccaattattcgtaactatgtttcagattgttggctaactgatgatcaatcctacaataatacttaaaacgtttattagtatattgtttggaagatggtataacaattcattggttactgatgcttgttgccaaaaaaaaaaaaaggaaaaagaaatgattaaacgcttgcatctgtttgatttggactccatagattcctttatatagtcaactataatcaatacacgtgaatcatttcgtcatttgattactgttgagacaagagtcaattaccaccaaacatattattttaaaacattaaagttccgataacttcgggtgatggccgcaaatttgagttttggtttgatattgtatatggtattatggtttgagttaacattattattattgtatcatcaattcatcatccgaatttagacctacataataaatgcaagatgttatatacaagaaattccaactgccacaatatagaaaaagagcagcaaattttatttttttctcattggctttcataaatgttacttaataagacacaagacgttgggaaggactgaatgactttactgatatgttttcatgctaccaaatttcgtttttcatcattctaccatatcaatttcgaagtagaggaataatgtcgtgcacaaccaagtctcggtcccagctaccattttcttcaatgaacaccgcaacacgtaaacgcaagtgataccgcaacctagctaatgaagttttggttaacatgaactcgcactatatgacttccaaatcttttgtcttcaactcttttttaccaaagattcaaaaccgtaggctcttactctataaagctagaccttgtcatttttaatgatattacacagaacaaaaaaaaaaatataaatccaaacctaaaatcacaacccaactccgaagataataaacggcattgaaaatcacacaacaaccttaaaggctataatcgtcactgaatgttacataccgactctgaatataacataacttataggatactaaaattatgtcaattcagatgtaaagttgtatcaatttattgaaaatactagctactatatgaaaaagtttagaaatgtattggggaattaagttttccgaaagagagtgtttaactaatattgcctcaactcgttttatgaattttcaaattttagtcatgtggatatggaaatggaatagaactgaaatacattcttctaatcaatcataatccatacaaatctgtatttttactcatttgtatttaaatgtaacaaccacatacataatcccaccttaagtacatgattaaggaatgacttttcagcaaaacacacctcaaaattctcaaattcttgtcagttcaataaaacaatttccttgaattattgtcagacacttaaaagatttgtatgcatgtaactgctggtcccgtattaatatttattgcttcattccttattactaagcaacaaaagtcacgcgtgagatataaaagaagatcctttgcagtttctctgttcttgctccttcttcttcatctccctttattgatactgtctgagtaataataaaaattcactctttttgtcttctcaagacagatttcaaaatagaaatcattctccttttttctttttgaaaatttcgagtgatttaaggagggaaaataaagacagaaacaagaacaaaagcatcgtttgcgaataagacttctcgtactctgttttcttttctcgtgttcttatgacagatttataaaaaagattaggtttttgtcttgtcttggcgataatgcctagagagtgttttaaagatttgatttaaatactcttttatg

SEQ ID NO: 12211 - DNA, 3000 bp, Unknown
  misc_feature (1)..( 3000): cDNA_ID_2711628_gDNA_ID_2214537_Annot_ID_134407 3000 nt of promoter + ATG
cgacaacttgtctttgattacatttggaatccttaaacgaaacgtcgaaatccttcctcctccccctcctcctcctcctcctcctcctccttcggaaaatgaactctccggccccggaaatgagtggttggatctttcgtcgatgcaaagaaataaacaagaaacgttggtgatgaagaaaaaaagtcgacgtggcccaagatcaagaagctctcattatcgtggcgttaccttttaccgtcgaaccggccgttgggaatctcatatttggtattcattcataaactttaagttataaaatatattttaattagttttgagattaacacttggttttgggatttatgtgtagggactgtggaaaacaagtttatttgggtaattagatgagattttctatttctcttactattatattaaggtttaaaaccttcttggataagagaattctgaaaagagtaaaccaaatgatgaaagattttcactttttcagttttgtcttttgtttggttaaaaacaggtggtttcgacacagcctacacagccgcaaggtgtaagaaatagtaacagatgttacatgacataacattcgtcctttcaaaaattcttcattttttcttttttggacattttagtttatatctttagagaaatattagttgacttatatattcaaatacatatcagagcgtacgaccgagctgctatcagattccggggactccaagcagatatcaactttatcgtggatgattacaaacaagacattgaaaaggttttttttttcatataacttattgcttcctataaagagacagagaagttggacgttcgaatactataatatggatattttgaatgatgtggtagatgaagaatttaagcaaagaagagtttgtgcaatctcttagacgagcgagtgcaagcttagcaagaggaggttctaaatacaaaaacacccatatgagaaatgatcacatccatctcttccaaaacaggttcgattcgttactcttctcgcgggtacaatttcattcactattaaccgtgaccagttgattcctatcgcgtatatgattcacacatataatgcatacgatttgtaaaagtgtttgtatgaatactcataggggattgaatgcagcagcagcaaaatgcaatgagataagaaagatggaaggggatattaagttgggtgcccatagtaaaggtactttataaatgtagggtcacggctgtaaatatacatactaaatcattgttatcatttaggtgaaagctaaaaaccctaaccacaacttcactttgacacatgttgcacacctttgatttgatcaaccaaaccctagctagctagccttacctttcagaatcattctcgttcaaaattcaatgcatattagtttatagattttaatcaattttttttttttttttgaaagatttaaactttaatgcacaacgacaacagtaacacaaaccactaaactatatcttattcaacttgatcaatattttaatttaagacattacgacatgatttacgaaaagcttttaacgttttcaggaaatgagcacaacgatctcgagctaagtcttgggatatcttcatcgtcaaaagttagaattttggaaccagcagattattacatgggtttgaatcgatcggtgacgagtttgcatgggaagccgttgccgggatatctaccgatcacagaaattaaaccgttaaagacagttgtagcatcatcaggattccctttcattaccatgatcaatccttcttctttgtccttatcttgttttgatccatgaggtgatcactatttacttttaaaattttcccctttttattgataatctattgaatgacggaatgattatgtgacttatatctttttataaaccatattcttgtggaatcaggaattttgtgccaataaaaaaagacaaagaaccatcatgtactatgttgtcaacgatgataattcccaagtgtgtgaaagttatagtgtaagtactagtgagtactcgtgaggttagtaacataagacacgtgcataattgcaaacaaacaactttgccgaaaatttgtacaatggttaagaaaagaaaagagagtattgaatgatcaaagaaaaggagatgaatgggacacgtcgtcgtttgtaattaaagtacaatgtcgtattgggtcgtataatatccgcttgcttcaccacattcacttatttcttatccccacttttccaacttttcgaccctttttttttgggatttcaataaataaactaacaaaacagaagatagagaaaatttactatccttacattgcaattttatacctaaataacccaaaacagtggaagagacgaaaaaaaaaggtgtgaaatcttgtggtgttgccatttgccaatgcttttgcttcgatgtgccacactcaatccaagcgagcaagggtaataagacctaaagtggcctcgacctttgttttcttgggccttagccgtaggcccaaacttctctcgagtcgttcatggagatccatcagggacacgtgccattagtctgtttagttataaatttttatgtatagtttgcatttaggttagtttggaattagattaatggtataattaatttatgttatatataatgttaatttttgagggcctcgcgggatccattcgaacttcctctgccgacaaaaaagaaaagaagaagacgacgtttatatgtgtatctccccagctaagtggaatcagagcgtgtaaaaattattcatcggtgcgagttctctctaacctttgtttgtttgttcatggtgggctctggtttcctcttttagaagaaaattgttagggcgagaagaaaaaaattgaatatagaatgaatatctctttttaagggtttatggttttgctgctctaaccttggattttagtgtattgtttttgttcttcagtagttgaaatttcgaagcactagcataagagaatg

SEQ ID NO: 12212 - DNA, 3000 bp, Unknown
  misc_feature (1)..( 3000): cDNA_ID_2711624_gDNA_ID_2214537_Annot_ID_134408 3000 nt of promoter + ATG
tcctttattaaattataaatggtcctctttgtgtggtttagcataaaaattataatcataagtctcttctcgtgtttaccaaaaaaaatgtctcttctcgtgttactttcttttatacattcctcatgatatacagatttaggatcattgctttacgattaattctcactccttcttttccactgaattgctgttgtatatacttttatgatgttagcaagaggtgctggatccaccagaagattttttccgtgtcaggatggttatcattcttctggaaacctgtgggcactactttgatcgaggttcttcaaagaaaaggcttgatcaatttttaatacacttccagagatacatcctgagcaagggccaccttccactggatattgaatttgacttgcaggttagtcttgtgttttattatagtggacatgagattggatttttttagtagaaattatccaattttcacttaagggttcagtgtatctgtaacaaataatgtgtcttaacttcttctcaacgcaggatctatttgccaatttgagacctaatatgactcgttactcaaccattgatgaggtcaatgccgctatacttcagctggaagagcgtgaacatgcttcttcaggagacaaagtcagtatagaaagacactcagatacaaagccttcaaacaagtcgtcttctgatgttatctcttctaacgggaaaagtactgccaaagatattagagagaatggagaagctcacggagaagaaagcgacagcgattctggtagtggctccgtggttcgtgatggacagaacgaagagttggatgatggaaatcatgagcggggatctgagagtggtgatggggatgattatgatgatggcgatggacctggatctgatgatgataaatttcgtgtaaggcaaaaggtggtaaccgtagatcttgaggaacaagcggacttcgatcaagaactgaaggccttacttcaggcaagttcagaatccgtctttttttgtttatgtagattgatgcatctattttctctaatttagtttggtggaaaaaccagtttacactgatgcaagagggaagttatttttcggaatttgaacatgattaagtactgatatgttttgtggatgcaggagagcatggagcaaaggaagctagaattacgaggtagaccggcattgaacatgacaataccgatgagtgtttttgaaggatctggaaaagatcatcatcattttgggcgggtagtaggtgaaaacggtgaagaagtgttggatgaagagaatggagagcaaagagaggttcaagtgaaggtcctagtgaagagaggaaacaaacaacaaacaaggcaaatgctaatcccgagtgattgtgctctagtgcagagcacaaaacagaaagaagctgcagaattggaagagaaacaagacataaagaggttagtactcgagtacaatgagagggatgaagaggaagcaaatgggttaggaacacagatattgaattggacttctggaggaagcagaggatccactcgaaccggggaaggcagtgggaagagtggtgggtctcgtcaccggttttattatcatcaaggaggtggtggttcgtatcatgcccgacgaaagtaacttcatccggtttagggggaaaatttgataatcttgcctgtgtcaaaagcggtaatagttggctttttgctacggctgaaaaggacaattcacaagaaatctcatgagtttctgtgacaaaagttgatgtattcgacttcacattctgtagtgttggttaagtaaatctctgtgtgtgaccctttttgtccagcttggttaaatcttgcatttaatgattatttagcatcattctcatgtgaaaaaaaaaaagaagaagaagaagaagaaattactaagtaaggaaagagaatgatgacgagaagaaaactttttaagatttggtcttaccatatacggaaaggccagatttagtgtgcagaggacggattaataaagattccttaacaaatctagtttttgtactttcatcaaatcatgagaaaatggacggttgagatatgcacacgaacttatcatccaacgtttctaaattattgatatctaggtgtccatataaacatgtacttggtgattgctgaattgtttatacaaacgaatgacataataagtcacactctctcttcattaaggtttctaattctacctctctctcccctccacatacaaaagtggtagttggctttattggaccgacgcttaggtccccaacacgttccatttcactccattattgtattcattgacatatctattcaaaaagagattttgtatggtttttattgtggtgcagaaaaattgatacccgatttggtctaccaaaataattttcctcataatgcattcatgttcgggtgtccccactcgtgatataaattcataattttctcaatctgtaagtaatattcgaaaagagtaatagtttatacaaattacattgtgatagtattattagactattagtaaagaatatacacacacatatatactattcatattcccgtatatcaaattttcagtagtcatatattcatacgaacgcgtacttactattcagactatatatacacgaatctccgaatatcttgaaaacgtataagaccgagctagtaatagatattggctaagatatattttgggtaagtcgttcttatattttttcgagatgttcggaaattggtttatacacatgtttaaatataggaaaaagaaaaaaaataacgcaatcaataaattaataaatagagatgtctgaaaagtagccaaaaactaataaatcagtgtgtagacaatcgcactgaacaacacgtcccacgttctttttcttccctgttttagatagactcttagagtctctctagagtcaccggaacaatcacaaaagcgacgacatattactcattcctacaaatactcatg

SEQ ID NO: 12213 - DNA, 3000 bp, Unknown
  misc_feature (1)..( 3000): cDNA_ID_2708536_gDNA_ID_2214537_Annot_ID_134409 3000 nt of promoter + ATG
ggacatgtatctcttttattgactatcttaagcatatatgcacgaggaggattactcgagcaaagaatgtagtacaagttgtttgattcaatcataaaatgcagagagagattaggctattgcagactgtttatcgtcttcaaggtgtaatgccctaaggagccttgcccatgactctgggattccaccgggcaattcaaattccaacagcttcccgcgtttcttgtagaattcctccactggttgagtctgtgaacgaggaaaaacatataaacattgttaattctacgagaatttgaatcatggaaaaagatcgaagaagtatttttaccattttgttgtaaatcctgagtctttccttgacaacttcttcagtgtcatcagctcggcttataagcttcgattcacagtttggcggaggaagaagaggaggcatatacattctgggagtatcatcatcacctttgatatcaatgcaggcaacgttatagtttccaccacactcgctgcaaattcttcttcctaaacatttcgcaagcaatgcctcttctcgtagcttcaggttaatcaccagatcgatattagttactccctccagtatttcctagaagacaaaaaaagaaacagagctgtcaaacgaaagagtcctccattagcctgaaatctacacaagcaataaattgctcaccgcttgagtcacggtgcgtggaaaaccatcaagaatgtatccagattcacccttgtctttgccagcttggagacgctttgataacaaacttattatgaattcatcaggaactagttttccatggttaacaagctccttgagctacacccaaagcagcaaacgattaacaagcataaataggcgctcaatgattcaacctctgttctagttatagacaagagatacaaccccaaattcgctatccatcattggattctatttataccaaaaagaattctcatttcaaaggaaaaatctgatcatgttggtgacattagtgacctagcaaacaaaatgcaacatttacatcaaaaaaagtttcactgagaccaattttagaagcagactcaattttaagatgattgaacacacaattaaaaatctcaaaattgatctctatgtcttcttcactgagcatcgtgatttcaacaatcaacagctacagaaaatgaatcgagaattgagaattgtaacctgagaggagaggaggccagaggaggagagctcttcacgaacgagatcaccagtggcaatatgaggaacgccgaggagagaagagagacgagaggcataggttcctttaccaacaccaggacatccaagaaacacccagtggaaatttctgcctttgtatggagacgttgacgtagacgaagacttcccgagctgagccgcagcctcctccagatcgattttggggtctagcgaggacccagacgaagaagaagagagagacctaataaagagagaagaaaaagtattctttatcgtcgtcgtcgccggcctgaggagacggtgagaaaccgccatggagagaagaacacggtgaagaagaagaaataatgattgttttagtaggctcgtgaggaacacgtgtcatgtcttttatgtcactgtccctctctttgcttccatggctttacctattcagacataggttcctttaccaacacgatgggtttttttttcggttccggtttggtaattattttggtaactgcttagtcctgccgggtaaaacccgttggtattgggtctttttgacccgtttgggctttttccctcaattctctttttgtgttaattgaaaaattccttggccgggttctatcatctctttctccgggaacacactaaacctaagtccgatcgaaaaagcgatcacttgactcgaaatcacacgactttatctccctgaaccctaatggatcatccagaagatgaatcccacagcgagaaacaagacgacgaggtttgatttcgagattacggatttgtcttactcgatgaaattgaaactatgatctcattcttcaattcgaaaattgttttctctggttatcgcaggaagctcttgctcgtcttgaagagattaagaagtcaattgaagctaaactgactcttcgtcaaaacaatctcaatcctgaacgacctggttagtttttgttttcatggaattgagtatgtaggatttccacaatgcttctgttagtaatcgagtacctataatagccattcaggacttgagagcacacgattttacaataattcttttctagtttagaatgtgtagttttgagttgttactgatagtgagtccttccacgttacagattcagcatatcttaggactctagattctagtatcaagcggaatacagcagttattaagaagttaaagcagatcaatgaagagcagcgagaagggttgatggatgatctgcgaggtgttaaccttagcaaattcgttagtgaagctgttactgccatttgtgaggctaagctcaaaagctcagatatacaagcagctgttcaggttatgtttccctgttttgttcttttgtatctgtatttacaccttgtttcttatgttttttcatgcgactctcgtcatcaacttgtcacattgagattttcagtagttgttatctttatatttagatagtttcttaatgctttccaccacttggtatggcaaatcctctaccacagtttaggtttctgttgaacgatatcttttcctcttagtttagatgatatttgggtctcttttctgtttgtatttcttatggggcatagaaagtagcatacgacaatactctctgttcagaatttgtttctatgctgatatccatgtattttgacagatttgctcgctacttcatcagaggtataaagaattttctgccagtctaacacaagggctcttgaaagtcttctttcctggaaaatctgccgaagatttagaagctgataaaaactcaaaggccatg

SEQ ID NO: 12214 - DNA, 3000 bp, Unknown
  misc_feature (1)..( 3000): cDNA_ID_2708558_gDNA_ID_2214537_Annot_ID_134410 3000 nt of promoter + ATG
aaacaatgcatctgacataagcaattgaaaactaaaagaaaaaagttgacgcaatacagaactagatagtcaagactcttctaggaaaattaaatgctttctgaatgccacttgcaaactacacattttcccatatctttgtttgttatgaacataaatagaagctgacctcagatcaggcaagcactcgtaaaatgtcttggtgtcttcgtcgtcccaaataggttccgggacagatgtatcttttacagtaccagagggtgaagcttcgtcccctgctgtgagcctagttgtaccatcctctggcataacaggaggttgcatatcaagtgcttcggccaaactgcaacaggacacaaaaattgcataattaatgaattagatgagaatattgttactgtagatattcctgtgccagatatccattccagccaaagatgtgggaagaaaggagaaacgccatatatctaaaatcacttccaaacttcagttcataaatattatagggttccagtgaatcggtaaacacatgtcacaatcatcataaaactattgcaaatgaactgatgcatgaccaagatctaagcaatgaaactatatgtataaactacaatgacagcaacttcaggaacatattaagaaagaattgagagctcaataatagtatgtgttataggtattttagttaatggccagtgagaagaaagctacgacgctaccaatatcctcattgatgaaacgtttcctttgtgcaattaactccacaacagctagacccaacaagaacaggaaaacctatgttgagttataggaatggtcaacttacgatgagatatttcgatagagatggtcgtatgatttcctcagcttttcataagaagatgcactgtcttcactaagctctcctttagcatttaccagctttgcattttctttctccatttggagaagtaactgtagaaaaaaactattacgaagatactacagaaagggaaaactagcaaaatgaaaagaaaagaaaagggagaggaaatgtttcatttttcaggcaagaaaaatcaaaattcctgcacataagctcatgggtaaacaattaaggatctaaccttgtgctcagactgaaggagatctgcaagagcatcataatatgtgttgaaagctttcttaaaactctttttctgatctgcagtgacgtcgagacccttgaaaaactagagaaaaccttagtcacatttagctacgtaccggaaaatatggggaaggcacagacaagagctcatcaaatatggaagtaaaacttcagttgatcttgaaacctacttacatcttcgtcttgtccagagataggaagccccagaaaaattcttccttgccgagcaaaactggtgagaagtgtcagatttgtttgggtcgtatctctgtctttcagttgttcaacactggtaagatccttaataatattgataaagatgttactatcttctattactccaacatagtagagctccagaagaagttttagggtactgcgctttttcatggcctttgagtttttatcagcttctaaatcttcggcagattttccaggaaagaagactttcaagagcccttgtgttagactggcagaaaattctttatacctctgatgaagtagcgagcaaatctgtcaaaatacatggatatcagcatagaaacaaattctgaacagagagtattgtcgtatgctactttctatgccccataagaaatacaaacagaaaagagacccaaatatcatctaaactaagaggaaaagatatcgttcaacagaaacctaaactgtggtagaggatttgccataccaagtggtggaaagcattaagaaactatctaaatataaagataacaactactgaaaatctcaatgtgacaagttgatgacgagagtcgcatgaaaaaacataagaaacaaggtgtaaatacagatacaaaagaacaaaacagggaaacataacctgaacagctgcttgtatatctgagcttttgagcttagcctcacaaatggcagtaacagcttcactaacgaatttgctaaggttaacacctcgcagatcatccatcaacccttctcgctgctcttcattgatctgctttaacttcttaataactgctgtattccgcttgatactagaatctagagtcctaagatatgctgaatctgtaacgtggaaggactcactatcagtaacaactcaaaactacacattctaaactagaaaagaattattgtaaaatcgtgtgctctcaagtcctgaatggctattataggtactcgattactaacagaagcattgtggaaatcctacatactcaattccatgaaaacaaaaactaaccaggtcgttcaggattgagattgttttgacgaagagtcagtttagcttcaattgacttcttaatctcttcaagacgagcaagagcttcctgcgataaccagagaaaacaattttcgaattgaagaatgagatcatagtttcaatttcatcgagtaagacaaatccgtaatctcgaaatcaaacctcgtcgtcttgtttctcgctgtgggattcatcttctggatgatccattagggttcagggagataaagtcgtgtgatttcgagtcaagtgatcgctttttcgatcggacttaggtttagtgtgttcccggagaaagagatgatagaacccggccaaggaatttttcaattaacacaaaaagagaattgagggaaaaagcccaaacgggtcaaaaagacccaataccaacgggttttacccggcaggactaagcagttaccaaaataattaccaaaccggaaccgaaaaaaaaacccatcgtgttggtaaaggaacctatgtctgaataggtaaagccatggaagcaaagagagggacagtgacataaaagacatgacacgtgttcctcacgagcctactaaaacaatcattatttcttcttcttcaccgtgttcttctctcc

SEQ ID NO: 12215 - DNA, 3000 bp, Unknown
  misc_feature (1)..( 3000): cDNA_ID_2708540_gDNA_ID_2214537_Annot_ID_134412 3000 nt of promoter + ATG
gaaaaaactaacccaatttaggaaatctctctcgaagtaactcctccagaactcgttggtcaacctggggaaagtaaaatgttttatgatgagattactagtcggccataaaggataggaaaatactgtaacaaaaagattactattttacctgggactcgagcatctcttctgaataataatcatggaagtagtcatcaatgattcctgtaagcgaccttaaaatccgaagtaatatttagttaacttacatgtttgttaagaagagatttgaggaatgggctaacagtagttaatattcaaccaaaagaaaaggaagtcatagatacacgaacttcacacagaaccaaagagttggattttcattgacaaacaataatacaatattaggagttagagagtagtttccgaacataccaaaaagcattctcttcgggcatcagaagtaataaaagtgcagcgaagaaattcattgcctgcacatgatttattgatacaagataacaaataactgagatgttcatttttgtgagcatgtaaccatactaggatacagaagtgacagtattaaataaccgaatacctgacagtatccaacagagggattatgcctggcataagcagttagcaatcgcctcagagcatttctgaaatcatcatctagggcaggatgacctggaaatgtccggggtaaatcctgtaattgaaataagcaacagctgagaaaaatgaccaagatcaacaggagtccagtactgcaccattagttagaaaatgctggatgccaagtaatgtacagttgctaaccttttctatctgacctttccatttttccacaacagagagggggtctgtacttgaacctttctcatctgtatgctgcatgagctcctgctctatgtcgtttcctagactatctgcagctaatagattttggtaataattcttgacccgacgtttcttgactcccgcaaatgcttgccagagctgaatatttgtatatatattttcagattattgagcagaaaataaggataataagaactaactatcaatagcaggagaatgctagaaaagagaatgacaggatttattacctcacccctcagagccataggtgcaccgccatgaataagaacttcaagttcgtctttccaggggcatgcagatactagggaagctgcatcagcagcagcagacatgctggagacacttgtgccatctgaagaaccatcctgaattggatctgatctctccgcatcatagaactcgtcttcggaatcattctcacatactccctttgaagactcggtctcatcagttgaggctaaggaattcaatttctgagcttcttgctcgccatttgtggaatcccccttcattttgacacggacactcatcaagtcctcaattgcttgaagagatggcctgatctcagcccataactgaactttgtgcacattcttctctctattgggaacttcatcttcctctctcgcattcccaggagttaaatcagaacctggcttgtcagcattcagatcttttctttcagcacccttgtttaattccttttcttttttcttgtcactttcacttggattgacatgagtattttcagacgatccattcgtaggtgacacgccagattctgcatgaaattccaggaaattgctccaccttgccgacctctccacttcttcctcctgcagtttatcagtaaaaaacagcattagaatgttaaggtgaaacatcgagtgacagtgactgcgtcaaccatataagaaccaaaaaatgacttatgatatatgaagcctttcgatattgattaaaccaagaccactaagtaaacttctaagttaagtccacttctgaaatctttcacacagctgtaacaaagctactttaatggatcaccaaattttagacaaaccttccttttttcctaagaatgccagtgtgcactcaatcatgtaaaagaattttccgagtagaaaataaaagttatggagatagaaagaaccttgtagatattaacatattctcggtatctttgcacatgctgaggcctcacagaaaatccatatgcatccctgttcataaaaccaacctcattaacttccctaagtactaagaatatagatgaaatcaagatcaatgatcactagattctcaactagtgatctaaaaagacaacattttgctcagcaaatcgagagcagagagattaactgagaaaccgcaatttcaaaaaacaaattccatcaaatgtagtaaattagaaacaaaaacacaacgagataagcaatgtagcaatggagaagctcgaaaggcgataccttttgtggtcagacttagaaacggcgtcggcgatcataattccttagttggagaacgagatctctccgaatagaggcggtgatagttgaaagagatggctgagcgcagaagaagaagatccggtggagcaagaagcaatactactaattgaacatcattacaacacgcgactgaagttgaaaaaaaagatgaaaagttactacagtgtcggagagagagacgaagaaaaaggtccgagattgtagaggacgttattgcatcctttaattaatttatatacttatcatcaaatactcgaaacctttgtccttcttttgaaataaacttatactggaaattaataattttgggcctaaatcaactagagcccatttgtttcatgtttgattaaaagggatttatataccctattgagtccacgtcacaccgtcgtcgttaatcgtggattaatttgttttgggcctaactgaactataaatccacttgtttagtttttacggtaaagtcacttttgccctttagaatccaccaaagtcgccactgtctttcccaatttctttgaacttttcaggtacccttaaacttcatcttcttcgatttttaccatttttttcaatttgcaatcagaaatcgaagcgatccaaattagtaagctcgccc

SEQ ID NO: 12216 - DNA, 3000 bp, Unknown
  misc_feature (1)..( 3000): cDNA_ID_2711616_gDNA_ID_2214537_Annot_ID_134413 3000 nt of promoter + ATG
attatcctaaacctatcaatattaaatactataaattttattgaatatatgttactattacatacagtttgtaattcaatacccggacgaacacatcatagcagtggagggaagttaccaccaagtggctctcattgccacagaggtgattacgtccctcgtcttcaagacctcaaagggtagaaagtctccattgtttggtccaaacttacttggaattacgaccggtacaaagtttgtttttgaggatgagggaaagaagatcgtagggtttcatggacgggcaggtgatgctgtcgacgctcttggagtttactttgtattggataccacgccgttccctctttacaagcttgatgcccaaggtggtacagacgggcgtgtttgggatgatggttcttacgatggcattaaaacgctgcgtattgatcaagataattctcgtatcacttatttagaggttgagtacgagaaagacggggaagcaaaaacatgtaaccatggggggaaaggagatacaccatccgaggtaactttactagttcttcttatacacgactagttcaataatttctcaaaaatgttataaattgttaaactctatttatatgtgatcattagtacaacgacataaattaggttccaaatatcaatgattaattattgtgtttgtagattctttgcagtagtatgaagtataactctcacacactccggttcaaatttttgtagatataattgacacatgtatttagatctcttaagacaaaaagtcttcttattttgttgcttcttgttgcagtttgtgcttggttacccagatgaatacatcaaatcggtggaagcaacctatcagaagccaaacatttttagcaatacggcaattacgtcacttaagttcttaacatcaaaggggagaacatcattctttgggtataatgtgggtaagaagtttgtgttggagcaaaagggtcataggcttgtcgggttccatggaaaggaagatgcagctattgatgctcttggagcatattttggacctgttcctactcctactcccttgattccatctaagaaactaccagcgataggcggcaacgaaggagttacatgggatgatggtgtctacgacggtgtaaggaagatacttgtaggacaaggtaacgatggtgtatcctttgtcaaatttgagtacagtaagggcaaagaccttgtacccggagatgaccatgggaagaagacattactcggagctgaagaggtcatttaaaaacaacaatttttttttttttttttcaattcattctagattatttacacttatcctttgttggttttgaatctttgcagtttgtgcttgaagatggtgaatatctcatgaacatagatggctactacgataagatcttcggagttgaggaaccaataattgtatgtcttcagtttaagaccaacaaaagggagtcaatgccgtttggaatggattctggtaagaagttctcgcttggagaggaaggccacaagatcgttggattccatggacaagctagtgatgttgttcacagcatcggagtcactatcgtgcccatcaccaccaccgagtgaaaaccagttagtcatatatactacatgaaacttccaataagattggagtgtgtgtgtgtgtgtgttctctttactatgttacttttaatacgtggttgtaagttcaagtaacttactgtgtgctaataattccaataagattggcttgtgatttcttgttatttactgccaaaaaattaatctggttctaaaaatctacatgcctattaatttcaataaatcccctaatcaattctagttattttattagttagcataaatagaaaaaaaataccacattattattacaaatcactaagatttattagtccacattatattttactgataattatcaaagcatggtactatttaaaacctcaaacaagttagcaattaaaaatctcacagagactgattatcttatttgttttaattaagagaaaggcaaaaacaaaattgagtaatgcttgcttaccaaaatatacagctaaaaaagacaattttaggcccacaataaaaaacaatcaaaaaggcccgctccttcaaaaagatttaaaaagtgaacggactcaatttcccatattacccttcattgctactcgaatttacggagaaaccctgtttctctgtccttacgcctttctctctccgttacactgccgccgtaacgctttcttccttcttgtaaaaaaagtctctccgtttaactaaacgccgtaaaaaaactcagctttgataatatcggttttgatttttgattgagtttccctccatatctcctcgatttccgattttgaggaatcaatctctctgtttatacggtaaacttcataactccatcgattttttggtttctctattttgaatttcaaacaaaaaaactgttactgatccatatttgtatttgattgatcgtaaatcctctgaaaattttcttctttgttttcttcgccactgagagactcaggttcgatgctctgcttcgttttttaaggtttttttagtggaaaggtttaaagggtagttatgtctttttgacttgtgttacgactcacttcgatgtttatggatctgtcagaaaagctctgacattttcttcattttgatcgtaatttgtggcgatcttgatcttgttttctatttttaaaccattatatctaaatcttcaaagctaaaaataaagatgctcttgaattattctcatcgagcaagtgtttaagtaagacttcactttagaacactctctgctctgttaaacctttgtgtttcatgattactgtctctaatcaatgtccctttctatgcgctgttttgccttttgttttttgaacaaagaagaaacctttttcttattttgcttctttataattttgattccagctgcacaactctagtgaacctttgttaccaatg

SEQ ID NO: 12217 - DNA, 3000 bp, Unknown; identical to SEQ ID NO: 12216
  misc_feature (1)..( 3000): cDNA_ID_3024252_gDNA_ID_2214537_Annot_ID_185138 3000 nt of promoter + ATG

SEQ ID NO: 12218 - DNA, 3000 bp, Unknown; identical to SEQ ID NO: 12215
  misc_feature (1)..( 3000): cDNA_ID_2708540_gDNA_ID_2214537_Annot_ID_185137 3000 nt of promoter + ATG

SEQ ID NO: 12219 - DNA, 3000 bp, Unknown; identical to SEQ ID NO: 12214
  misc_feature (1)..( 3000): cDNA_ID_2708558_gDNA_ID_2214537_Annot_ID_185135 3000 nt of promoter + ATG

SEQ ID NO: 12220 - DNA, 3000 bp, Unknown
  misc_feature (1)..( 3000): cDNA_ID_3024260_gDNA_ID_2214537_Annot_ID_185134 3000 nt of promoter + ATG
tgcttcaggttagaaagtttgcattgactaatgactacaactattgatgaaagtgtgttgcctatctgtttaacctctattttgtgtgtgtggtcaactaagtgtctaatttatcgactgacttatctacttgctatagaaatagttatgcctattgattccttcctagaaatttggagcttactggttcttctttagtatgataccttgtggcatgtttatattatgaggatgtcatcttgttagagtttctttgtctcagtatacacttattcgaggcgacacaaaaagttatcctcagtatgataatgctaatggtgtaggaaaagtatgaagaggctgttgcagctctcgcggagatggaggagagggcagttatggcagagtccatgttggaggcgactttgcagtatcaatctggccaagttaaagcacaaccttcaccacggtctgtttctttggcatatatcaagtgaacttggtgtagaaaactagattttccattgggtgcattaagtcaccattatttttctgaaacttttcaggcaactgaagcaagatttgccggtcatggtcagtccctagaatcttatccaagtcagtcttcttctttctctcactctcatatacagtatagtcaagagttcagtgcatgtaacaattggagtttcttttcaaaaccaattgtgaatattacatctgaatctggtgctgagcattaacaaggtctctctgatctgcgattgcagaagactacatatgaaagacctaaggagcaagttaacgacgagaagtcatcaacagaaggacaaacacaaacttcatagcagaagaacacgaagctctaagacacactccgtaaggtatataattatacaaattgccgattagattgtcgagataactagtagatatattgaattacataatttctttggtaagcatatataaacaattcgttgtaagtcaaacctctgttatgacaaagagttttcaactatctatagtggaccagaagccacaaagaaacttcactatataatatatgcatcaaataaccatagtgggacatgtatctcttttattgactatcttaagcatatatgcacgaggaggattactcgagcaaagaatgtagtacaagttgtttgattcaatcataaaatgcagagagagattaggctattgcagactgtttatcgtcttcaaggtgtaatgccctaaggagccttgcccatgactctgggattccaccgggcaattcaaattccaacagcttcccgcgtttcttgtagaattcctccactggttgagtctgtgaacgaggaaaaacatataaacattgttaattctacgagaatttgaatcatggaaaaagatcgaagaagtatttttaccattttgttgtaaatcctgagtctttccttgacaacttcttcagtgtcatcagctcggcttataagcttcgattcacagtttggcggaggaagaagaggaggcatatacattctgggagtatcatcatcacctttgatatcaatgcaggcaacgttatagtttccaccacactcgctgcaaattcttcttcctaaacatttcgcaagcaatgcctcttctcgtagcttcaggttaatcaccagatcgatattagttactccctccagtatttcctagaagacaaaaaaagaaacagagctgtcaaacgaaagagtcctccattagcctgaaatctacacaagcaataaattgctcaccgcttgagtcacggtgcgtggaaaaccatcaagaatgtatccagattcacccttgtctttgccagcttggagacgctttgataacaaacttattatgaattcatcaggaactagttttccatggttaacaagctccttgagctacacccaaagcagcaaacgattaacaagcataaataggcgctcaatgattcaacctctgttctagttatagacaagagatacaaccccaaattcgctatccatcattggattctatttataccaaaaagaattctcatttcaaaggaaaaatctgatcatgttggtgacattagtgacctagcaaacaaaatgcaacatttacatcaaaaaaagtttcactgagaccaattttagaagcagactcaattttaagatgattgaacacacaattaaaaatctcaaaattgatctctatgtcttcttcactgagcatcgtgatttcaacaatcaacagctacagaaaatgaatcgagaattgagaattgtaacctgagaggagaggaggccagaggaggagagctcttcacgaacgagatcaccagtggcaatatgaggaacgccgaggagagaagagagacgagaggcataggttcctttaccaacaccaggacatccaagaaacacccagtggaaatttctgcctttgtatggagacgttgacgtagacgaagacttcccgagctgagccgcagcctcctccagatcgattttggggtctagcgaggacccagacgaagaagaagagagagacctaataaagagagaagaaaaagtattctttatcgtcgtcgtcgccggcctgaggagacggtgagaaaccgccatggagagaagaacacggtgaagaagaagaaataatgattgttttagtaggctcgtgaggaacacgtgtcatgtcttttatgtcactgtccctctctttgcttccatggctttacctattcagacataggttcctttaccaacacgatgggtttttttttcggttccggtttggtaattattttggtaactgcttagtcctgccgggtaaaacccgttggtattgggtctttttgacccgtttgggctttttccctcaattctctttttgtgttaattgaaaaattccttggccgggttctatcatctctttctccgggaacacactaaacctaagtccgatcgaaaaagcgatcacttgactcgaaatcacacgactttatctccctgaaccctaatg

SEQ ID NO: 12221 - DNA, 3000 bp, Unknown; identical to SEQ ID NO: 12212
  misc_feature (1)..( 3000): cDNA_ID_3024264_gDNA_ID_2214537_Annot_ID_185133 3000 nt of

SEQ ID NO: 12222 - DNA, 3000 bp, Unknown
  misc_feature (1)..( 3000): cDNA_ID_2708550_gDNA_ID_2214537_Annot_ID_185130 3000 nt of promoter + ATG
tattctccctatttctaaaaaaactacctactttgcaaattatttgtgaaaaaagtgtctagtttccaacttatctctaaaagatttgatagcctatagtggctttagttcctccttgtcattcccagctgtgtatatatattaacccatggatgggtgattaaatggtgatatagtttacgactaaactagaagacaacagaaaaagatgcagatttggagttggcgacaaacatagataactaaatggttataaaagaaaaagagagaagaaaatcgaataaggccaataatatataaagtggggatgggaataaacatttttatatttgtcttctattcccttcttgtccgtatcaaattatcaatcttcaaacacaataagtatatgttattgttaaaacaagtaacgagcaacataaaattagatatttgtaactttttgtacaacataaaatttggattatcctttactcgttttactttttttgtatgcttatccgtttatcgtttttttctaaattacttgtatagttatttttactatcttaccaatgtaacaagaaaaaagttatactacatgcagagactaaacaaaagaaatttaaaaattaggtatatataccacgagtgagagtaccccttccttatctcataccacgagtcccattcgatatatgatctcacgtaatgaaacgggacaaataacatgcaagtagacaatttgttaacgtgtatataaaatctcgaaatagccgttttgaacaagttaaatacggatagacaaaatttattactcaactaagttaagtaacaaacccaaaatcacgggcaaagtaaaccacactcttatattatgcttaaaataaagaagatcccatatttgtttggcaaatagatcatcaatgtagtcgaagggctccacgcgcagcgacaaaaacggaacaagaaagaagaaaaaatcaaaagattcaaaaacctttcttcatctttattaacatcaactattcagatttgtgtaagacaaaagaaagaagcgaagattacggggaccaacagtgacgtggacctctccccgtcggtgcccataccaccaactttactactccagtactggtcacttgcttgttcgaattaaccaaatccaattattcgtaactatgtttcagattgttggctaactgatgatcaatcctacaataatacttaaaacgtttattagtatattgtttggaagatggtataacaattcattggttactgatgcttgttgccaaaaaaaaaaaaaggaaaaagaaatgattaaacgcttgcatctgtttgatttggactccatagattcctttatatagtcaactataatcaatacacgtgaatcatttcgtcatttgattactgttgagacaagagtcaattaccaccaaacatattattttaaaacattaaagttccgataacttcgggtgatggccgcaaatttgagttttggtttgatattgtatatggtattatggtttgagttaacattattattattgtatcatcaattcatcatccgaatttagacctacataataaatgcaagatgttatatacaagaaattccaactgccacaatatagaaaaagagcagcaaattttatttttttctcattggctttcataaatgttacttaataagacacaagacgttgggaaggactgaatgactttactgatatgttttcatgctaccaaatttcgtttttcatcattctaccatatcaatttcgaagtagaggaataatgtcgtgcacaaccaagtctcggtcccagctaccattttcttcaatgaacaccgcaacacgtaaacgcaagtgataccgcaacctagctaatgaagttttggttaacatgaactcgcactatatgacttccaaatcttttgtcttcaactcttttttaccaaagattcaaaaccgtaggctcttactctataaagctagaccttgtcatttttaatgatattacacagaacaaaaaaaaaaatataaatccaaacctaaaatcacaacccaactccgaagataataaacggcattgaaaatcacacaacaaccttaaaggctataatcgtcactgaatgttacataccgactctgaatataacataacttataggatactaaaattatgtcaattcagatgtaaagttgtatcaatttattgaaaatactagctactatatgaaaaagtttagaaatgtattggggaattaagttttccgaaagagagtgtttaactaatattgcctcaactcgttttatgaattttcaaattttagtcatgtggatatggaaatggaatagaactgaaatacattcttctaatcaatcataatccatacaaatctgtatttttactcatttgtatttaaatgtaacaaccacatacataatcccaccttaagtacatgattaaggaatgacttttcagcaaaacacacctcaaaattctcaaattcttgtcagttcaataaaacaatttccttgaattattgtcagacacttaaaagatttgtatgcatgtaactgctggtcccgtattaatatttattgcttcattccttattactaagcaacaaaagtcacgcgtgagatataaaagaagatcctttgcagtttctctgttcttgctccttcttcttcatctccctttattgatactgtctgagtaataataaaaattcactctttttgtcttctcaagacagatttcaaaatagaaatcattctccttttttctttttgaaaatttcgagtgatttaaggagggaaaataaagacagaaacaagaacaaaagcatcgtttgcgaataagacttctcgtactctgttttcttttctcgtgttcttatgacagatttataaaaaagattaggtttttgtcttgtcttggcgataatgcctagagagtgttttaaagatttgatttaaatactcttttatgttaactacgatg

SEQ ID NO: 12223 - DNA, 3000 bp, Unknown; identical to SEQ ID NO: 12209
  misc_feature (1)..( 3000): cDNA_ID_2711632_gDNA_ID_2214537_Annot_ID_185129 3000 nt of promoter + ATG

SEQ ID NO: 12224 - DNA, 3000 bp, Unknown; identical to SEQ ID NO: 12208
  misc_feature (1)..( 3000): cDNA_ID_3024272_gDNA_ID_2214537_Annot_ID_185128 3000 nt of promoter + ATG

SEQ ID NO: 12225 - DNA, 3000 bp, Unknown
  misc_feature (1)..( 3000): cDNA_ID_3024248_gDNA_ID_2214537_Annot_ID_185142 3000 nt of promoter + ATG
gtggtgactttctaccctttgaggtcttgaagacgaggtttgtgatcacctctgtggcacatagagccactccgcgatagtttccttccaccgctatgatatgttcgtccggatattgaagtacaaactgtttatgaattaaatatcatttcttcaatcaagaaattaaaatttctaaccaaaaaaatcaagaaactaaaattcacgaaaagaacttataattgatcggagcttgtagtataatagtttgttatagtgttgtagtgtgagttttagatatttgatgtagaaaatttggaatgtgatgagagggtaaatgaagtgaagaacctctttgggttgttgaatgattttcccatattcagttgttacgacttggccgtcttccttcacatactcgaatttgacgtaagtgatacgattgatatcttgtcctacatacacttttcttacaccctcatatacatcatcgtcccattcacgccctccttcaccaccgtagcctgtcaacttccggtagattttcgccattttgtattttttcaaatactgtaaaatgaattttttaactaaattatccaaatccaaataaagtgtatattcaagctttataatgtttactaagccgggatcccggatctgtgattggtgatacactagcctattgaattgcatagcaagacatagagagcaatgatcaactaatgagtacctatttacgaaactaaagttgtaatttgtataaacaaatcagaacttgagagagagagaagagagaacctgtaaattcttgatcttattcagaatgaaattaaggaactatcaactatgtctatttattgatacaatttggaacacgtttttgttgattccaataatttagttatacttgtaagttgtaactaaatcatgattgacctttttctgttccctttacttttccttcaaaaagaatatgagaaggaaaacattttacaaggccaaaccaatccccataatttgtaatttaagtcatattagaagagaaatagccaaactaacccaaaatatattagagatctcaagagcatcctggctgcatgttatcattctggacgatatgtcacgagacgagaggttctaacaaataaagcaatagatgattttgataagagtccaataatactagcatattacaagttgtcagatggagacatccatgattgtaatgaacagaggaacaaaacaattttgtttcacaaagaaattttgttataatatttttcatatactgtttacatcgtcgtcccattcacgtcctccttcatcaccgcaaagtgccaacttccgctagatcctcatccattttgaatcaccaaattaatccttaaaaatgaaaaaaaaacaaactaaactatttgttagtccaagtatgaatgcatagctttataatcatttcctaagctggatatgtgattggtaataaactaatactaccatgacaacattgtaccctattcatatacatcgcaataaaataccaaaattttccactaatcgcagatagaggaatcaactaatgcatggtagggtaaatatttatagtgtgatgttgatagctctattataggtgtactatataaatcaatgacgatataagtatactgtatagtattaaacaagccccacacaacaaactgaaattgcatccacatattcatttctcacgtttatttcatctatatatcctaccctacttgctcataaactttcctctcttgtcttaaacttttaacgttacaaagtcacagccacaatattctatcctcaccgatataataatcaccgcaacagtataatcttaccttgatatctattatatggattaaaacccgatttcttactaaacatttgacactttcgcgtagaacataatctgtacatacgaatttcgaattcatatatatatatatatatatatatatatatgttggataatgattgttttctcgaatattgtgtcgatttatagtgtagtcatattttagatagctactccgttcatcaccaatagcttgtttctatggttaatttctttcacttattagatttatctcaaccaatcactcaattagtttctagagattgttgtgattgctatactacatgttaagcactttttatttttgccggatttcttggccaaaagggttggcgatagaagcaactacattaaattcatgacctaagctaaattacatgtaacgatatacaatacaagatttgtctaaactaaacattgattcaaccaaaacttatatagactatatatttaacccaaatacttatcatataaatgttttcttttttgacgtcaacacaaccgtaaacattcgaaatcttatatatttaattatttactatgcttgttatttcatttgtcgacgttgttttttttttttgcattcttcagatccactaagaaaaggcaagtccgaaagataatgggcccaattagtggctatataaaaacccgacccggaaagactaaacctgatccgcaaccgaaccgacccgacgacgctagtataccgtaaaaatttgacaatcttcgtctccggcacaacaaaattgttcttcttcggcaagattcctcgattttctccgtgttctgtaatttccgatagattttgacaactctctttgattgtttccctttagctttttatttttatctgccttttttttttttgttgttgttccggttctattcgtttccttttgttaccttgtttttggttttgatctcaaatcctgctctgctctactatcttcaattcgattcttcatccgaacgaagaagacacaaattggagcttcactggtacatattcttgacgctttatctctgatttgctatttagggcttttcaatgaatgaatttagtttttctgctatgttcattgggaagtaagttcaatcgtatgtgtgatgatttttcaggacgttgatgataaagc

SEQ ID NO: 12226 - DNA, 3000 bp, Unknown
  misc_feature (1)..( 3000): cDNA_ID_2708545_gDNA_ID_2214537_Annot_ID_185141 3000 nt of promoter + ATG
aactgcaaatttccatgaagtaagtgatcagcagctaagtttcgtaacaatacctaacacctaatagaaaatgttgtactttgcatcattgagctgtattcataacatattactagtgaaaatcatacggctccacagaattgatgataggtctattcttaaagcagaaactgattttctgaaatgttccaagagttcacatacggagcctagaatcaaagtcactttttttctgctgcataaacatactgacatgcaaaattcctctaaccattacaatggtgaactaacaacaagcataactttcatatctaccaagttaaatctggagcaaactaaaataaacaaattcaattcgcaaaaattgaaccaatgcacgaaatttcacttgcatataaagactaaataaatctgcaaattggaaaaatttaagcttaaaagaaagagaaggcgcaagagattgttaattacctcaatggaattagggtccattggtgctacggcctgagtgttccctccgtgattcatgctttatcatcaacgtcctgaaaaatcatcacacatacgattgaacttacttcccaatgaacatagcagaaaaactaaattcattcattgaaaagccctaaatagcaaatcagagataaagcgtcaagaatatgtaccagtgaagctccaatttgtgtcttcttcgttcggatgaagaatcgaattgaagatagtagagcagagcaggatttgagatcaaaaccaaaaacaaggtaacaaaaggaaacgaatagaaccggaacaacaacaaaaaaaaaaaaggcagataaaaataaaaagctaaagggaaacaatcaaagagagttgtcaaaatctatcggaaattacagaacacggagaaaatcgaggaatcttgccgaagaagaacaattttgttgtgccggagacgaagattgtcaaatttttacggtatactagcgtcgtcgggtcggttcggttgcggatcaggtttagtctttccgggtcgggtttttatatagccactaattgggcccattatctttcggacttgccttttcttagtggatctgaagaatgcaaaaaaaaaaaacaacgtcgacaaatgaaataacaagcatagtaaataattaaatatataagatttcgaatgtttacggttgtgttgacgtcaaaaaagaaaacatttatatgataagtatttgggttaaatatatagtctatataagttttggttgaatcaatgtttagtttagacaaatcttgtattgtatatcgttacatgtaatttagcttaggtcatgaatttaatgtagttgcttctatcgccaacccttttggccaagaaatccggcaaaaataaaaagtgcttaacatgtagtatagcaatcacaacaatctctagaaactaattgagtgattggttgagataaatctaataagtgaaagaaattaaccatagaaacaagctattggtgatgaacggagtagctatctaaaatatgactacactataaatcgacacaatattcgagaaaacaatcattatccaacatatatatatatatatatatatatatatatgaattcgaaattcgtatgtacagattatgttctacgcgaaagtgtcaaatgtttagtaagaaatcgggttttaatccatataatagatatcaaggtaagattatactgttgcggtgattattatatcggtgaggatagaatattgtggctgtgactttgtaacgttaaaagtttaagacaagagaggaaagtttatgagcaagtagggtaggatatatagatgaaataaacgtgagaaatgaatatgtggatgcaatttcagtttgttgtgtggggcttgtttaatactatacagtatacttatatcgtcattgatttatatagtacacctataatagagctatcaacatcacactataaatatttaccctaccatgcattagttgattcctctatctgcgattagtggaaaattttggtattttattgcgatgtatatgaatagggtacaatgttgtcatggtagtattagtttattaccaatcacatatccagcttaggaaatgattataaagctatgcattcatacttggactaacaaatagtttagtttgtttttttttcatttttaaggattaatttggtgattcaaaatggatgaggatctagcggaagttggcactttgcggtgatgaaggaggacgtgaatgggacgacgatgtaaacagtatatgaaaaatattataacaaaatttctttgtgaaacaaaattgttttgttcctctgttcattacaatcatggatgtctccatctgacaacttgtaatatgctagtattattggactcttatcaaaatcatctattgctttatttgttagaacctctcgtctcgtgacatatcgtccagaatgataacatgcagccaggatgctcttgagatctctaatatattttgggttagtttggctatttctcttctaatatgacttaaattacaaattatggggattggtttggccttgtaaaatgttttccttctcatattctttttgaaggaaaagtaaagggaacagaaaaaggtcaatcatgatttagttacaacttacaagtataactaaattattggaatcaacaaaaacgtgttccaaattgtatcaataaatagacatagttgatagttccttaatttcattctgaataagatcaagaatttacaggttctctcttctctctctctcaagttctgatttgtttatacaaattacaactttagtttcgtaaataggtactcattagttgatcattgctctctatgtcttgctatgcaattcaataggctagtgtatcaccaatcacagatccgggatcccggcttagtaaacattataaagcttgaatatacactttatttggatttggataatttagttaaaaaattcattttacagtatttgaaaaaatacaaaatg

SEQ ID NO: 12227 - DNA, 3000 bp, Unknown
  misc_feature (1)..( 3000): cDNA_ID_2992400_gDNA_ID_2214537_Annot_ID_185140 3000 nt of promoter + ATG
aataggctagtgtatcaccaatcacagatccgggatcccggcttagtaaacattataaagcttgaatatacactttatttggatttggataatttagttaaaaaattcattttacagtatttgaaaaaatacaaaatggcgaaaatctaccggaagttgacaggctacggtggtgaaggagggcgtgaatgggacgatgatgtatatgagggtgtaagaaaagtgtatgtaggacaagatatcaatcgtatcacttacgtcaaattcgagtatgtgaaggaagacggccaagtcgtaacaactgaatatgggaaaatcattcaacaacccaaagaggttcttcacttcatttaccctctcatcacattccaaattttctacatcaaatatctaaaactcacactacaacactataacaaactattatactacaagctccgatcaattataagttcttttcgtgaattttagtttcttgatttttttggttagaaattttaatttcttgattgaagaaatgatatttaattcataaacagtttgtacttcaatatccggacgaacatatcatagcggtggaaggaaactatcgcggagtggctctatgtgccacagaggtgatcacaaacctcgtcttcaagacctcaaagggtagaaagtcaccactgtttggtccaaacttgcttggaattacgaccggtacaaagttcgttattgaggatggaggaaagaagatcgtagggtttcatggacggtcgggtaatgctctcgacgcgcttggagtttactttgtacatggctctctaacaacgtctccgcctgtttacaagctggatgcccaaggtggtacagacgggcgtgtttgggatgatggttcttacgacggcgttaaatcgctgcgtattggtcaagataattctcgtattacttatttagagttcgagtacgagaaaggcggtaagttagagacatgtcgccatggggtgaaacaagaaagatcactgaaggtaaatttctagaaactgtgagatatagtagaacaaccaaaatttaggtcttaaatataacttttgatatcttgcgacagaagtattcttaaattttgattttgttgcagtttgagcttaacccggatgaatacatcaaatcggtggaagcaacctatgataaaccggacattttccgcaatgtcgtcattacatcgcttacatttgaaacatcgaaggggagaacgtcattctctgggtataagggaggtaagaagtttaagctagagcaaaagggtcgtaggcttgtcgggttccatggaaaggaaggttcagctattgatgcccttggagcatattttgcacctattcctactccgactcctataattccagccaagaaactaccagcaataggcggcagcggaggagttgcatgggatgatggtgtctacgatggtgtaaggaagatacttgtaggacaaggtaacgatggtgtagcctttgtcaagtttgaatacaataaaggaaaagatcttgtatctggagatgaccatgggaagatgacattactcggaactgaagaggtcagttccataaacaagagttatgttttttcttttttcagctaattttattttaaattatacacttatccttgttacttttgagtctttgcagtttgtgcttgaagatggtgaatatctcacggccatagatggctattacgataagattttcggagtcgagacaccaatgattatctgtcttcagtttaagacgaacaaaagggagtcaactccattcggaatggattcgggtgagaagttctcgcttggagagaaaggccacaagatcgtcggattccacggacaagctagtgatgttgttcacagcatcggagtcactgtcgtgcccattaccaacaccaagtgaaaaaccttttattatataagtaaaaccagccagtgccatgtcgactaaatgaaaacattcaataaggattggtgtgtttactctactacttttgatgtgtttgtaacttactgtttctgtcaaatatgtccaataagaattggtgtgctctcttcaactattcaataaatctaccatgagccgtgtcagagtagctaacattgaacacacagccccactgatgtaatgaaactttttacccactattttaattgctccttgtaacatttcaaagacatagacattagaaaaagaagctttctcattgttgtcttcctcaaagcccagatctctaaagtggtcttacaagatttgattatgcatatgttgcccaaatgactaaaagtaatcttaacaaaaaataatattaaaagtaatcgaaaatgagtcgtcctatatatttaagaaaataaatatatatttttcctacatatgaatctaatcatgactaaatatgttttttttctccggattttcagattggagttgcacaatttcaccgaaatcaagatgaaaagtgatggaaattgccatctaattaatatttctaattccttttactcaatatatcaaatacttgatgtcattttttatcgtactcatttattcgaaaattttcggatcaaagcaaataataaaattaagtattcgattaaaacgaatcgaataacaaatatccccaattttccggatattcgattcgtgcccaggcctacgtggcacatatacaagtgaaaatgaaatcatacgcaaataaaacaataccatcggtataaacataaagaaatgaactatttatttttccttaagataattgtaaatttcgtttatttttttaattatggaattttttgctttttctttttcgttcttttagtatattaaaggataggatcatcataattcacaattaactgttggagaaagatttttttttttgagaaacgttaaacctagcagccctaatcttttctaagagaggagatcgagactctgttctgaatcaataaccatcgatcaatctcaactctaaaagatg

SEQ ID NO: 12228 - DNA, 3000 bp, Unknown
  misc_feature (1)..( 3000): cDNA_ID_2708542_gDNA_ID_2214537_Annot_ID_185139 3000 nt of promoter + ATG
atctaatcatgactaaatatgttttttttctccggattttcagattggagttgcacaatttcaccgaaatcaagatgaaaagtgatggaaattgccatctaattaatatttctaattccttttactcaatatatcaaatacttgatgtcattttttatcgtactcatttattcgaaaattttcggatcaaagcaaataataaaattaagtattcgattaaaacgaatcgaataacaaatatccccaattttccggatattcgattcgtgcccaggcctacgtggcacatatacaagtgaaaatgaaatcatacgcaaataaaacaataccatcggtataaacataaagaaatgaactatttatttttccttaagataattgtaaatttcgtttatttttttaattatggaattttttgctttttctttttcgttcttttagtatattaaaggataggatcatcataattcacaattaactgttggagaaagatttttttttttgagaaacgttaaacctagcagccctaatcttttctaagagaggagatcgagactctgttctgaatcaataaccatcgatcaatctcaactctaaaagatgtctaatactcagaccaagtcgttgtgtttggacggtcttagtgatcgcgaaatacttgagtataggtattgatcgattcttcttgtaaactttgttccaattatttttttgcctgataatctctgactatatatgttatttcttattcttcctggattttcagattggaatgggaaaattacaccgaaatcatgatgaaaagtgatggaaattgccaggtaattaatgtttctatatcaaacaatcaacttgatatatatttttgatcgtattatgaataaccctttttcatgtttttgtcaataattctatttcagttccgtgctttggcggatcaactttatcaaaattcggattgtcatgaacttgttagacaagaaatcgtaaaacaggtaatatcaatcttcaaacttttgattgtttttttcatacgtgtattaatgtcatatgatgattgattgattgatgactctcagcttaaaactcatccgaagatttacaaagggtttgttgatcatatggacttctcccataaagaacatgtcattgtccactaattcccaatggggcgatgaagtgactttgagagtggctgctgatgtgtatcaagtaaaaataatactcattacatcaatcaaacttattccatttatggagtttttgcccaagtctcaaaaggaaccggacaaagtcattcatatgagctatctagctgggatccatttcaactccatctacaaaaaaaataaagaaaaaggttaacgttctcttccttctccattgtatatacatctcatctccttactcttgatttgaggctttgagcaatattgtatcattcttattcttcgtcttgttggctgcttcaggttcacgttcatcttcatcatcgagttctgcagtctggatgaagctacagaggaagaaggagaatgaggcgaagaaaaaggaggaggaggagaaggaaaggaaggacatggagaaggaggagaagaaaaaggacaaggaggataagaagaaggataaggaggataagaagaaagccaaggtgcagaaagagaagaaggagaagaaggagaagaagaacagaaatcaccactttcactattctgaatgatttgttttgataaattaagtgtatctgcatttgacaagttgtatgttattattgggatcattgtggttgttttgactcttttatgttcttttcgagcttattctagttttgagccttagatactgataatcataaaacacaacatgataatgtgaaagagtcatcatgacataacatcagcgtcccaaaataacttgaccatcgtctccatggtatccaaccgtcgatcctcaacgactccaaaaagcaaggacatgaatatatgatgatgataagccaaacttttgcatgaacacagtttatacaaaatttaaataactgttaaattcatttgaaactttaatgaatgatatttctgacagtaacttaggaaataaagcttatacaccgttttagtttgaagataataattctaaatctgttttcaaaatgtgcagtcaaaaagattcttaatactaaataggagattttggtgggaatcgcaacattaacatcatcaaatttgttttagttaacaatatattgaatttggtttatgctgttttgatgaattgttttgttcatctgtcgtactttaaaatatctctgcatctagaaagttgtatgctattattatatattgcactcgtaatggactctaattatttgttgcatttgtgagggagtctctcgtgtcacacgagttgattattaaaatgattaattaaagacaatcaagaagaccttgtatgccaaagattgtcaataaatacacacaattcaatacccataagcttcatctccttccatcattcagagctcaataattaactggttatctctctcccttcaatttttttttttttttttttttttaaagtaactcctagtttccactactatgtatgttgcttcacaaaatgtttttaaaacaagaagtagctctttatatgtagatatgtattcttgaatatattagatttaacaaacacttttaaacctaattgattgatttatattacaccacatcaccaataatagagctatcaacatcaaacagtaaatatttacccatgatcagttgattgttctatttgtgtttcttggatcattttggtgtttttgctatgtatttgaataggctatacagtgttatcatggtatttatgtattactaaccacaaaccagctttaaaaactatatataaagctgtacatatatactttcgtttttggattatctatataagaagtaatttttgcattttacaatattttttagattcgaaatggcgaagatg

SEQ ID NO: 12229 - DNA, 1864 bp, Unknown
  misc_feature (1)..( 1864): cDNA_ID_1397750_gDNA_ID_2214537_Annot_ID_185121 3000 nt of promoter + ATG
aacaagaagtgtcatgagaaacacaaaaatcaaaaccacatatgaatgagcgattcatctcatttagctagcaacaccttttcagagtatatatcacatatgctatggagtatctagattggtgaatttaaattgcatcgtcataaaacaagagggaaaaagccacagtaatcaatcaaaagattaggtcaatatcaaatagctaatttttcaaaatgaaagttgatatacgataaaaaggtcagattaataaaaacaaaatggttcattgaacatgtatgtatcagattgtaagtatgtcaaatcaaagtatatatctatctcactttcgaaatctgcaaaaatgactagttaattgaggtgaaccggcaaaaaaatcacaatcgtaagaacagaatcacatgatgtgtagatctgttggtcgttcatttggacttttcttctgaaacgataactcaagagcatgtgctcatttgatctctctttgttgattctccgcttccttcaacatatccccacatgcttcattgttgtattttatttttattttcgaaactatattaatacagaggagaggaagatcgtcctcacaagtatttgcaaaaatgatacacaaatcaatgccaaaatgatgacgcagtgaaggtttagacagctcaagaatgatattgcacatcaatcactgattcaatgttttatttttgtcttcttcttttttttttttgttgaatgatactcattgtcaacataatatcataagccttttatcaaaataataataatacataatgtcctgcattttgtctttttgtgatgatttttgctcattatataaattgcaagtaactatgttttgcaaggttttttctgttcgtgacataaattgcgagtaaccatgttatgttattatatatgtacctatggtgcgaaggttagattttacatatggagataataagtattggatttggagataacataatgctacgactttatactgtgtatgttgggatttcataccaaacaaaaaaaatgaaaccaactagccaagaatatgtttacgttttgagttttacagagttcacattatagttgattttatttgtgcaaattatatttactctgcaaaataacatcttactctcctacttcaagaaactttgaagagaaagatatggaatgcaacgagttacacaaatctgttacaagatttctaattaagaacttacaaatctgctacttatcatcttttgaatacgtcttttggtggttaggttctaatttgtctaacagtatatgttttccaacaaaatttgatccttttgaaagcattactcttttttttttttttttttgtcaattttgaaaggattactcatattccttaaatcatgttactaaactcacataaatacgtattaagccaaagacgactcttgacgtgctctaaaatccaattcattctttatagattttaattcttggctctttatcctatttaatatttcgccgaaaaatctttgaaatgattatctgattgtatttttttataaaaaatttgtcataaccaaatttagaattatattttaaaatttaggaatgagtttagttaagaagttggtttgaaggtatagttttttctggaatttaaagtttaactttaaaatttattaacgatttagtattagattagtttattaatttgttgaaaaatctggtctattttgttacttttttcaaaaatatggtctattttcataaaaatccctaaaatatccgaatttatcggataaacccaaaccccctatcgggaaaacccaacacaccgtctctctctcactctcacttcccatcggcgaaaatg

SEQ ID NO: 12230 - DNA, 3000 bp, Unknown
  misc_feature (1)..( 3000): cDNA_ID_2708542_gDNA_ID_2214537_Annot_ID_134414 3000 nt of promoter + ATG
tacatatgaatctaatcatgactaaatatgttttttttctccggattttcagattggagttgcacaatttcaccgaaatcaagatgaaaagtgatggaaattgccatctaattaatatttctaattccttttactcaatatatcaaatacttgatgtcattttttatcgtactcatttattcgaaaattttcggatcaaagcaaataataaaattaagtattcgattaaaacgaatcgaataacaaatatccccaattttccggatattcgattcgtgcccaggcctacgtggcacatatacaagtgaaaatgaaatcatacgcaaataaaacaataccatcggtataaacataaagaaatgaactatttatttttccttaagataattgtaaatttcgtttatttttttaattatggaattttttgctttttctttttcgttcttttagtatattaaaggataggatcatcataattcacaattaactgttggagaaagatttttttttttgagaaacgttaaacctagcagccctaatcttttctaagagaggagatcgagactctgttctgaatcaataaccatcgatcaatctcaactctaaaagatgtctaatactcagaccaagtcgttgtgtttggacggtcttagtgatcgcgaaatacttgagtataggtattgatcgattcttcttgtaaactttgttccaattatttttttgcctgataatctctgactatatatgttatttcttattcttcctggattttcagattggaatgggaaaattacaccgaaatcatgatgaaaagtgatggaaattgccaggtaattaatgtttctatatcaaacaatcaacttgatatatatttttgatcgtattatgaataaccctttttcatgtttttgtcaataattctatttcagttccgtgctttggcggatcaactttatcaaaattcggattgtcatgaacttgttagacaagaaatcgtaaaacaggtaatatcaatcttcaaacttttgattgtttttttcatacgtgtattaatgtcatatgatgattgattgattgatgactctcagcttaaaactcatccgaagatttacaaagggtttgttgatcatatggacttctcccataaagaacatgtcattgtccactaattcccaatggggcgatgaagtgactttgagagtggctgctgatgtgtatcaagtaaaaataatactcattacatcaatcaaacttattccatttatggagtttttgcccaagtctcaaaaggaaccggacaaagtcattcatatgagctatctagctgggatccatttcaactccatctacaaaaaaaataaagaaaaaggttaacgttctcttccttctccattgtatatacatctcatctccttactcttgatttgaggctttgagcaatattgtatcattcttattcttcgtcttgttggctgcttcaggttcacgttcatcttcatcatcgagttctgcagtctggatgaagctacagaggaagaaggagaatgaggcgaagaaaaaggaggaggaggagaaggaaaggaaggacatggagaaggaggagaagaaaaaggacaaggaggataagaagaaggataaggaggataagaagaaagccaaggtgcagaaagagaagaaggagaagaaggagaagaagaacagaaatcaccactttcactattctgaatgatttgttttgataaattaagtgtatctgcatttgacaagttgtatgttattattgggatcattgtggttgttttgactcttttatgttcttttcgagcttattctagttttgagccttagatactgataatcataaaacacaacatgataatgtgaaagagtcatcatgacataacatcagcgtcccaaaataacttgaccatcgtctccatggtatccaaccgtcgatcctcaacgactccaaaaagcaaggacatgaatatatgatgatgataagccaaacttttgcatgaacacagtttatacaaaatttaaataactgttaaattcatttgaaactttaatgaatgatatttctgacagtaacttaggaaataaagcttatacaccgttttagtttgaagataataattctaaatctgttttcaaaatgtgcagtcaaaaagattcttaatactaaataggagattttggtgggaatcgcaacattaacatcatcaaatttgttttagttaacaatatattgaatttggtttatgctgttttgatgaattgttttgttcatctgtcgtactttaaaatatctctgcatctagaaagttgtatgctattattatatattgcactcgtaatggactctaattatttgttgcatttgtgagggagtctctcgtgtcacacgagttgattattaaaatgattaattaaagacaatcaagaagaccttgtatgccaaagattgtcaataaatacacacaattcaatacccataagcttcatctccttccatcattcagagctcaataattaactggttatctctctcccttcaatttttttttttttttttttttttaaagtaactcctagtttccactactatgtatgttgcttcacaaaatgtttttaaaacaagaagtagctctttatatgtagatatgtattcttgaatatattagatttaacaaacacttttaaacctaattgattgatttatattacaccacatcaccaataatagagctatcaacatcaaacagtaaatatttacccatgatcagttgattgttctatttgtgtttcttggatcattttggtgtttttgctatgtatttgaataggctatacagtgttatcatggtatttatgtattactaaccacaaaccagctttaaaaactatatataaagctgtacatatatactttcgtttttggattatctatataagaagtaatttttgcattttacaatattttttagattcgaaatg

SEQ ID NO: 12231 - DNA, 3000 bp, Unknown
  misc_feature (1)..( 3000): cDNA_ID_2992400_gDNA_ID_2214537_Annot_ID_134415 3000 nt of promoter + ATG
cgatgatgtatatgagggtgtaagaaaagtgtatgtaggacaagatatcaatcgtatcacttacgtcaaattcgagtatgtgaaggaagacggccaagtcgtaacaactgaatatgggaaaatcattcaacaacccaaagaggttcttcacttcatttaccctctcatcacattccaaattttctacatcaaatatctaaaactcacactacaacactataacaaactattatactacaagctccgatcaattataagttcttttcgtgaattttagtttcttgatttttttggttagaaattttaatttcttgattgaagaaatgatatttaattcataaacagtttgtacttcaatatccggacgaacatatcatagcggtggaaggaaactatcgcggagtggctctatgtgccacagaggtgatcacaaacctcgtcttcaagacctcaaagggtagaaagtcaccactgtttggtccaaacttgcttggaattacgaccggtacaaagttcgttattgaggatggaggaaagaagatcgtagggtttcatggacggtcgggtaatgctctcgacgcgcttggagtttactttgtacatggctctctaacaacgtctccgcctgtttacaagctggatgcccaaggtggtacagacgggcgtgtttgggatgatggttcttacgacggcgttaaatcgctgcgtattggtcaagataattctcgtattacttatttagagttcgagtacgagaaaggcggtaagttagagacatgtcgccatggggtgaaacaagaaagatcactgaaggtaaatttctagaaactgtgagatatagtagaacaaccaaaatttaggtcttaaatataacttttgatatcttgcgacagaagtattcttaaattttgattttgttgcagtttgagcttaacccggatgaatacatcaaatcggtggaagcaacctatgataaaccggacattttccgcaatgtcgtcattacatcgcttacatttgaaacatcgaaggggagaacgtcattctctgggtataagggaggtaagaagtttaagctagagcaaaagggtcgtaggcttgtcgggttccatggaaaggaaggttcagctattgatgcccttggagcatattttgcacctattcctactccgactcctataattccagccaagaaactaccagcaataggcggcagcggaggagttgcatgggatgatggtgtctacgatggtgtaaggaagatacttgtaggacaaggtaacgatggtgtagcctttgtcaagtttgaatacaataaaggaaaagatcttgtatctggagatgaccatgggaagatgacattactcggaactgaagaggtcagttccataaacaagagttatgttttttcttttttcagctaattttattttaaattatacacttatccttgttacttttgagtctttgcagtttgtgcttgaagatggtgaatatctcacggccatagatggctattacgataagattttcggagtcgagacaccaatgattatctgtcttcagtttaagacgaacaaaagggagtcaactccattcggaatggattcgggtgagaagttctcgcttggagagaaaggccacaagatcgtcggattccacggacaagctagtgatgttgttcacagcatcggagtcactgtcgtgcccattaccaacaccaagtgaaaaaccttttattatataagtaaaaccagccagtgccatgtcgactaaatgaaaacattcaataaggattggtgtgtttactctactacttttgatgtgtttgtaacttactgtttctgtcaaatatgtccaataagaattggtgtgctctcttcaactattcaataaatctaccatgagccgtgtcagagtagctaacattgaacacacagccccactgatgtaatgaaactttttacccactattttaattgctccttgtaacatttcaaagacatagacattagaaaaagaagctttctcattgttgtcttcctcaaagcccagatctctaaagtggtcttacaagatttgattatgcatatgttgcccaaatgactaaaagtaatcttaacaaaaaataatattaaaagtaatcgaaaatgagtcgtcctatatatttaagaaaataaatatatatttttcctacatatgaatctaatcatgactaaatatgttttttttctccggattttcagattggagttgcacaatttcaccgaaatcaagatgaaaagtgatggaaattgccatctaattaatatttctaattccttttactcaatatatcaaatacttgatgtcattttttatcgtactcatttattcgaaaattttcggatcaaagcaaataataaaattaagtattcgattaaaacgaatcgaataacaaatatccccaattttccggatattcgattcgtgcccaggcctacgtggcacatatacaagtgaaaatgaaatcatacgcaaataaaacaataccatcggtataaacataaagaaatgaactatttatttttccttaagataattgtaaatttcgtttatttttttaattatggaattttttgctttttctttttcgttcttttagtatattaaaggataggatcatcataattcacaattaactgttggagaaagatttttttttttgagaaacgttaaacctagcagccctaatcttttctaagagaggagatcgagactctgttctgaatcaataaccatcgatcaatctcaactctaaaagatgtctaatactcagaccaagtcgttgtgtttggacggtcttagtgatcgcgaaatacttgagtataggtattgatcgattcttcttgtaaactttgttccaattatttttttgcctgataatctctgactatatatgttatttcttattcttcctggattttcagattggaatgggaaaattacaccgaaatcatg

SEQ ID NO: 12232 - DNA, 3000 bp, Unknown; identical to SEQ ID NO: 12226
  misc_feature (1)..( 3000): cDNA_ID_2708545_gDNA_ID_2214537_Annot_ID_134416 3000 nt of promoter + ATG

SEQ ID NO: 12233 - DNA, 3000 bp, Unknown
  misc_feature (1)..( 3000): cDNA_ID_1957136_gDNA_ID_2214537_Annot_ID_134417 3000 nt of promoter + ATG
tacgaaactaaagttgtaatttgtataaacaaatcagaacttgagagagagagaagagagaacctgtaaattcttgatcttattcagaatgaaattaaggaactatcaactatgtctatttattgatacaatttggaacacgtttttgttgattccaataatttagttatacttgtaagttgtaactaaatcatgattgacctttttctgttccctttacttttccttcaaaaagaatatgagaaggaaaacattttacaaggccaaaccaatccccataatttgtaatttaagtcatattagaagagaaatagccaaactaacccaaaatatattagagatctcaagagcatcctggctgcatgttatcattctggacgatatgtcacgagacgagaggttctaacaaataaagcaatagatgattttgataagagtccaataatactagcatattacaagttgtcagatggagacatccatgattgtaatgaacagaggaacaaaacaattttgtttcacaaagaaattttgttataatatttttcatatactgtttacatcgtcgtcccattcacgtcctccttcatcaccgcaaagtgccaacttccgctagatcctcatccattttgaatcaccaaattaatccttaaaaatgaaaaaaaaacaaactaaactatttgttagtccaagtatgaatgcatagctttataatcatttcctaagctggatatgtgattggtaataaactaatactaccatgacaacattgtaccctattcatatacatcgcaataaaataccaaaattttccactaatcgcagatagaggaatcaactaatgcatggtagggtaaatatttatagtgtgatgttgatagctctattataggtgtactatataaatcaatgacgatataagtatactgtatagtattaaacaagccccacacaacaaactgaaattgcatccacatattcatttctcacgtttatttcatctatatatcctaccctacttgctcataaactttcctctcttgtcttaaacttttaacgttacaaagtcacagccacaatattctatcctcaccgatataataatcaccgcaacagtataatcttaccttgatatctattatatggattaaaacccgatttcttactaaacatttgacactttcgcgtagaacataatctgtacatacgaatttcgaattcatatatatatatatatatatatatatatatgttggataatgattgttttctcgaatattgtgtcgatttatagtgtagtcatattttagatagctactccgttcatcaccaatagcttgtttctatggttaatttctttcacttattagatttatctcaaccaatcactcaattagtttctagagattgttgtgattgctatactacatgttaagcactttttatttttgccggatttcttggccaaaagggttggcgatagaagcaactacattaaattcatgacctaagctaaattacatgtaacgatatacaatacaagatttgtctaaactaaacattgattcaaccaaaacttatatagactatatatttaacccaaatacttatcatataaatgttttcttttttgacgtcaacacaaccgtaaacattcgaaatcttatatatttaattatttactatgcttgttatttcatttgtcgacgttgttttttttttttgcattcttcagatccactaagaaaaggcaagtccgaaagataatgggcccaattagtggctatataaaaacccgacccggaaagactaaacctgatccgcaaccgaaccgacccgacgacgctagtataccgtaaaaatttgacaatcttcgtctccggcacaacaaaattgttcttcttcggcaagattcctcgattttctccgtgttctgtaatttccgatagattttgacaactctctttgattgtttccctttagctttttatttttatctgccttttttttttttgttgttgttccggttctattcgtttccttttgttaccttgtttttggttttgatctcaaatcctgctctgctctactatcttcaattcgattcttcatccgaacgaagaagacacaaattggagcttcactggtacatattcttgacgctttatctctgatttgctatttagggcttttcaatgaatgaatttagtttttctgctatgttcattgggaagtaagttcaatcgtatgtgtgatgatttttcaggacgttgatgataaagcatgaatcacggagggaacactcaggccgtagcaccaatggaccctaattccattgaggtaattaacaatctcttgcgccttctctttcttttaagcttaaatttttccaatttgcagatttatttagtctttatatgcaagtgaaatttcgtgcattggttcaatttttgcgaattgaatttgtttattttagtttgctccagatttaacttggtagatatgaaagttatgcttgttgttagttcaccattgtaatggttagaggaattttgcatgtcagtatgtttatgcagcagaaaaaaagtgactttgattctaggctccgtatgtgaactcttggaacatttcagaaaatcagtttctgctttaagaatagacctatcatcaattctgtggagccgtatgattttcactagtaatatgttatgaatacagctcaatgatgcaaagtacaacattttctattaggtgttaggtattgttacgaaacttagctgctgatcacttacttcatggaaatttgcagttttattgtttgattcaatcagattgatttgagactgtgggaggctttagcatcctaatgtagtctttatctgagatgacatttctgtttgttgtttgtctatgtttcttttcactcttcaactttttgtttatgtctacttgttaaatgaagattctcagaccttggccagtactaatgttttttctttt

SEQ ID NO: 12234 - DNA, 3000 bp, Unknown
  misc_feature (1)..( 3000): cDNA_ID_2686877_gDNA_ID_2214538_Annot_ID_134420 3000 nt of promoter + ATG
ggataaataccatatgtgagctagtaagccaaatgatttagtcgtttccgttgatgacgtatttcacttttggagctcggccttatattatatcatcaaaaactagtgagagattaagtatattgatatcatttaaggtacctagaggtccaaaacatatgtgccatatccaaagattttgggaagcaacagcctgtagttcgattgttggttttccagatccacgtgtatattgttctttccaagcggtcgggcaattctttcactcccaatgcatacaatcgatgcttcctgtcatcccgagaaatccacggagctctccaatacgcagtagtcgtttaagatcttgtcgcgtaggtcttcttagatactctttcccgaacaaatatatgattgcttcaaccgaatgtatcatacaagacatcaaagtgttttcaccaatccggaggtatttgtcaaccgcatctgtcgcacaatacaaattgttgcttgtggtgtcttcttgtacaagtgatgtcggcaccactcaaatcttcaggatcctgcaactcaaaactcatttgataagaccaaccacaagttagagaacttaaagcatagaacacaactgaaacacttaaattatataacacacaaactcaaaactcatttcattcatgatcaaaactaaaacacttaaagtatataatacaacctatcataaagaccaaacttattagccgaaacacaaagcaataactaaagtccaaactattagccggaaaagaaagtaataactaaagtccaaactcatttgataaagtccaaactcattatccgaaacacaaagtaataactaaagtccaaactgatttcataaagagcaaactcataagcagaaacacaaagtaataactaaagtacaaactcatttcttaaagaccaaactcattagtcgtaataactaaagtccaaactcatttcataaaaccaaactcatttcattcaagaacacaactgaaataattaaatccacgtattgcaatagacgagtgtttatgtttcaattcatacacaaaccaaatcaaattcatatcaatctaaaaggcaaaaatcaaaagtaataacgactgattatgtgaacacaaaaccctaatttcgtttacatataaaagccctaattatcaatcataaaaccacaattcacgaaaccctaatttcaacaatttctattaaaccctaaataatgaagatctaaacactcaaatcaaatgaatcataccttcagaagagattggagatgagtatcaataaattctccgatttcgaaccttaaactctccgatttggatcaatgacgaatcgacacactatcgccgtcgattgagacggatcgacacactatcgccgttgatcgagacggatcgccacacaattgccgtcttgttctctttgagctaatgatcgagacagatcgatatcggagagatacaatcgccgtaaaaagtcgccgctgcagagagaaaccaaacacgtgaatgcccaaaaaaaactaaacacttgtaaaagattacgtttatcgaaaaacttcatggaccaataatatttagccacgtatgggtccatgaagtatcccttcgatagggaacggcccagatctatttttgcattttctatttaattttgggttttctggaagaacctactatattaagaactctataagaccatccttattgcaagtctcttactataaatcttaggcataatataatcaaaagagtatgtgaatagttaagaagagtttcttagctaaaagataaaagaaagtttaagagcatcattatggttgtctctttgattagttcttaggataagaacatctcattttaactcttatataagagacaaatgacaaaatgtctcttatataagagtcaaaatgagatgttcttagtaattaatgatcaaaaaaaattctaagaactaacctaagaaactaccattaatgaagctctaagagcttcaaaccattacaaaagttcttagttacaattttttcaataaaacaattcattaagattcaaaattaagagcctatcattaaggttactctaagggacttccattgaacgtgctctaagacttattaattctaagtctagtcatgtttgagttttgtctataaagtctatatagatgtgagaagtgtcttttagtaagataatcataagaataatttcaattacaaacttcaattcaagataccataaaaagaaaattaaataaaacatagcacgatttactaaatctaacactcctcagttttctatttatttgatattttaggaggaaaactttattctaaatcaaaatatatggacaaattaaatgaatttacactaattacttcaaataaaaaaagatttgacatgtgaaaaattcccaaatctaaatgctaagaaaagcttgacaagtaacataacttataacccatttaattaatatatacaatgcatataatatatttttttaataaaagactttaatttatatttattctcaatatataaaagtaaaaatccataaaacaaattactcttaattttttttctattataatagagatttagaaaatagttataaacacacaattacattatacagtatactttatgtatttgttgtcacaaatcctttttatatatttatttatttgtttttacattgtctcaatagaattttataatgagtttcgtcgtcgatatctgtttgactttgaataagcgtcgtctatagtcttccactccaatctaagacgttaaacaaaccatctctcgattctctcgggaaaacactccaactacgaatctacaatcatcgagcacatacaaagaggaagatttcaaatccaatcatcaatcatctcttttgaatgatccgattccatctacttgctccttaaatttattgttgatccgtttgaatttggtgtttgttgaggcggagatctcgaagatg

SEQ ID NO: 12235 - DNA, 3000 bp, Unknown
  misc_feature (1)..( 3000): cDNA_ID_2708576_gDNA_ID_2214538_Annot_ID_134422 3000 nt of promoter + ATG
atgattcatttgatttgagtgtttagatcttcattatttagggtttaatagaaattgttgaaattagggtttcgtgaattgtggttttatgattgataattagggcttttatatgtaaacgaaattagggttttgtgttcacataatcagtcgttattacttttgatttttgccttttagattgatatgaatttgatttggtttgtgtatgaattgaaacataaacactcgtctattgcaatacgtggatttaattatttcagttgtgttcttgaatgaaatgagtttggttttatgaaatgagtttggactttagttattacgactaatgagtttggtctttaagaaatgagtttgtactttagttattactttgtgtttctgcttatgagtttgctctttatgaaatcagtttggactttagttattactttgtgtttcggataatgagtttggactttatcaaatgagtttggactttagttattactttcttttccggctaatagtttggactttagttattgctttgtgtttcggctaataagtttggtctttatgataggttgtattatatactttaagtgttttagttttgatcatgaatgaaatgagttttgagtttgtgtgttatataatttaagtgtttcagttgtgttctatgctttaagttctctaacttgtggttggtcttatcaaatgagttttgagttgcaggatcctgaagatttgagtggtgccgacatcacttgtacaagaagacaccacaagcaacaatttgtattgtgcgacagatgcggttgacaaatacctccggattggtgaaaacactttgatgtcttgtatgatacattcggttgaagcaatcatatatttgttcgggaaagagtatctaagaagacctacgcgacaagatcttaaacgactactgcgtattggagagctccgtggatttctcgggatgacaggaagcatcgattgtatgcattgggagtgaaagaattgcccgaccgcttggaaagaacaatatacacgtggatctggaaaaccaacaatcgaactacaggctgttgcttcccaaaatctttggatatggcacatatgttttggacctctaggtaccttaaatgatatcaatatacttaatctctcactagtttttgatgatataatataaggccgagctccaaaagtgaaatacgtcatcaacggaaacgactaaatcatttggcttactagctcacatatggtatttatcctaaatgacctacattatccaatctatttcacttcctcaaggtgacaaagattctttatttgctacaaatcaagaagtttgtcgtaaagatgtagagcgtgcttttggagttttgcaagctcggtttgccattgtcacaaatccaactcttatttgagataaagaaaaggtaggaatgatcatgcgagcatgtataatactttacaatatgatagttgaggatgaacgagatgagtatacttattttgatgcatccgaattcacacaaccggaatcaaccgcttcttcacaagtggatttcaactattttacagatatggcttcaaatctcggtaatattatggcgtctggagcctggttcgtgctcggactatgcatcaacaattgaaaaataatttaattgagcatttatggcacaaatttggcgggaatcaagctaaccactaatcgttattttggttttcaatatttatatcatgtatgtttaatatttaagtatttacattaataattaaattttatgaaataaaatatttgtaatttttaatttaataataatattttattttttaagaaacccgcttaaagacctaccattggacaaacaaaaaattaaagaaccaaaaaaatctcttaaacttttaaatttcaaaattatgattaaaaaaatatgaagagcccctaatggtctcttaccattggtgttgctctgagattgcatgtttatgtatctatgtttaggatatgcaaagttgattatgaacttgcttttgggataattgtcttctttttttatgcattaacaattttaaaatttttaggataacaactctattcaaagtcttttaacaaaaatactccattcaagctcaattgttactaaaatccaaaactttcgccaaaacttattttctcaattggttataattttcattgggtaggtttcaaaacaacatgttttgaaactatatttttttttacttttttttaaaattagatatctatattctaatctttaatctcctttgacaacattctaattataaattcacagaaaaattaactaatgctaaaattttcaataacatattttattattaataattaaattaattgttttgtcacatggaaagaggcaaaaagaaaagtatatatcatcacaataagatcttcatttcgatcctcacatgcattccatgaatgtgtattacatcaatttacaccttttttaaaaaacattatttcagaacagtattaaaacaaatttcgtggataattctaaagtattacatactctagaattaaatatatttccgtatttaaaaaactaagaatatatttttagaacaaaaacttaaaaataacaaagtaaatcgatagattgataaatatatcttctctttgctctttttcaatctgtaaccaaaatattaaaattcctcatgtatttatttctgatatcaactaattgttaaaaaatttttttactggttttaaatttaacccgtgcaacacgtggcttgatagcgttatataaaatattttgtttgacttgaatgggtcatctatagtcttcccagtcacacccaaaccgctcaacaagaaaaaccagatttattttctctggaaaacactcttcaagtcttttaccttccgagaatatatttcaaattctatcatatcatctttgatcattttccttgtccttcgaatttgttctttgttgtggcggagtcttgaag

SEQ ID NO: 12236 - DNA, 3000 bp, Unknown
  misc_feature (1)..( 3000): cDNA_ID_2708572_gDNA_ID_2214538_Annot_ID_134423 3000 nt of promoter + ATG
taatagtttagatacttatagaccgacattctgatcttcttctagcagctctcatataacccattgtcagtacattgtaaagaaaattttcggtttaccctcttagatttttgagagcgcacatcttcctggtgaaattcaagatataattgttatttcatgctcactaaaactttgaacacttatatgccatcatttcccattagagattgataattttatgttgtctctttgctgtgctttcgtttgatgtcaaaattccatactgaactggtgtttgcattgcagcaagcgggccagggagatgcacaatcaacaatggaggttgttggcatgaagagcgagatggacatgcgttctctgcttgtgtggttagtggtgtcttctgcgcttaagtgtataatctcacagtttagtaagatacttctgtctcaacttgtaatgccttcaggacaaggacagtgttaagtgcgagtgtcctccaggatttaaaggagatggtactaagaagtgtgaaggttagaccctctgaaaaaacttgaattacagtactactttgttctagttctaatcatcttataaggattttcgtgcttcctgcaccagacattaatgagtgcaaagagaagaaagcatgccagtgcccagagtgtagctgcaagaacacatggggaagctatgagtgctcttgtagcggggaccttctctacatcagagatcatgacacttgcatcagtgagtatttttttttgaatatggaagtctaaagtttgattattcaaatagtgtttctcccacctgttttccaattgttattggttctatttgtcgaaatctaggcaagacgggtgcacaagtgagatcagcatgggcggccgtttggcttataatgttatcattgggacttgcagctgctggtgcatacctcgtttacaaatataggctaagggtaagcttttttaatctcttctgctcttttgttttctgttgtgttaatagcgaagattaatcttgtatttgccatatccgttacttggggaaaattgttttaacattcctatgcccctggttttacagcaatacatggactcagagatcagagccataatggcacagtacatgccattggacagccaacccgagatcccgaaccacgtgaatgatgaacgcgcctgagaaagcaaaacagtccatctatttattccccgggaaggacccaaggtgacacgttcttttaactgatgtggcccttaacgacgatgttttctcgcctctgtatctttgtaactcttttttttttttttaccattacagtgtatttgcatacaaaagaggttcgagtgactttgtgcttttttttctcacttgtgtccatgggacttctgtaataggaaaactctgatgtaagtagcttcggctaacaagacaagagagagttacttgttttagagttcatgttgttaattgtttcctttttttttttttgtcgactaattgtttccttttatcttggaaaagtgtgattctcatttcatttatccctaaacaaaagaaggtccgattctttgtgtaagtcatcttctttttagttattaaagtaagaattatatttttgacttttgaaaatgtacttatacgttttatattcctaactttacaagtttaaattaatataataaattatgcaaaaacaaatttcaaaaaacaatatattggataaatatattgcatatatatttagttaatatttattgaataatttggtattaatataataaattatgcaatactatgtaactaaatatatattgattaaattttttacaaagatttttgttttaatatttataaattctagtttcatagatcgcgcatttcgcttatatcacagtttttttattaataggctatgttttttaaagtactttaatgttgtaatcttagtcactatttatttataagcataaaactataatttctatgtttttgtcgcctttaaaaaatcaatattaatactaaaatttaaactacatttaagtttgaatctctaaagcttgtgttaatggatagcttggaaagcttatctttccggagaacattattattgtacaatctattagctcttgattcttgaatttagttagtgcatctcctgattatgttccactttcattttcttctaattttaggaatctggatgcaaatccaggttaagtacatttagcttaatagaaagatgatttgactcggactgatgaaaatggtgccaagaccaaaactctaccactcggacgagtcaggtcaaaaacaactcaaattgactattgaaccatttttctaatctagaccagacaccaaaactctaccacagctctccgacattggtgggcctaataaattcccacaaatatttttttctgttttctttttctataaacggttggaattacatcttttgaacccatatttttttttgtactaaaatgattaaactcgagccaaaaaaatatcaatttattaggcaatcactacttgtataatgcaatttatggcgtgattagttccacaactgcatatagactatcgaatacttacacttttatgtttttaggaatgtgagtttggagtttgttaccgaaaaaccaatcaagttcaagcttaaagccttaaaccaatcaaaccatatcactttctatttttaggaatgtggatgcaaatcaacattaaatacatttagtttctaaaaccaatgttaccggttttgataattcccacaaataataagatgttcataaaaacgtggccaacaaccatttatgttcaccaacctaatcgcccctctctcaaaaaaaaaaaaatccaattttccaattttatttaacggtcacattttcctcattgcctaattaaaaacattcagacacaaatttagtttcttcttcttttggttctgtctgaatccaattttcttatattttatttcctccaccaccgtgagat

SEQ ID NO: 12237 - DNA, 3000 bp, Unknown
  misc_feature (1)..( 3000): cDNA_ID_3024323_gDNA_ID_2214538_Annot_ID_185160 3000 nt of promoter + ATG
ctctacttatgttcattttaggagacaatcaataatttcgttattatcaccatcaatctgtaaccagaaaataaaattaaaaataaaacctccaaaaactagtttggtttttcaatttttaaggactctacgttgacaaaaaaaaattgattgaacaaatatgagttaaaaaaaaaaaaaaccacaaattagttttacaaactcagaataatcatgacctaaactatgttagtcttttctcaatgaagagaaagaaaagattacaaataaaactaaaataaaaaaaaactactataatttcaaattaatgatatagtatatcatatttcaatcatctatctttttggtaatcaaatatttacattatcgtataaaagaaaaaaaaatcaaatacttatgttttttaattatcttcattgcttctttctcttctttattttagatctgattcgtataagacatattgattgagtagaaatctgtaaaaatatgttgtggtttatatgttatgaagtatattaactgcttttacaatggctacgtatcatctataacatatgtgttttaatgtttgtatgtagtaaattatgctttctatttgtactgctcttggttgtgatgtaattatcttgtatttaaagaaaactattgtgttttattcttatgcttgaaaaatgattggccactttggagatgttcagcccgttaacatacagctcagcccagtagtaaatcaatcaacccgcttgacccatcaaagagctcatatccatgaaaacccacctcgaagtcatcctttggatcttaccagcggatccacttgaagccgaagtcacattttctttcatttgtacaaatatcaacactaaatatgtgaaggtggagatcatctaaactatcaacaacctctttccaggcctaacccatgaaaaatttctatgaaacatagttattgggcctcattttgtggaggaataaacaaaggtattgggcctcttggtccataaagctttggtgcacctttccacgctttattttacaaataccaaacttgccgtaattggatccaagtagctttacatcacaacacttttttcttgtcattgttgctacgttttgaagatcctcttatcagtgactagccaaaaagtctacttagtgatacgatggtacattaagcggtctacaatttaatcagatactttgtagtgaagacttttctaatacatgaatagattgatgctgattgagcttattgaaagagatatataaagattgaaatgcaatagctctaatgagctttaatgaaatgtaaaggagagaaaggaagctttagattgtcttgaagatcaaaatagatttagatttgatttcatacaatgaagaaaagaagagttgctcaatggcaactctctaggctacattcatcaatgtcatacaccacatatatatatgagaaactctaactacaaaacctaatgacatgagcttagatgggcttctctactctttatattttgggctttatgtggcctcttatgtagaagggttatgaagagaagaattattttgatggtggggaagtaagagctctccatctgcatcggcatgtgtggaccatgagggatccaagtaaaggtaaaaaatatttcccgctaaacatgagactggcattctctaagaggttgttgtaaccagttagggacttagggcgttacaaatatgaaagatttggtctctcatttaaacccatatgcgggttcattaagataaacgcttcccacagtggatcttgtggtgattccttctttttgcttgtcgaaattggagtttttttttttttgtgttggattgtggattatttgaatggaagatctttgacccaccaaaccgacctttcgcttcgtatggtggatcagtggatgtctttatagaatacgtgtcttgcgtttgttttcgagtcgggtcaatctgttggtttaatttttctacgtcttggaaactatctccggggtgattgagcatgcatggtacaactaactaaagcagccttttgtctacgtctatgtgttgtgtttttataggcaataatagcaaattcacttacaacaaagagagacaaaaaaactttcaactaatatataagggatttttacgttttaacataatatggtttggataactcatttgtattttcttttgatctatactattatttgggaagcattttgtgaactacaatattgtgagggtagtttaatactagggtaaattacaggccacacccgttgaccatgttttattttcatggattgtcaaagtcaaatgtggttttcaccatttgccttttcgcctgcaaaatgacgcttctgcccttgcgcttctctcttagtaactgttgaaatgtacggtttagtttagcaggtttagttacgtacactgttccggttcagttgaagattttttgtttcacgttgacgcgattcggttccgttacaagtgagattattttcattattccgaagtgacatcaacatttaatgcccccaaaaagtttagatgtgactattgtcacaattaatgcaaaatcatcattacatcaaataatataaaaaaaattattgataataattaataaaaaatttgttgagataaagaagatgaacccatgaacaaagaattattgagaacgtacattgctgctgaagaagtgttgatcttgtttttgtaccaagtttggagcattgctcgtgtaagtaatgaagttcttttaagaagttttttgttatgtcatattaggatcttgattgtgttcgaactccatttttttatcagaatatttgcaaaatctatatttgtttgtttaaaatagtcaaatgataattggtatttaggtttataaatgtgtagtatcgacattccattcgttttttatatgtatagtatttttcagttgcatttaatgtgtgtctcctgaatttatgatgcaggtgggttatg

SEQ ID NO: 12238 - DNA, 3000 bp, Unknown
  misc_feature (1)..( 3000): cDNA_ID_3024331_gDNA_ID_2214538_Annot_ID_185157 3000 nt of promoter + ATG
atatatttatataaatatatccatattaattcctattttatttgtaatcatattttgtcgtgcgtgcaaggatcgtctctagtacaagaattatctcgaaaagtttgcaatcaggagtataaagacaatatcatatttggcaaccccaattctcctcttatgatcaacaaaaaagtttctctaaagatgtctaaatttaaacaattactatgctttaaggaaaataggaagagactaatattaactttccgtggcaaagtagaaaaatatataatagagaacctaaaggaaatttttgaagaagtcacatgtaatacaaatataacaatttggctctactgtatgatggaaagagatggttgacatataattttttattttattttattaacaattattgaaaggtgaatgttttaaaggctcaaaattttaaacttgaattttgttttaatagcaaaaaaaaaatatgaaaactgaatcattttattctgtataaaaaaatattattcttttttacatagattactagattctgacccgcacgttcgtgcgagatttcatattttaagaaatgtgttgtataaaatttatattcaatatagttttttttgtttttgtcatatatattgtagtatatatattataatatatatatatatataaacaaaattatcgattgttatttatgtttgtttatgacataatagctaatattgtgaactataagtcaaattctggagtttaaactgaaaagtagattagaaatatcttagatggaaaattatgctaggttataatgatgtcaagtatttttatataaaaaattatggttagagaattgcaatagaaatttgtgttatcgatggtgaaacacaagttaattttgataatgttgatttttcaaaattttaatggtatgtgtgaactaagaatttgtgttagcatgttaaaatatttaaataccgatgcattttttgtatatgtgttttgggctatatttaattggctgcttgtaaatccgtgttttgccaaagtaacttaaacaaataatggcaaagagaaaactctaatatcagtaaacatattatctatagttggtccatgtagaatttgtaaattgttttgtaagtatggattcgagtgcaaagctgagctaagtcctgttttctatcattgtatgttgaatttgttttatgcatatgtatagttagaattctctgatttaaatgattcttgttatgtcaattaacaaatccgcataatatgcttcattttgaaggatagcaatctttaaattttaattaaaatagaaatatttgaattaatgctagaattattttctagatatttaaaaatctaaaatccaaaaagtatttgttgaatatgctatattttaaatttaaatgatggtagtttagattatatatgataaatataataaatgttttttcatatttggaaaatcaagaaatcgttttttcaatgtgtaccaatcaaaattaatcagtttagttttattatggaaatttttaaaaatctaaactaaatgttatttgttattaaattgtattgttgttttcaaaaatatctaataaattattaccaaaataaataagtttacgtatatacgatttcgaattaagtagtttgatttgttatggaaactttattaaacgatttacaaaaagtattgggtagttttttttttttgtcgatattgggtagttattcatttattgatttaatttcggatttgttttttttttttttaattccaagatccgcttgtttatccgaatcactacatttggtattttattcccatatatttatagaaatgtattggaataaattcatattttttcctttaaatataattttggatttgtgttttttttactaataatttaacgtttatataatatattaaaggaaaaaacaaataagatcgtgtatctctaaacatattacgatttgatcaaaaacaaaatattggatagaatgtatgtcttttggttatgtacttaatttgatatagttggtaaataagaaaatatcagaatattctaatatatttataacattaatattattgttaaaatatatttaacattattctaatatatttatagattttattgttaaaatatttggtatttttcaattaatggtatttgatttatgttgaatttttttgtttaatctctaacaaattgaaaaatacaaaatatttcgatttatattcaaaataaatatattgatcctgaatattcagttatcatttaatatttaatgttatttcctttttttatttttgtagacaaatcataccaaaaatattgacgaaacaaatctgagaatatattagattatttaatctcgttatttgttttttcaaaaaaaaataaaagaaggatccgaatcaaagatattcatttaattgatatatttgttaatttattaaattatccatgcaaaaaatcatttagttagtattaaaagaaattttcacaaaagtggacgaaaaaagatttgtactcaccgtttgtcaaagtgagaactggtttttacgttttgtcttttcattcaatttcggacaaaattaccctggaaaaacttaataatggcacaaaccaaaccgtgcagcagttcgtatcggttaagttgacggcgtaaaccaaaccctacagcagtttgtttcggtttagttgatgcggttcagttttgaaaaagacaaaaaaaaaaaactgaaacgaagaaaccgagaaaacgaaaaagagaataacggagagatttgagagagaatcaaaaagcgaaacgaaattcagtatccattgcttcaaaattcgacataacttcgaattgttgggtagttgaattgagccactgaactcccacatccggtgaagtgaaagttactgtttttcccggcgaagccaagagaaagttactgttttttccggcgaaatttgaacctccggcgagatagcatctttagct

SEQ ID NO: 12239 - DNA, 3000 bp, Unknown; identical to SEQ ID NO: 12236
  misc_feature (1)..( 3000): cDNA_ID_2708572_gDNA_ID_2214538_Annot_ID_185154 3000 nt of promoter + ATG

SEQ ID NO: 12240 - DNA, 3000 bp, Unknown; identical to SEQ ID NO: 12235
  misc_feature (1)..( 3000): cDNA_ID_3024339_gDNA_ID_2214538_Annot_ID_185153 3000 nt of promoter + ATG

SEQ ID NO: 12241 - DNA, 3000 bp, Unknown; identical to SEQ ID NO: 12234
  misc_feature (1)..( 3000): cDNA_ID_3024343_gDNA_ID_2214538_Annot_ID_185151 3000 nt of promoter + ATG

SEQ ID NO: 12242 - DNA, 3000 bp, Unknown; identical to SEQ ID NO: 12238
  misc_feature (1)..( 3000): cDNA_ID_2711660_gDNA_ID_2214538_Annot_ID_134425 3000 nt of promoter + ATG

SEQ ID NO: 12243 - DNA, 3000 bp, Unknown; identical to SEQ ID NO: 12237
  misc_feature (1)..( 3000): cDNA_ID_2711656_gDNA_ID_2214538_Annot_ID_134427 3000 nt of promoter + ATG

SEQ ID NO: 12244 - DNA, 2046 bp, Unknown
  misc_feature (1)..( 2046): cDNA_ID_2708993_gDNA_ID_2214539_Annot_ID_134432 3000 nt of promoter + ATG
aagcttccagaggtattagtgctatatattcatagtgccaccgagtattttgaactccgaaatgatttctcactatccgaccactcccaattatataacatgcttagaattattcgtaagatggatcgtagttgcattttacgacaccatacaggacaagtccatgatagtttgagttggtggattttggaacccctgcaaatttattttatacataacaaaggccccaatccattccttagcatcacaacttgggacttctatcttttgaaggatacattcacttgttggttttggtaaatatgattgtttctttacttccgaataagcaatatataaaagtatctaaaaacggaagtaacttttgatgatcctaaaggttttgtaattgatacatgtccaaaaacctcttaatattctttctcacaaactgttgatggagttaacaaagggagacaaggtaattgggacaatatcaacgttagatacaggacaagtgaaaaatgtggggttgatgtcttcagctgcagcatatcaccgttggtatatattgtcaattattagtcctatggatttgaaacgtgttttagtaaataagagtgtccaagtgggacatttccaataacgtatcacagctcctagagcttttgctatgtttctctaggcctgggccgcctagcccacattccaagcaaggaaatgaatggagttgggcatcaaaattttggaagcatttttaagacaaattatcttttaagtttccttttttaaacataaactatattttaggcttttttaagataaatattatttggattttctttcactcatatttttggatttcaacttaacaaaacatagggcgtgtctatttgactccacctacccaccctactggagttcgatcccactaaatcgcgttatcccgcatagtagggattgactatggatcggactttgtcgatccaaagatatctaagaaattcagaaaagattgtataaaattcagaaacgattttacgaaattcatgaaaaatgagaaatacatgttttttttaatttacgtcggcattaaaaacgttggaccggctctgtgtttcaccaaagaaattgtttcagtttatgcatgatcttcaacttccatattcttgttttcaattctggaaatccctaacagatcggagctctcctcattcagtgagttggaagattgcatgattatataattactcttcacatccacatatattacattatattcccctataatttcatacaaccctagaaaagaatcttcaagtaatctaatcgtgtcgatgactccactcatttgctagaaaagaaaaaacaaacagacttcatttagctgaaaacaatcttttattcaacattacaaagcactgatcaaagaacctctaacatggtaatatatctatgacattttacgtatcctaaaagaaaacaaaaagtgatgtattggatgatgttttttttttttactttctagtttcttattacaacgacaaaaagagtccacgtcgtcacgcacttttccggtggtgaaaaaaatgtccaaatggattaaatctataatatctccagagagatcctctccttctatctttttgggctccacttttcctatctctttttgcccctttcctctctctgttcacaagtcatcttcttccttcctctgaatcttgttcctttttgctctctctacttgattcacccactctgtttctcgattagtacgttgaaaactcactttggttttgtttgattcctctttagtctgtttttcgatttcgttttctctgattggtttggtggtgagatctctatcgtagtttgtcctttgggttaagatatttcatttgattggtgggtttgttttattgaagcttattgttgtgaaagttggagtctttctcagtttttaggttgaattattaagagaaagggaagatttttggtgtgaagttaggttatttggggtttgagaagtttgcaagtgaaaaaggttgtgaattgtgagtgatg

SEQ ID NO: 12245 - DNA, 3000 bp, Unknown
  misc_feature (1)..( 3000): cDNA_ID_2708997_gDNA_ID_2214539_Annot_ID_134433 3000 nt of promoter + ATG
cttctgaaaaccccaaaattaagaactcataaggactagattatcacatttctgaatcaacgtatatcaattagaatctaaattgtttggattcactaaactagtaacatattagacgtggtgattgaagatttagacattatttgagcaaaacaaacgaaataggtaagtgattatagaaaagagagagagagagaccttggagagatcaatgtgtttgtagagagaccaatcggaagaacactcatgatcttcgcagttgtgatcatgcgtacacgacatttttcccaattctcgtcggctaaacacaaaatctggatttttcgccaagaaatttcgagaaacttaaaagcgagcagtggaagaagaaggtgggcatcaaactatcacaaggccgacaaaaagatattccaactacacgacgacgtattagtttttggaaacgcagcgttttttgtgttggtgtttctgataagcaatcataaaaatcaatcccacgcagcgttttgttcataattaatcttcttctttttttctctcaatgaaatgttgattctgattagtacattattaacttagaaaaatcattctacacatatcctaaatttaacatgcatcgttataacatctttacaactgttgatcaagttcttctcataatcttcaaatcaaacccacattcgaaaatatgaatatttgctagcttttccaaacaaaaagtatgttgaatttcacatttttgggttagttcgacatattttagaatatactataacataatctatgttatcttctatcatgcattgaacgatctctactctttttcttttttttcttttttagcacaaacaaactgaattttattaagattaaaagtcaaacataagtttcttctccttatccaccaatggtagtaaccatagacggttacaagcggaaactatcaaagcaataagattcacacatattttcaaggctggccatgagtacaagcgagccaaattcatatatttgcaagcgtaaatacaataattatctccaaagctttatcagcagaattagtcattcacttactcaaagtgttaaagggctgagagcgcgaacccttcttccttcatatcacttatctttaagcttttttttgtttttgttttatagggccaaatctttttctacgtgtagcctaatcggtcgatatgcatattccctaacttcccattaaactaaaggccaactatctcacttgtgtagcctaccctcggccaaagtgtagaatctttcaccgtctggataagtgttttagaatcactatagaaaatgacttccccaaaatttgaattcccaaatcccaacacaagacataactcaaaaagtttatttttagttctttatattcaaatttaccacaatacaaaaatcatttctacaagactcattccggcaaaagaaaatatttcaaaacaaatttaactttcaaatgattaatgtacatggcaagttacattaccaatctctattgtggaaatcaaaattaatttggaattgataagtttcgaaactaactcatttttcagctaataaacaaagatacacgtaactataacgatttagggaaaatgatcattgagtgaacgaatttagtctgattgctttacagtgacatttacgttacactacactaaaaggcaaaacatatgcatgattaatgcccaaaagcccaaactagtgtcctttttctttaactttttccacaatgaaacgaaacaacattcattttccttcttttaaagaggaatgatcttatgtttccccagccgtgaattgcctagcaatcaatcatatttcaaagtttaaagattaagtgaatttgccaaatgccaaggacgaaaatttatttaggtaaatgacaagtgttttaggtttttattagaaacaaacaaaaatatattgttcaaaattaagatagtaatatcacacgttattttatcaaaaatatttttgtaaaattttaaaataattgcattcaattcaagcacaaaacactttgttcatattcgaaattatttaatcaattttcaccgtattttcgctttgaaagtcagaaaatcttcgtaaccttcctctctcattcttttatgttcttgacacgagtttgtctttttccaaagttttttcattgaaatatatattttttttaaaaatcagaaaagaatcatggaagtaaacttgtagagccatcatacgactaaattgagattttctgaaatgagatataaaagatcactgtctagctgcacttgaaagagatagagataatagaaatgtttgtcttgcttggactattgtagaaatagatttggagttttcatttggaaaaaatattgatttcctctcgataatcctcaaaacaaactcgtattggacatactaacagatgataaccaatgttatatgttttcttaatgactaacaacgatatgtctattttagcttagtcaacggattctcgtgtttcaaatggtagtcaacgttttcatgttttgaataaccttgatgttcaaaatggtcacaatttgaaagttgactagcagaatcgtaaatgagtgttagagattgcattaacaactgataacatcatgtctattttgatctggtcaacgaatttttatattttaaaaattactcaatgttaattcacgatttaaaagaccacatataaaattaatgaataaattacaactttttaaaaattaggaaaattaaatgacaaagccaatacttttggcttttaactaaaacagaatatctataattaaaaaaaaaaaaatgtacattttactagcgtgtatagataaaacaagtaatggccaagcgttacgttggcataagaatgattcattgaatattaaaatttataaatagcagaccccgcctcgtcttctctccgaagattcttatccacgtcacaccttcttcgcctgagaataccacctaacaatg

SEQ ID NO: 12246 - DNA, 3000 bp, Unknown
  misc_feature (1)..( 3000): cDNA_ID_2994352_gDNA_ID_2214539_Annot_ID_134435 3000 nt of promoter + ATG
tatatgggaagaatcataaaccattcgttaacccttcaattttttaaaatatataaattgaaggatccctttatttgttttttgcagtttgtagtggactatccatatgaatatattacatcaatagaagtgacctgtgacaaagtctctggcaatacaaaccgagttaggtcgttgagtttcaagacatcaaaagacagaacatctcctacatatggacgtaagagcgagcgaactttcgtgtttgagagcaaaggtagggctcttgttgggctccatggaaggtgttgttgggctattgatgctctaggtgcacattttggtgcgcctcctattcctccacctcctcccacggagaaactacaaggatcaggtggtgacggaggagaatcatgggacgatggagctttcgacggtgtgagaaagatatacgtgggacaaggtgagaatggtatcgcatctgtcaagtttgtgtatgacaagaacaaccagttggtactaggagaagagcatggaaagcatactttgcttggatacgaagaggtgattaattatactatacttcgttgctattttcttaaactataactataaagttgtgttattgttattctgatgaaccgctttcacagttcgagttggactatccgagtgaatacatcacagcggtagagggttattatgataaagtgtttggtagtgaatcttcagtaatagtcatgcttaagttcaagaccaataaacgaacctccccgccttatggaatggatgctggcgttagcttcatactcgggaaggaaggtcacaaagtggtagggttccatggaaaagctagtcccgagctctatcagattggggtcactgttgccccaatcaccaagtgacgacgtccttgaactttattctcaaatcaagtttgatcatgcatatttgttaaggcgcctctctcgtattgtctccaccacttttctacgtgttttgttttctccgatgttttactttgaaaaatctatttcaatcaagcaatatcgtgtaataaaagcaaggttctcgaacctgcgggtaaactttttattttgaataatttattttcaatcaagcattcttttgactttttgctttaaccaaatgtctctagtttcaaaaaagattaagaactcaaagatataagaattactttcttattaagcttactttcttattaagcttaggaaaattactcaaaacgtaaacaatctcaaagtcttaatttctctaaactcatatagtcaaccacagcttgggactcatatatatagagattaataaaccaaaacatactaggattagcattagataactcctaacatatatctttagatatctcctaaagatttaacataatccttcttattctttaatgacttattgctcaagtcatttcaaacttactccaacattctcccctttaagcttgaaaacttcttttgacacctcttgtactccaatgagatctctcatctccaagaacttgatcttcccaagcgcctttgttagtatgtaagccttttgtcgaactccgagaacatgttctacttcaacttgaccattctcaacacactcccgtatgaaatgatatcttcgatggatgtgtttgcttctcccgtgaaacaccgggttctttgtgagagctatagcagatttgttatcaactcgaatctttactctctcacacattgtacctatgacttcagcaagaagtattaatatgattaagaacacttaggatttaagaataactctcttactaagcttaggaaacttactcaaaacctaaacaatctctaagtcttaatctctttaaaactcatatggtccaccacaacctgggactaatatatatagagattaataaaccaaaatatactaggattagcattagataactcctaacatatatctttagatatttcctatagatttaacataatccttcttattctttaatgacttattgctcaagtcatttcaaacttattccaacaacgtcaagtttctatgtttgatgtatctttcgctttgttacaaggaatacaaaacaaatgttttgaatatgtttaatccctacagcacggggtgatgttttttcgaagtaacattagttaataaataaaaactacggttgaagtatcatattcggtaatataatttgtatgtatctttattttaaaattttaaatgtggttggctaatattgatgtatgatattacatgttgttaacatcactgtagatctctttgattagcgtaggctaatcgtgattttggctgactggggttgtcggagcccctgttagtttcgtgatttggtttccattggtctggattaattttgactggttttggaaaaggtgcgttggtcatcggtcgatacaaccaataatctgaaataattgtaaaaaagaaagtctattgtgaaagtaaggaaacaaaaatcaccaaaagccaggagaacttgagaaaaaaaaaagaacatatttaaaatttgatggagaagatcaagagaatccgatgagaaaaaaaaaagaacatacttaaaacttgatggagaagatcaagagaatccgacctgaaacacagtaaaaagagaagaattcaacaacatcatgataaacttttcaatccacaaccaagccaaaatcaccatcatcattattattcaaaaatgaatataaaactaaattaaatcacaaccacgtagtaattaagcgatttttttcttaaaaaaaaacataattatgtagagagagaaaaaagttacatagttaacaaaagtaaaaatggaaaagcggtaaaaataaaaagtaaaaagggaaaaatatctgaatatatatataacagcaaggtttttgtccgcatatataaataatcgcgtgtgtgttcacctctcagttgttttccttcttcttccttatctccgcctctttctagggtttctctcaaatcagctcttcaaccatg

SEQ ID NO: 12247 - DNA, 3000 bp, Unknown
  misc_feature (1)..( 3000): cDNA_ID_2711703_gDNA_ID_2214539_Annot_ID_134436 3000 nt of promoter + ATG
tataattccagtgaaaaaaagaaatcgatgcaatcaagcggaagaatgaatcatagaggagaggaatattacagggagattcgaggaggaggaagaagaagatgacgaaacagcattgtcggaaattagatgcatgacaccgcgagtctcgccgattctagggtttccagaggaaaaatgaactgtctgaatcatatcggagagagaggattcaccggaaacgcttgccgagttcatgactgttcacttacttgcttcgacgagccttttttctccagaaaacaaaagatgtgatccactgcacatgaaataataagacgaatcagttaatgaggatggaaagtaatacagcagagaatttagtacataatgaagaacatctataaaaaacaatgttccctctaacaaagaaacaatgctcaagcagcaaaatttgaattcaaccaaacagatcatcaaacctacgcatacccaaaacccttatttgattttcaattcatataaaacacaacgaacctgtttctatcaagatatcaccttatttcgtattttaattcatataaaatacaacaaacctatttctagcaagagacagacaataagtatctcgagtttatttagaagcaaattaaactaaagcaaccaaagcttgaattctgagcttaataatgctgctaaacgaagcaaagcttttttgaacagagataattcgacaaacaaagtatcaagacacaagtaataaacaaattcatctaagattcacaagaaaacagaaacttgatctctaatatctcatcacaagtgagagctttcataaccaacacagacacggaatcaacaagtagtacagagagtatctaaaatccagtatcaataattattagcttgtatctgtaatgctcccgattagattgtatctcttgaattaacgtttataaacattagagaacacacacttagctccatacataaacaccaagcagcatatatccaaaaataaacagacacaagtaattacaagctctaccaaaaacaaactctacatattctgtgaggcatttcatcaaacacatggttggcatcaaaggaagggagagagaaaatagcaaacaagtgaaatttggacaaacccacaagctgaaatcaaaggaagcatatgcagaatcacaattaaaagaatagcaaagaacaaagcgatgaagttgcatcaacactgagagaacaaaatcgacgagactatcacatgaacgaaaatttcagagagaacttattctaatcaacggattcctattctaatagaacttaccagaagtaggagtcgagagagagcttcgtcgccgagagagaacaaaatcgacgtgtgagagagaagagaagaaaaccgatgtgtaattgtttagttgaagatgttgagttggtaaaaaaacccagcccagcccgaatctgaattgagcccgcccaccagaagcccaaattaaaaaaaaaactgatgtgtatcggatttaatagtaggtagacctgaaaaaaaaaaacgatagatactgggcctgtggataccggaacttttatacttgagtttttttttgtttttttttggggtatttatatgtattgattttcatacatgttcatctaaaattttctatatattcatctaaactctgttaatttttttaaaacttatataaaataatatatatatatatatatatatatgacggaaaaatataatcacaaaacaatgttcataaattacaaacttcctaaattacaaacattaactataacaagataatttgtaaccaaataaatagcacaattgcaccatttttctgaagaaacttggtccaacggaaatacgaaataatcaatcatccaaagttccaaactaaaagtaagcttgcattctagttatattttttagccataggagtatcagaaagaaggaacaactcgatatcatgtgttgtacattagcatcgtgttgaacccttggtcctcggtttcaatttctctctttgcgaaccggccattaacttgcggtctcatctctgctaaacgtttagcttttattgtcactgctaaacgtttgttttggattattgtttgtatagttgttctatactcgtgtctatcataaacattaaaatcaagactaataccaaaacacaaatcaatatactaatttggaaaaaaaaatcagttaagatcgtcaacgaacgactctcgatgagaaaaatttatgagaggtgtgttgagagacgtgccttcttaattaagtgattcgtccgagatgagatctctacaagatctgaagaacctctcattgactttcatatcttctacaatttatatacatgttttggactaaaaaagctatctatatatatatagcctatataggtgaagtttgtatagtaatggcgagaacatggttcagtattagccattattagtaaactgacactaataatgttaaaatatcgtcctatactcgtgtctaactgcatgtctatcatgtacattaagatcaagactaatataaaactcacaaatcaatatactacttaagaaaaagaaaaaaatctggttcttttttattcatgcacacacatagtataagttaaaaaatgaccatattaatttgtaaactgaccaatcgtgtatataaaaggacaccttctctacctacttatatattatacatcatttctctacattgttcaccagctctctccatctctctactccaagcataagaggtaatctctcaatagtttgaaacaaccttttgtaaaacgtattgtaacttacttaaaattgtagaacgtgagaaatatcttaaatgtttaaagtcttcctttttcacccaagaactgaaaatgattttgcatatatattttctcaagtgggtataatggatataaagaaattatacaatgactaaggaacaaaataaaatctcttttattgaataatgatttgaatcagttctcgatg

SEQ ID NO: 12248 - DNA, 3000 bp, Unknown
  misc_feature (1)..( 3000): cDNA_ID_2711699_gDNA_ID_2214539_Annot_ID_134438 3000 nt of promoter + ATG
aaaaaaaaagagttcaggtagttctatatttaacatgcttaccgtttgtgtgaaacctttacccgagacaccatgaattggtccaacaactgtttgtccagctttgacatactcaaacttgatgaattggattccttcaagaccacctcgtacatgtatctttgttacattttcatggtcggctccatcatcccattgattccctccctttccgccttttgcctccaacctttgggccatcgagaactgattcaaatcattattcaataaaagagattttattttgttccttagtcattgtataatttctttatatccattatacccacttgagaaaatatatatgcaaaatcattttcagttcttgggtgaaaaaggaagactttaaacatttaagatatttctcacgttctacaattttaagtaagttacaatacgttttacaaaaggttgtttcaaactattgagagattacctcttatgcttggagtagagagatggagagagctggtgaacaatgtagagaaatgatgtataatatataagtaggtagagaaggtgtccttttatatacacgattggtcagtttacaaattaatatggtcattttttaacttatactatgtgtgtgcatgaataaaaaagaaccagatttttttctttttcttaagtagtatattgatttgtgagttttatattagtcttgatcttaatgtacatgatagacatgcagttagacacgagtataggacgatattttaacattattagtgtcagtttactaataatggctaatactgaaccatgttctcgccattactatacaaacttcacctatataggctatatatatatagatagcttttttagtccaaaacatgtatataaattgtagaagatatgaaagtcaatgagaggttcttcagatcttgtagagatctcatctcggacgaatcacttaattaagaaggcacgtctctcaacacacctctcataaatttttctcatcgagagtcgttcgttgacgatcttaactgatttttttttccaaattagtatattgatttgtgttttggtattagtcttgattttaatgtttatgatagacacgagtatagaacaactatacaaacaataatccaaaacaaacgtttagcagtgacaataaaagctaaacgtttagcagagatgagaccgcaagttaatggccggttcgcaaagagagaaattgaaaccgaggaccaagggttcaacacgatgctaatgtacaacacatgatatcgagttgttccttctttctgatactcctatggctaaaaaatataactagaatgcaagcttacttttagtttggaactttggatgattgattatttcgtatttccgttggaccaagtttcttcagaaaaatggtgcaattgtgctatttatttggttacaaattatcttgttatagttaatgtttgtaatttaggaagtttgtaatttatgaacattgttttgtgattatatttttccgtcatatatatatatatatatatatattattttatataagttttaaaaaaattaacagagtttagatgaatatatagaaaattttagatgaacatgtatgaaaatcaatacatataaataccccaaaaaaaaacaaaaaaaaactcaagtataaaagttccggtatccacaggcccagtatctatcgtttttttttttcaggtctacctactattaaatccgatacacatcagttttttttttaatttgggcttctggtgggcgggctcaattcagattcgggctgggctgggtttttttaccaactcaacatcttcaactaaacaattacacatcggttttcttctcttctctctcacacgtcgattttgttctctctcggcgacgaagctctctctcgactcctacttctggtaagttctattagaataggaatccgttgattagaataagttctctctgaaattttcgttcatgtgatagtctcgtcgattttgttctctcagtgttgatgcaacttcatcgctttgttctttgctattcttttaattgtgattctgcatatgcttcctttgatttcagcttgtgggtttgtccaaatttcacttgtttgctattttctctctcccttcctttgatgccaaccatgtgtttgatgaaatgcctcacagaatatgtagagtttgtttttggtagagcttgtaattacttgtgtctgtttatttttggatatatgctgcttggtgtttatgtatggagctaagtgtgtgttctctaatgtttataaacgttaattcaagagatacaatctaatcgggagcattacagatacaagctaataattattgatactggattttagatactctctgtactacttgttgattccgtgtctgtgttggttatgaaagctctcacttgtgatgagatattagagatcaagtttctgttttcttgtgaatcttagatgaatttgtttattacttgtgtcttgatactttgtttgtcgaattatctctgttcaaaaaagctttgcttcgtttagcagcattattaagctcagaattcaagctttggttgctttagtttaatttgcttctaaataaactcgagatacttattgtctgtctcttgctagaaataggtttgttgtattttatatgaattaaaatacgaaataaggtgatatcttgatagaaacaggttcgttgtgttttatatgaattgaaaatcaaataagggttttgggtatgcgtaggtttgatgatctgtttggttgaattcaaattttgctgcttgagcattgtttctttgttagagggaacattgttttttatagatgttcttcattatgtactaaattctctgctgtattactttccatcctcattaactgattcgtcttattatttcatgtgcagtggatcacatcttttgttttctggagaaaaaaggctcgtcgaagcaagtaagtgaacagtc

SEQ ID NO: 12249 - DNA, 3000 bp, Unknown
  misc_feature (1)..( 3000): cDNA_ID_2708596_gDNA_ID_2214539_Annot_ID_134439 3000 nt of promoter + ATG
tatcttttcctcgcccattagtattttgaaaagttgctacaaaatgtcaaagaggaaacggaacagaaaatctcagaagctgcgagcaaggcaataagccagagactgcagaagctgcaaaccaggtttgacagatgtgtcaaagagaagcaatttcttgaagatgtgagtctctatctagctttcgttttaaaagtttttcttgatggcatatttacatctacttacatttctgtagagtattattgacttgttgttttctcatgtgtagttgaacgaaaatcttgtgaaaaataaggacgtatggagcaccaagattacagaaatgaaagaaaggtattatctatctagcaaatctcgtcatgggaaattgtgcatattcgctagcttgtgagaccatgctccatttctcattgatctttgatttagggagaagaaggcagttcgggcaaaggatgaaaagattcagggcttagaagaacaggtaaagaaacatctatagacaatacaaccccctgctttgttggttatataataaaacacctactaaatcggttattcacactctcagcttggaaacctaatggcccaaatggatggtgagagtgaagtctcagagacgaaagaggtccaggacgccactgtctcgaccaccaatacctcttcttctggggcagggaatgttatacatgcaaataaaaagaagagtaacagaagaaagggttagatcaagattcaaactctaccaaatctcgcttagactagtcgactaaagttcaagcaatctaactgcttagaatgtctagatctaacaattcattcgtgttataatgtgtgctatgatgagaatctgagagaaacgtttggtagttgttgtatcaaacctgatagaactatagccgttaccctcttggtgtatataatacaattggttgatatcaatattaaaaatcgtagttacttgacggtaatgccatcactatgcataccgttggaggtttcataagactttaccccatcttatggctttatcttctaatttcctcttttcgtttataatcaaattcaattatttttcatgtcactagaccggttagttatagttttacatttgaagcactaatttcaagagtcaatgatacttatgataaacaaattctatgggtttgaaagttaatccaagttaaatgactgaaacccatattgtaccaatttggaattagaagtccattatctctttcagatggtgtctactaacacacaagatcacaagaagaaggtgcaagctataaagagagtagacaccatctgaaagaaagacataattggactctcacataaaacacttggcttgaagcgaaaaatgcttttgttttccattcgttgttctatttgtcattggtggtgctatgttatgttcgtgttgatctacgcatccgggggccacatgaccatgggcctcgtttgctaccacgttgcttcattgccacttgtaagtcgtaagtattatcatgcggtacaacccttcaactatgtcctttttttttttttttttttttttctcttctaacaacaacctttcaaatatgtcatgtagaattattgggtatccgtattatgttcatgcaatttttaataatttgtaactacgattaaaaaatatatattttatgattatgcaatcacataattatgcgctatttttttatttaaaagcaaaataaaataaaattatcctatgttacatattttcacgctttgtgttggattactctacgcattaaactcttaaactaattatttgtgcatgaacaaaaaaattgtgttcttaaactaagttaaaggaaacatatatgagagggtccttttaatacatctgtaccacctcccctggaggataaggcttgtaagtggaatgcacttcatcgtcacatagttggggcaaagatatccagggaataaacgcattgagtaagttttggtccatgtctcttcttgtgtatcaatgtccatatggctaatttccaatcagaaagttcagcactgccactaaccatggctagaagatcttcaaggttgactagcggccaggtgtaggtaatgcgcgcggtcttgggacacatcatggaactgttcagtgtgaagatccaaagatagaatcttgtaaccattaagtacttcgaaccagtagatggaaccattcacaaagaccgaatgatgtctggcttcgacatagtaaggaggcggactcggcattgtccgccattcaccaatgtttaaatcgagaagttgtgcttgatctcggtttagttggatgagccacgaatgctaggcaatgcgtagggcattgaatatcatttggagtgaaggttttgaatccctcaggcagcttgtgaaagagcttccgtttagcgaagttatataaccaagacattcatgttgcttttcctttatgggctatgtatatcacggtttttccagtttcccggtttttcaaaatcgttatcattgcatctcgacaccgataagattcatagcttaaagttttgtcgatgcactgaagtttgagttgtttttgctttcatgtttactttggacctttaaaactggttttgcaatctgtaaaatctgtaaacgtacactgattaatgatatttacattcttagaaaagaaaaatgaatcatcagcccatgtgaacatatcgaacaatgtagcactttctcaaagccaacacaaccgcccgcttagcttacattagatagatcaggcagcctttcatatgtaaagataagtggcggagaaaccagccatcaactattgattagtcaacatcttatcttctatcattagctatttacgatttaatatctacttgacatgtaaaagactaactcttcaccagttcactataaatagaggttgatattgtgcttatatcttcacactacacacaaatacatacaaacatacattaattggaaactgaaagtaatataatc

SEQ ID NO: 12250 - DNA, 3000 bp, Unknown
  misc_feature (1)..( 3000): cDNA_ID_3024373_gDNA_ID_2214539_Annot_ID_185194 3000 nt of promoter + ATG
agagcgttggatctgagtttgatttgggtcgttggatttggaagagaaagatgagctaatggcgatggtaccaatcataaggttgaggaagacgaagagaactgtcggagtgaaccaactatacatcgccgtgagtacagattccgacatatctaacatagatttttgttttggttgtgttctttgttcggagagaaaaggagaagaggaaggagatgggtgcgtttggtttttttcggaaagcaaatagaagcacatgtgggaactgggggtatttttggtatttgatgttctcacttatttttcagctttgtttttttttttttgtgaagagtgagatggtggaagacaaaggagggaagtggaacatgcttctagaatgtcacatccactacaattttgtttggtttatttcaatttttatgttcttggatttttaagaattatttgttgttttcttatggtaaaaaaatgtttcgttcgtgtaaagactaaactgagaaataaccattttgatgactagtttttaaacttgaagcttatcatttgggagttactatagagtgtctcctcggttccggcaatggtggagttaggagtcgaaacgtgtcattttatcttccctttattatatgggagaagcccaattttgagtggattgcgagctttatgacaccaattttacgattcagttttaaaatactacaacttgtttataaatgatgataccaattcgaaaaataataatttaacaaaaaaaacttattttaaggtttaaaaagggtttgttggaaatataatcaactttgggaacataattatgaaattaataacattactatttataatttgtaaaataaacatttttcactatttattatatttattatgtatactaagatttgtacaacatattaagtatttgtatgaataaatatacatattttatttatatgtacagtaaatgagttatacgaatgtaaatgtatatatttgtataattaatgagatgtacaaaaaaaaatgaatttattaaacaaaatgcatatcaaattatagagaaaaatatgggttttttgtgtagtaaaagattttttaagaaaaatatactaataaatattttaataattaaactagaggaaaagtgaaaaaaaaaaatttgggtccatcacctattttgcaaatgtaaatagtaatattattagctttataaatatgttggaaaaatgttaccattttgcaacatatctcctaaacaaatgtggtgtggtgataacatcatcaataattaaggttatgttttaaacatagcatgatatcatgtaaattttaatataattggcttaaataacatataatttgtttgaaacacaaacctatatatcccatgctatttgttaaatacagtgcgagaaatgattttttttatttacaattttttatctatcattttacgaacaaatgatcaagatatggttggtattttaattatgggatgatttttacccgttggagataaattttaactattaacaatcgacttgtcacgatttgatacgtagaaactcgataattttacgaaaatcaaagtaggatttcccacattattagcgttaagagatggtctgctacatcaatctttcaaaaagtatacgtaaccgtgcaagcacattaaaatgtaattcgtgaaataagctttcaaaagtaaaatgtaaaacatgaggatcagatactcttatcagttatcactggtatttcccgctctattgactattaattaattttgagatattttcacctaaaatgagagatatttaaggcaaccaaatgagcaatctataacattgctttagcatgagcgaattactcgaatccgaatccgaaaaacttaatccgaacccaactcgaacccaaagtctaaatatacctgaatgggttttagatttctaaatccgtaaaaaccgagtctaaacccgaccaaaatactcgaacgtccaggccatcattgctcaatactatgcgtgtccaatgcaatgtacctcaagccaaagatatccaaactctacggttcctttatgttaacattataaatttataaccattcgggcaatccgcactcattaccctaccatattacttattataatgaaattatcacataccgggcatttattccactaatgtggttcgggtaacattgttaagaaagccaaaacattcgaaaataagattttggtgagaaagttctacaatatattacggcatttatattcttgtcaatgtgtctcttctcttgtgtcctacatgcccatttgtatttttttctgtatatgtgggtttaagcccaaaactctaatgattttttcagcccaaaggtgaacatgtacatacaactttcttcaaatgtacataatttaataaattaggtagaattagaaatttttagcgtaaatttgatagaggttaaaaataaaaagtgatccaaattgagcgtttataatacaaatgaattgtcacatacatgataaaaaatgtaaaatcacttacataaaaagtgtgttacacaaaagttattgcaacggtatctaatttgacttccaagttagacttctctcttctaattggttagatattttttcattattcagatttcagatgttgagcttattttgtgtcatatactgtactcacatttaattttgtagtacttctataatacattttggggcaattgaatctcataaattgtcatgtgaatgcattcattgcatctctttcttagttctgtaataaccaaaaataatacaggaattattacataacgaatagatttcgtgtaagaagagagaatcacaaaaagaggaaaataattagattcgccacagtttcacacaccaccctcactaaaagcaaatagacagatctaaaaaaaaccagagtgaccaaaattatcccaaaacccaaacttacccttagaccaacctcagatttacgataatg

SEQ ID NO: 12251 - DNA, 3000 bp, Unknown
  misc_feature (1)..( 3000): cDNA_ID_3024376_gDNA_ID_2214539_Annot_ID_185193 3000 nt of promoter + ATG
tatccgtgactgtaattctttgttgagtttatcagttttggtgacagatactgaatttgtcaggtacgagaaacaaggcaatttgattggaaatgaatactttttacatgcttatggaccgatatacgttctttcagccgagatagtagcttcacttgcagcagctaggaatggcaggtttgaaatgtttttgatgtacctaactagcagattttgatatgcaaatctcattatcggtgtttttcatttcagtctgagaatgtttaataatgaagatgtaactatcggatcttggatgcttgcaatggatgtacatcacgaagacaaccgcgctttatgcgatccgcattgttccccaaagtccatagcagtttgggacattcccaaatgctcaggtaacattaatatgttctcacataatagcaatagcagtcacacaagaatcaattagccaagcttttcttctcaaatctttagggctttgtgacccggagagtcggttaaaagagcttcataagacggatatgtgctccaagagtccgacattacctcccgatgacatcgatcagtagtttgtttcaagagttgcccccacttgaaacttcttgagacagttctacggaatatatgatctcaccacaagcactagagttccgacatcattggagctgtatagggaaaagatgacttcatggttcttacatgatctgattttaatagttgttgttagattgtaccacatatatacactgaaactatatgttatagacagatacatcaatatccctttttgtaaaattagatttatgtgcccagtataggcactgggtgatggatgatacatcttgtttcatttgtaaaagaaatcaaattcaatctatttatttgttatattaatttttttcatcaaatactgtttcaaattttatgatacagcggagataaatcagacatgagactatgtcaaaattgcaggagaattattctaaagataaaaccgtttagtggatttggttaccaaaatgttgatatggccgagttggtctaaggcgccagattaaggttctggtccgaaagggcgtgggttcaaatcccactgtcaacataattattattattatttttttttttaaatttatatataggcttcaaatcaaacagtgacacttttttggtacaaatcaaatagtgacttatatattagagaaattgttggaaaaaaacaaatgtgatatccattgcttttgcggaaacgttgacaaattattggcgaaatggtgacttatatatttgagcaacatacacactcgtttttatcttatttttatccaaaaaggggaaagtagatgaattatgtggattttattagtgaatatgtgatgcatttcattagtgaatttgtttgtttcgaacacctaacaatcaattatgtttgagaggatattttcagggcggtcctgaggagagcaacatgaaacatttgtatgtgacctcatagtttttttcaaaaaattacattaaaatttatttgtaaataggcccccaaaaatatttaatttgaaaaaaaccttaaattgcaaaacagtttatactccctccctctgttccatcaagattgatgttataggttttttttcttgttccaaaaagtttgatgttttagatcaatattattagtatttttatttgtgaccaatatagagaagagaaaggcagtgtctgatattattaaacaaacaaaagaataataaaaaaataaaaagttatttttcttaatttgtgtgaaaacccacaacatcaaacttcatgaaatagagggagtattaatttcaaaatatataatttatggtttagaccccagattgtcatgaccgaccgttgatactttgcatagcttagaactttcatctctgcgtgtagtagagaatgactagtttggtaacctaatttacttatagatctttaaacatatagatcatttgacccaatttactgccacgcgttttaaatgtactaactactaagtatgaataaaatgatcaatttgagtcacaaaaagtatgtttattgtgatcaattgtgaaatgccaactcttttacaggtattactaggttgatgggaaatattttgctagggtccccgaccaaaccgcactaacaaaaacatgaaatttaattagaaaaaaaaaagttgcaatatttggaggacgatagttccgttgtcaaatgatgaacaacgaagaaaccgtacattgatgagataagttttatgtgaaacacatcttgccacctatatttatgtaactatgtgaaccataataatcataagctctttacaatatattttcttagttttgtttgtaaagcaaatttatggaagaaaaaaaaaattgtcgtccacatatttccaatctcttccactttgattctcttccattcaatctttcttcgaggtttaaagcattttctatgatacaaaagtataagagatgtgtatccagttgcaaaacttatactatgaattgactatactattttgataatttctataaccataacggctgcatgaactatatacttaaaactatgactacgatagtcgcaataaatgtatcgtactatccttcgaactcttatacgatttaaaaccttagcatatcaaacatttaaatttctagatagtgatatcaaaatcctacagccgcaatttttccagaaaaaggtgataattttttttttttatcagcatattgcttcgatgcaaaatacgtggaatctatgcaaacaaatttgtttcttctgtatagttgcttattgagttgagtggttgtcagtcaccaaccctcttcagatctcaaagccacaataaaatacgttaaattaataattaccaacctcaaaactataatctatatatatatatatatataatcagcattttcttcagtgtctctctactctctctcagatttgcatttgtttttttttggtttggttatg

SEQ ID NO: 12252 - DNA, 3000 bp, Unknown
  misc_feature (1)..( 3000): cDNA_ID_2711678_gDNA_ID_2214539_Annot_ID_185192 3000 nt of promoter + ATG
ctaatggcagatacatggaaaaagccgtattcacgggaatacgcagccttccccgctccatggctccgctcctccaagttctggcccactacaggtacttgaaaactaggggtggcatttcccatagaaaacaatttgttatttgtaaatcgtttcaaaatgtattaaatatgtgtgaaacagggcgagtggacaacgtgtatggagaccgtaatctggtgtgcactctccaaccggcgaacgaagaacaggctgcagctgcagtgtctgcttaaatgaagccactatgaagcgattcgcactcgcaccaaaacccacaatggggcgattcggactcataccggatccagaaacgtatctttactggcttttacttctcttcccagcctcatcatcactttcactttcacttcctgtacaatgtacatacgtagtcctaagttcttccctcatttatttaataaaatacatttctttatgttccactttcttatacgtataacattccatttggatgatgtgatcaccatcgtggttatatttatgccatatgatctctttgaaaaaagtttgaattcttaggatatttattgtttcattttataattaggaaatttggcaaaataaccataattctaggttttataaacaaactgactgacaacatataggttctgaatggttgcatgtagagtaaaaagtggaagtgaaggagacaaaaaaatttagtgaaagaaacaaccaaatattaaaggaaaggaatctaaattttgaagtagttattttttctctctcctttgggtagagttagatttttttttataaaaaaaagcttaataccaacttgaacttcctttccaaagaaaactaggaacttggtagagttaaaatttaatttcacttttctacattttggccaaaaaaaaacaaaaagcagttctaaccaatgctaatcttttctattttagagacacacattggaacaaaatcaactctaaaatagtgaaaaaaaataaaggtaggacatgggagatgctcttatgtttctgctaattttttcaattgccactaatcagacttgtagcattattctactaaatatcagattggacattagatcacctatactaaaaccatctccaatggtcacctctataaatagaggaaaatatagaggtcatcattagagatgccctaagtccttgaaccaaaacctgtatttcctcacagaaaatagattttctgtatagccacattaattcattctaactagactctcactgaatctttgagaggaccaacctcataatgattttttcctatcctatatactaatgcttgtttttttttttcttccgaaaggtgattaaaggagcatattctcatcgagccctgttcggttacctctctagcaaacaactcatctatcctacgctttatcactattttagagcacctgacatttctcttaagaacaaatcaaccttgtaaagcatatgtggcttgattcaaaaagacaaacactagtgatagacgcaagaaccctaaataaaaaaagttttctagattctcaaaaccgttaggtctgacagacatatataaacaattatcgaattgttattaattaatacgatgtcactctatacctataatagagattagggtttccatgtgttcatttatccaaccataattaataacgacaacggtaatcaataagacacattaagattgatcggtcaagagttatgagtttcataagtcatctccaaattttgcggaaactaaatatttaaacatcggattctctgtttgtcagttgtcagatcatctgactcgcatgcacatgattcgtctcaaaaaggcaaacacgaatgatagatgcaaggaccctaaatcaagaaagttttctcgattcttaaaaccgttacgtccgacagaaaaacataaacaattgtcgaattgtcataaatacgatgtcactctatacctataatagagattgaggtttccatgtgttcatttatccaaccataatgaataacgacaacggtaatcaaacacgacaaattagaaataatcgttcaagagatttgagttttatagattgactccaaattttacggaaactaaatatataaacatcggtttctttgttacaaaaaaaaaacattggattctcttcagtatttgagcttttattactgaaaatacaaattttataatttcgtagctctggattctgatagtaaaactgcaattgagaaggatattcaaatatttcaaaattttctagtaaaactgcaattcgtagatcttttttttttgttcaaagttttgataaagcaaacgtccctttttccttaaaataattaacttagtatataataataaaattaagacagtgcagtaattgataaacaaccaaaggttcattgtacctttctccattgtcttcaatgaattcctaaaactagaagaagcgttactttagaaaaccaattataaaaatctcctctttcttcatcaaattccacaaagcatcagtttcttctccttctccaagctctcgcatcactttcatcgatttttcctctctgcgtcgatccttcagacatcggcgtcggagtttccgacaggtaaatgtaaaacacagtccactgttattccctgcttcttagctttccattatgattttttgttgtgatttttactgttttctacggaaatgcttttgatgggttttgtttagtttccggtgaaatttacagagaaacccacaatgctgaaaatctgaattaggctcaagttaggagattactacacaattagtgctgtgagaatgaatatacggacatgctttgttaaaaagattgaaacttttgcttcattttgatcaaaagattttaactttcgattcttttagtaaatgggtcgctctttgtttggactataatgatcagactgctcttgtcttgtgtgattaggaatctaaaaatg

SEQ ID NO: 12253 - DNA, 3000 bp, Unknown
  misc_feature (1)..( 3000): cDNA_ID_3024388_gDNA_ID_2214539_Annot_ID_185188 3000 nt of promoter + ATG
aagattgttttcaccttataggttaaagatattgagttcaatttacgccaatgtataaatcctctacataaataagaagatggaaactctttgacaaaatgggcttataaataagaaatgatctagtttttgtattccctcttgtttaatatttttacccacaaattaagaaagcataaaatattcatttaattgttctctttacataaaaaaacattattaattaaactgaattcaactaatataaaaaatgattgtaaaatataattggtataaaaatgcatttaatttgtataaaaaattgaaagcatcacttaaaatgaaactttttgtttttgctaaaacatcacttaaaatgatacgggaagagtataagttagaacaagagttaatatatggacaataaacaaacagaaagggataaatccgtccaaagaacaacacccatagatttgtagtaatatataaaaaaacactcatagctcccaaaaaaagaactgtcttttattctcatctctttcacaaaccccccaacctccaacaagaagacctctctttcataaaaccctcacacgtgtgactgattcatcaccatgagctcatccccggccgtgaaaggcctaaccgatgaagagcagaaaaccctcgaaccggttatcaaaacgtaccaccagttcgaaccagacccaaccacgtgcacttctctcataacccaacgcatccacgctccggcctccgtggtttggcctcttatccgccgcttcgacaaccccgaacgctacaaacactttgtaaaaaggtgccgtctcatctccggtgatggtgacgtcggaagcgtcagagaagtgaccgtaatctccggcctcccagcctcaaccagtaccgagcggcttgagttcgtcgatgacgaccaccgtgttctaagcttcagggtcgtcggcggagagcaccgactcaagaactacaaatcagtgacgtcggtcaatgagttcttgaatcaagattccggcaaggtttacacggtggttcttgaatcttacaccgttgatattcccgagggaaacacagaggaagacactaaaatgtttgtggacactgtcgtcaaactcaaccttcagaaactcggagttgccgccacatctgcacctatgcatgatgatgaataatttcaagtttatttcttatattttctctcggtaagttttttcctttcttctgatgattattgattatttacttaatttgtgagatttactattggaagcaaatgtttaattcgattccgttaacgaaactattgttgcataacgcatattagttctctgtttatttttttccaataaacggcaaatcacgaattctgtcatttgattttgctttttcaccatctatttttgaataaatttggactatttttgaataaactttggactatttttgatgatgtcaaaaattggtattacactcttaattaatattggttatagttggtctatagtatttgcgctacaaagagtcaagaaatcttgccggttatcaaaaagcaaaaaggaacttagaaatcacttcttgtcgcaatgttgaattagatttttatttaccttaccaaaatcattcttcttcttcttcttattaggttaacgttttttagggcacctttgaaaaaagtttatacatatatattccgatggtttgtgtctccacaaaacttgtccaatacattttttttcattaattatagtcgtcttaaaacattggaccgttgtgatgtgtagtctagttatttgtgttgctatgtaattgtatcacacattcagatttggtcccctttactatgtgttattaaaaaaaaaatggtaagaattgcgccacagtagttccagttcaataaaaataatataattttttgtattacaagaggaatccatggtctagattcgtgtagaagctcttttgcctttcacttctttaaagtgctggaaaagagaagtgtgtcacattatgcatgcagccatgtactacttccaatggttgtgtctccacaagttgttttaccttttcaatagaaagacaaatacagtttttctatttcgcttgattttctttttctttttcctccaaaattgctttaaagtaaagtatatctaattgacagtaatctttaatattcagaaatatatatactttatattttcacttggaattggaagtatatatattacatattaaatataatctaactttttatttataaacaattaaaatctattgttaactaaatttagtttcatatttaaaaaatgttagaattatatttataaataggtttttaagacatagttttttttttaaacattataactacatattataactaattatgatcttcttctaacataatttattatcttttttatataaaaaaaatctctttacaaattttataatcaatatcttcttaaaaagatagctaaaatccattttcttggatacatattatttttatttaaaatatattatatttaatagtatcaatagtgttaaagatattatatggttttgaacattataataaacatgtgataataaacattatagtaaaatccttccaaatggtcctgaaccgagtcagcatccagacaaactatgttcttcggtttgatatcatttgagtactgagtagacattcacattttgggataagaagagttttttttcataaatcgtaaataagataagaagatatcaatgggcttattcaagcccaattaggcccaatccccgatcgtatcagataacaacgccggcgacggtgacacgttcacattcacattttgggatcaattttgaaactctactccgataacttcaaccataattctccggcgagtcagatcgacggtgagttcttcagaccaagctcgattacatgattgtgtgtctgattttgggatcagttctgaaactatttgatactttaggattttgtttcttgcgatg

SEQ ID NO: 12254 - DNA, 3000 bp, Unknown
  misc_feature (1)..( 3000): cDNA_ID_2711695_gDNA_ID_2214539_Annot_ID_185187 3000 nt of promoter + ATG
atacatctgtaccacctcccctggaggataaggcttgtaagtggaatgcacttcatcgtcacatagttggggcaaagatatccagggaataaacgcattgagtaagttttggtccatgtctcttcttgtgtatcaatgtccatatggctaatttccaatcagaaagttcagcactgccactaaccatggctagaagatcttcaaggttgactagcggccaggtgtaggtaatgcgcgcggtcttgggacacatcatggaactgttcagtgtgaagatccaaagatagaatcttgtaaccattaagtacttcgaaccagtagatggaaccattcacaaagaccgaatgatgtctggcttcgacatagtaaggaggcggactcggcattgtccgccattcaccaatgtttaaatcgagaagttgtgcttgatctcggtttagttggatgagccacgaatgctaggcaatgcgtagggcattgaatatcatttggagtgaaggttttgaatccctcaggcagcttgtgaaagagcttccgtttagcgaagttatataaccaagacattcatgttgcttttcctttatgggctatgtatatcacggtttttccagtttcccggtttttcaaaatcgttatcattgcatctcgacaccgataagattcatagcttaaagttttgtcgatgcactgaagtttgagttgtttttgctttcatgtttactttggacctttaaaactggttttgcaatctgtaaaatctgtaaacgtacactgattaatgatatttacattcttagaaaagaaaaatgaatcatcagcccatgtgaacatatcgaacaatgtagcactttctcaaagccaacacaaccgcccgcttagcttacattagatagatcaggcagcctttcatatgtaaagataagtggcggagaaaccagccatcaactattgattagtcaacatcttatcttctatcattagctatttacgatttaatatctacttgacatgtaaaagactaactcttcaccagttcactataaatagaggttgatattgtgcttatatcttcacactacacacaaatacatacaaacatacattaattggaaactgaaagtaatataatcatggctaagtctgctgccatcatcactttcctcttcgctgctcttgttctctttgctgcttttggtgagtaatgatcttataatattatatgcatgaaaaaataaattctgaattttcctctttagatttattggtaattaacaagatatttatatatgaatgcagaagcaccgataatggtggaagcacagaagttgtgcgagaagccaagtggtacttggtcaggagtttgcggaaacagcaatgcgtgcaagaatcagtgcattaaccttgagggggcaaaacatggatcttgcaactatgtcttcccagctcacaagtgtatctgttacttcccatgttaagctaccaatgactaccaattatacttggtgcttcatggtgtgtattttacataaaataagtctttgtcattctatgagtgactttattatgacatgcatgtttatgttttagtgtttcgtttgctttgttgttgttttctttttttcgtttgctttggttttataataaaaataaaagaattatgtacgaagttttttcttcttctatcaatatttgtcacgttagatcattaggtgaaactaaaccccaatttattgtttgatcagactaccaaattcaagcttgacaaatgaaatattaattgagactttgaattatatatacggtaagaaactagagatttaaattacctttttatagcatatgttctaatattgtcttgctagcaagtaacaataatagcaaacataaaatgcatataaaaacatgattgggaatttgggatgaagcaagaaaaatatataaaaagattgaataaaaatgataaagataagagaattaaatctcaaacggaagtgacgagaatgttatatatgggacaatgggacgagcattacatacatcaggcatcgataacagtttgtttcatgtctccgaatagtatttatactacatacgactgtttcatcggatccatatttgtttgaatttccataactaagaactactcacaatatatatatatatatatatatatatatatatatatagcattttgcctatgtaccctaaattcatagccacgaccaacaatggtttgtttatacatagcaacttagctagtttgaaaatttaccaccggcgcaagagattgatgaatcatccaattttcgattataggtgtttcctggtaaaatgtaaatgggaaacttcgacagcatgcagtttcttattctgaaaacttggttgaacgatgctgctcttgagatcaaccaaaccatgtcgatagtcccttatgttgtatgtctaggggtgatgctcaaatcggaaaattttgaccgcttagttttatcttgttcatatatatagttttcacctttcaaaaattttgcacaaattatgaaatagcttacactattactatcaaggtatttattcgacgaaggtcagactaccaactacacttttcctaactgtgaaaatctctgaatttaatatacttgtgtaactattggcttggttaagatcttatttcttgcatcttgtccaagtcagattaaccagccgcccatgcaaagccaaagcagccgcttaggttacattagatattgagagagaaaaatatgtggtagataaacaagccatcaactattaataagccaagatcttatcttttaatattagctcgagaaggcgtacgtggtgtgtttaatttgtggggtacaattagctcgttattgtaccatgcacaagtagaaaataaactcaccatcatttcattataaataaaggttgatctcttaagcttatttcttcacacaacacatacatacatacattgaaaacaaagtagtaataatcatc

SEQ ID NO: 12255 - DNA, 3000 bp, Unknown; identical to SEQ ID NO: 12249
  misc_feature (1)..( 3000): cDNA_ID_2708596_gDNA_ID_2214539_Annot_ID_185186 3000 nt of promoter + ATG

SEQ ID NO: 12256 - DNA, 3000 bp, Unknown; identical to SEQ ID NO: 12248
  misc_feature (1)..( 3000): cDNA_ID_2711699_gDNA_ID_2214539_Annot_ID_185185 3000 nt of promoter + ATG

SEQ ID NO: 12257 - DNA, 3000 bp, Unknown; identical to SEQ ID NO: 12246
  misc_feature (1)..( 3000): cDNA_ID_3024398_gDNA_ID_2214539_Annot_ID_185180 3000 nt of promoter + ATG

SEQ ID NO: 12258 - DNA, 3000 bp, Unknown
  misc_feature (1)..( 3000): cDNA_ID_2708603_gDNA_ID_2214539_Annot_ID_185199 3000 nt of promoter + ATG
ccttaagtacctgaaaatgcacaataaagacagccaaccaacggttcaaaattcatcccattgctgtattacaagtcactgtgcaaaacctgagctgtctagtacataatttgaagttacctttgacatgtgagactccaaaatctggcgtcgaccttccacgtctgggttaggtacaacaatatgacgatcaaacctcccaggtctaaccagggccttatccaaagactctgggaaatttgttgctgcgaccacaataattccttcattctgtttaaacccatccaactcaacgagcatctggttcaatgtcatcttcatgtattgctggtccttgggattgcgacttcctccaatagcatctatttcatcgataaatataatacacggggagcacttctttgcagcactaaaaagatctctcactcttctggctccaactccaacaaacatctcttcaaactcactaccactgcaggagaagaaaggcactccagcttctccagcaatagctctagcaagcatagtttttcctgtcccaggaggaccgacaagcaacacacccttaggaagctttcctcccagacgagtgaacctctatagtaaagatcaaaagatgaaagagtgaggcctaagaacaaaacagtactaactctagaaaaacctggcacagataattcagaggataaaggtctatatgataacttcacatgatttatgcttttgaatttacatcactagacagattttatacttaactagaaaaacactctagcactgtgaatttactttggggtcgcgaagataatgcacaatttcctctagctcagcctttgcttcatcaacaccctttacatcagaaaatttggtgctcgaatccatactaggttgcacttcttcgtgcaaaccaagtcctaacatgtattaagcataaattaatgagcacaaagtcattcaatacagctattggatcactgaagaaaacacaaccaaactctacctttgccaattcctctgtcctcgataagagctccaataccagaaatgagtaaaaaaccaactccaatagttcggattgtactccatagctgttctttaaagtgagtcctttctgtggatatcgtatggatcggtgcactagcagttccaaggacaccatcttttgttggttttcctacgtttctaaatgccccaagacctccaaaagtctcttcctcccttgcaacaccagcaatacctaaaagaaaaacagcaaaacatttcccaatattatatagagaaatggctcagaagctgctaatacaaatatgaaagcaaggacacaatccaagtatccattcagattcaaacaaacagtctctccctccttacccacctctttgcaatgttcgaaccagctcactttgatcgagcctatcaactttaaccaatgccttaatgtattccgataacgcagaggcattcgcatgcaaagaaggttggctttcaaacattctgataacagcctcaggatcatttcttcgaataagttctctcagatgtgcaacctcattaacttcttctctatcacggactctgcgagcaaagctaccaacataactcgattgaaacctcgttcgcggtaaagaagctccaccaccacccacagctatagataaaataaaaccaatttacatcaaaaacacttctaaaacaacaagaacaactcataaacggaatcagaatttacctccagtaactcccactctaggaaaagaggagtaagctctaacaagtaagcttcttaaactgctcaattccctttcatgactcgaaacctgtcatcggtgaagagaatcaatacagatgaagttaattactaatcccaaactcaaaatgacactagacaacacatgaaaacattttgataaaagtgaatacttttacccattttgaatcaaaaaaattgaaactttttataccaatttcaaaattaggtgacttgggtagtcaaataaatcaaatgacaatatcacagagacaatctagaatcctaaaagacaacattttgagggcagagaagaatttgagcttctagggtttgaaaaatatcatctttagcttatgaatcacaaagatcttgataaaacccatcagaaattattatctaattagatcaaatccactacagtatcaaaccaaagtcgaaacctttttcgtattaaaaattggataaaggggaaaagagaaaaatgaaacaaaaaccttggtgatgatgcgcctccaagccatcaatcaaatctctccttcacgatatcttaaaaattggtgttaatgtctgataaatcgaagttcctcgatctatatcggaaacaaaagacttcttcgttgtgtttggggaagaaccgttctaatcttattccctaaagtcttaaaaacactaaattacacgtgagagacctgtttggttatcgggtgagagaaaaattgtgcagcaggtggagacacgcacgagatatgtaggtcgcctcttaagtacataaatacccttggacatacccaataattcattttagtaggctttttctggcggcccacattaaaaagaaggacctagaacataaattggcatcgttagaaatgggcttaagtaaaggcccatatgatatatatataaaaaaagagattctagattagtaacgaagtttctggaacattgtcttgtcttgtcgccacgtgctcacataaatgtcaaagaagcttcaatacagtgaaatgatcttgtcttgtctctagaaccttctcttctctccccttataatttcatttctctctcctccacgcctcaatctctcaactcaaaactcaacattttctgaagaaagtcgcaaactttacccaaaacccagtttctaattttagcaacaaaatcaaaaatatctacttttgtttctcgaaagttacgaaattcatacaatctagcttatctctgagcttatggatttgagataaacaacgaaa

SEQ ID NO: 12259 - DNA, 2571 bp, Unknown
  misc_feature (1)..( 2571): cDNA_ID_3024365_gDNA_ID_2214539_Annot_ID_185198 3000 nt of promoter + ATG
tctacaaaaatatcacacaggccatttagttccaattatgtcccaagtaactagatcaacaagtttgtaaattttatgaacttcaaaattaaaagtgttacattcaaagaaatactttcttagtatcatgacctcttttctctaagaaagcttagcaaaagttactaattacataaactcctaaatgttgaccaaagtgagtactaagataagtagacacggagcttgatactcttatcgcagctccatctcatgcttctaaggtctggagaaggaaaaacaaacaaccattaaaattgtcaaacgaaatcagagttttttattcatcagaacaagaaaacacaaatgtacaacaaaccacactcaatgactcttccttgagtcaaaacaaacaaacaaacaattcaactagtaaataaaagtggtagcattaccataacttagaccgcaacaagtagatgtgttaataccgtatagttaaggttccgaaccaagaaaacccatttgatcaaccatgtcatgtagatcttggctgtcccaatccaaaggcgaaccaaccaaatcttccactttcacatccaacgctgcttccaaattaccatctctcatcatcacattcatagcctccaaacattgttcctccttagtaggcatcgaattattcgcctcatcatcgattgctgcagcgaacaacatttccatatcatccttcattctatcaaactcttgatcatgtaacaaattctcctccatagtccccaagcttggagtagaagtaagcctccgtttcctccccacatccaaaccaaacaaactcttcttctctttactcataaccgcaaactgctgaacaaagttcggattgttcaacgccttggcaaggaacgtcatcatctgctgctgtctcttctcagtaacaagcaaccgttgctccatagctgcaacttgactcttggagctgtgttgctgttgcctcaacctaactacctcagctacaagcacaccatgatccctcttcaacctctcaacctccccgtcgaaaccgtattgcccaacctcaacacatgacatcccagatccttgctgattcacattctgcaaacccatgttcctccttcttttgatgttcttcaagagatgcttttgtcctgctaaaaacccttcatttgcaaattcccatctatctggatcaatctttctgaatccctgcaatcaccaaaacaagtttcatcagctactgaacttgaggcagagtccttacttatcattccaagattctgtttttactaccaaacacattttgaacttcagaaacagaggattgaacagagtttatgttaaatgattctcttaacatatgaccaaaatctcaatgcatctaatttcaatttagccacttaaaagcttaaagaactaacctttatagctgaagactcataggaaacccatctaaagaaatccaaaattaaaaattagaaacaaaaacagaaacaagactaagtagatataaggaagcaaagaggtacttacataagtattgagctgacgaataaaacttgagaaattgctatgcttgaagtaacgtggaaggagagttgttgagaacttatgagaatcccacaccacaaagctgttacgaccattactccaagaaaccaccgtgtccgtcgccggatcttccaccatttcgtaagtcttagtcagaaacggtggtggccctgtttcgttaagcccttccattggtctaggagaggaagaggatcctacagatgaagaagccgctacagaaccagtaaacgtcaccgtttcttcctccatttccactttcagttcttccattttcgttgtttatctcaaatccataagctcagagataagctagattgtatgaatttcgtaactttcgagaaacaaaagtagatatttttgattttgttgctaaaattagaaactgggttttgggtaaagtttgcgactttcttcagaaaatgttgagttttgagttgagagattgaggcgtggaggagagagaaatgaaattataaggggagagaagagaaggttctagagacaagacaagatcatttcactgtattgaagcttctttgacatttatgtgagcacgtggcgacaagacaagacaatgttccagaaacttcgttactaatctagaatctctttttttatatatatatcatatgggcctttacttaagcccatttctaacgatgccaatttatgttctaggtccttctttttaatgtgggccgccagaaaaagcctactaaaatgaattattgggtatgtccaagggtatttatgtacttaagaggcgacctacatatctcgtgcgtgtctccacctgctgcacaatttttctctcacccgataaccaaacaggtctctcacgtgtaatttagtgtttttaagactttagggaataagattagaacggttcttccccaaacacaacgaagaagtcttttgtttccgatatagatcgaggaacttcgatttatcagacattaacaccaatttttaagatatcgtgaaggagagatttgattgatg

SEQ ID NO: 12260 - DNA, 3000 bp, Unknown; identical to SEQ ID NO: 12245
  misc_feature (1)..( 3000): cDNA_ID_2708997_gDNA_ID_2214539_Annot_ID_185178 3000 nt of promoter + ATG

SEQ ID NO: 12261 - DNA, 3000 bp, Unknown; identical to SEQ ID NO: 12254
  misc_feature (1)..( 3000): cDNA_ID_2711695_gDNA_ID_2214539_Annot_ID_134440 3000 nt of promoter + ATG

SEQ ID NO: 12262 - DNA, 3000 bp, Unknown; identical to SEQ ID NO: 12253
  misc_feature (1)..( 3000): cDNA_ID_2711691_gDNA_ID_2214539_Annot_ID_134441 3000 nt of promoter + ATG

SEQ ID NO: 12263 - DNA, 3000 bp, Unknown
  misc_feature (1)..( 3000): cDNA_ID_2711678_gDNA_ID_2214539_Annot_ID_134445 3000 nt of promoter + ATG
gttaattcttatatgttatgatcgctaatccatctttctcaatgattgagttatctgcttttttgtactcattctgtttactctgctacagatacctaccggtggtatccctgaacccgagcagacatcaccgctgggaaccatttctgcagcaccatgggggtctgcgcttatcttgccaatctcgtatacttacattgccatgatgggatctggaggactcaccgatgcctcaaagattgcaattttgaacgctaactacatggcaaagcgtctggaggtaccttatcttatcttgacaactctttaaagagagtgaacgtctcttctcttgtgcaacctcacttatgctttcttgtctttcagagccactacccagttcttttccgtggtgtcaatggaacagtcgctcacgaattcatcattgacttgagaggattcaaggtatgtttctttatctcgtttgagtaaatgctctgttttttggttgtacatgctaaatcaatgtcttgttcaatgtcctcagaacactgctggaattgaaccagaggatgtggccaaacgattgatggattatggtttccatggaccgacaatgtcttggcctgtccctggaacgcttatgatcgagccaaccgaaagcgaaagcaaggtaattatgtcttgcattgcattgcaaatctctcactgactcagctctcagtctctaaaacatggcttcataatttgtatatatatatgtaatatttcaggctgagttagataggttctgtgatgctctcatctcgatcagggaagagatttcacagattgagaaaggaaacgcagatccaaacaacaacgttctgaaggtaagaaaaaatttgagaccacaatttcagttcggactagccctctagtctgatactaatgaactttaaaaaacaaacacacacagggtgctccacatcctccgtcattgctaatggcagatacatggaaaaagccgtattcacgggaatacgcagccttccccgctccatggctccgctcctccaagttctggcccactacaggtacttgaaaactaggggtggcatttcccatagaaaacaatttgttatttgtaaatcgtttcaaaatgtattaaatatgtgtgaaacagggcgagtggacaacgtgtatggagaccgtaatctggtgtgcactctccaaccggcgaacgaagaacaggctgcagctgcagtgtctgcttaaatgaagccactatgaagcgattcgcactcgcaccaaaacccacaatggggcgattcggactcataccggatccagaaacgtatctttactggcttttacttctcttcccagcctcatcatcactttcactttcacttcctgtacaatgtacatacgtagtcctaagttcttccctcatttatttaataaaatacatttctttatgttccactttcttatacgtataacattccatttggatgatgtgatcaccatcgtggttatatttatgccatatgatctctttgaaaaaagtttgaattcttaggatatttattgtttcattttataattaggaaatttggcaaaataaccataattctaggttttataaacaaactgactgacaacatataggttctgaatggttgcatgtagagtaaaaagtggaagtgaaggagacaaaaaaatttagtgaaagaaacaaccaaatattaaaggaaaggaatctaaattttgaagtagttattttttctctctcctttgggtagagttagatttttttttataaaaaaaagcttaataccaacttgaacttcctttccaaagaaaactaggaacttggtagagttaaaatttaatttcacttttctacattttggccaaaaaaaaacaaaaagcagttctaaccaatgctaatcttttctattttagagacacacattggaacaaaatcaactctaaaatagtgaaaaaaaataaaggtaggacatgggagatgctcttatgtttctgctaattttttcaattgccactaatcagacttgtagcattattctactaaatatcagattggacattagatcacctatactaaaaccatctccaatggtcacctctataaatagaggaaaatatagaggtcatcattagagatgccctaagtccttgaaccaaaacctgtatttcctcacagaaaatagattttctgtatagccacattaattcattctaactagactctcactgaatctttgagaggaccaacctcataatgattttttcctatcctatatactaatgcttgtttttttttttcttccgaaaggtgattaaaggagcatattctcatcgagccctgttcggttacctctctagcaaacaactcatctatcctacgctttatcactattttagagcacctgacatttctcttaagaacaaatcaaccttgtaaagcatatgtggcttgattcaaaaagacaaacactagtgatagacgcaagaaccctaaataaaaaaagttttctagattctcaaaaccgttaggtctgacagacatatataaacaattatcgaattgttattaattaatacgatgtcactctatacctataatagagattagggtttccatgtgttcatttatccaaccataattaataacgacaacggtaatcaataagacacattaagattgatcggtcaagagttatgagtttcataagtcatctccaaattttgcggaaactaaatatttaaacatcggattctctgtttgtcagttgtcagatcatctgactcgcatgcacatgattcgtctcaaaaaggcaaacacgaatgatagatgcaaggaccctaaatcaagaaagttttctcgattcttaaaaccgttacgtccgacagaaaaacataaacaattgtcgaattgtcataaatacgatgtcactctatacctataatagagattgaggtttccatgtgttcatttatccaaccataatg

SEQ ID NO: 12264 - DNA, 3000 bp, Unknown; identical to SEQ ID NO: 12251
  misc_feature (1)..( 3000): cDNA_ID_2711674_gDNA_ID_2214539_Annot_ID_134446 3000 nt of promoter + ATG

SEQ ID NO: 12265 - DNA, 3000 bp, Unknown; identical to SEQ ID NO: 12250
  misc_feature (1)..( 3000): cDNA_ID_2711671_gDNA_ID_2214539_Annot_ID_134447 3000 nt of promoter + ATG

SEQ ID NO: 12266 - DNA, 3000 bp, Unknown
  misc_feature (1)..( 3000): cDNA_ID_2708599_gDNA_ID_2214539_Annot_ID_134450 3000 nt of promoter + ATG
agttgaaaataatctaatcatctactattttactctggttatcgttcaagcaacttctttctttttggaacaaaacaaattactcttgttatttttatttttatttcctccttttttcagattcactgtcttactcgtattttgctttactctatatttcctttaaagtaggatatacagatttctgtccaattagcaaaataaagaataagttgtgcatgttaataaataataagtaaaaagttttgaactaaataaatgcatgataaccctaagaaaaacgagtctaaagtttttaatactttttatgtcttcatataatcatgaaaaaggaaatatgatgaatcaatgtttcctataactggattttcgatctttgatgaaaattgctctaaattatgcataaaaactttctttcttttcattgaacttatctcaagactccaaaaaaaaaaaaaaccaaaagactccaaaaaatactttaagcattaagaaaacatagaaataaaacattaaatcgaggtttaaaaccaattatacactacacatgagagttgtacatcaaggttactcatttgttgattaacctataaaaagataataacctttgaaaaattgaataaaagcaacaaccaacttgatgatagataagaggattacgaaaatcgtaaataagaaaacctgggaacatgaaaaccaagcaaagaaagaatgcgacacattacaagatatgtgtgagactgacctttttgaaaaagctttaaacctttctaaataaaatagctatacaaactgcaaccaacaaaactataacctttcaaccaaaccaacaagaaacaaggaaaacattaattatgaactcgtaagaagttgaatgacgcccatgtagagagagtcagaaaattagtgtcgcacctataattcaattttttaaaaaattataagtatctttcaaatgcatgagtcaaatatcacttagtgagtactatctcttttaaccacatcttaacaccaataaatataatgaacaatcaaagccatgcattcaagttttcaaccaaataaataaataaaatacaattttggtttcatcccgttcagattttttagaatatccatgcatgagaatacaaaataattatctttttagcacttcagttatagtgtatgtcccaattgtttagtttcttaaatgcctcatctaaattgttttttttttctgttctaatctgttcttataatattgattgtttaactacccattaaaccatgcctaagaatggtaatagtaatacagttgaactttctgttccgagtctaaattttcggtaacttgaaaagattgaaaattcaatgcagttaagaaaagaaaaaaaacattaaactcctttaaattcaaattaaaaattcaaaatatttgttttcagtatttcattcagcattgaatggatcggccattaggaaggaatcaaataatggaccaatcaatcattgaaagcttttggactttgggctctcctcagcggcgcaaaggcataatggcgacgaattattgtttgtcgtctttctatgtttactttcttcaatatgtaaatatatctaacaatcaatgaagatgacagaattaagaataaaatattttaattagcaatatttaatatgatattttatatgatattttacaacacgctcggatataattttaacttagcaatattttatatgataattttacaacacgctcggatatgtgcttaataaataaattaatagtatatctttgcaacaatataaaatcatttttttttttgaaattgttccccactcttttttagacacaaagaatatggtactttacctccaatgaaaatgacccttcaccatcgtagattgattgaactttgcttggcttcatttgtaagtctacttaccactaagatttcaaatacaattattgccaaagggtggtatctttttccattgtagtaaaactaacgtatgattacgaattatggatttttacatgtatttcaaaaacattacaaaaaccctgaacctttaccctgtaaggctgtaaatggttcttgatatcttgttttgtaggttaccaaattctagactaaaactaagaatcaaatgtcattatatatagagaatcatgagatgaactatgtctaaaacctccctatgtccataccacaagttcctgcttaagtacaagcacaaatagtgcgaccgtcccaagttcattgacataaggaacccataaaaaataatttgagcagaaaacaatttaataaaaaattatggcaaaacaagtccaaagaaaacaaatttgtgagcaaaaggatcccattttcaaaatttgtgagcaaaaatcgctcattttaaaaatatgagcataatgaacttatttttaaaaaaaaattcgcaagacctattaaattcttaaaccagcacttttgatgggtgccagcttagatatatggtcagagtgcgacccttcaaatccattggcataagaaaactagaatatttttctttttaagcaaaaacagtctacaagaaaaaaaacatgtggcaaatccattggattggttcattccaaataactattaaccactagctttgagttacctacatatgcccatcaattcatatgaattagttttactttattttatccagtcaaaatcatttctaggttcgtcactcgttggtttttgttcttacattgtgtagtctaaacacgcatgcagattccaatcctctttgatcgtaggccttataaggatgcatcgtgatatgcgcagtcagtgactgacctaagacctagcaaatatggaaacaaaactcacgcacaagtctaatctgatcttcttccattttctttctttcctaactttctatttctactgacctttcctttaaagaaaaatatagctctatatatgttattgagtggtaaagcgtctcctcagaaagaagcttcaagtaaat

SEQ ID NO: 12267 - DNA, 3000 bp, Unknown
  misc_feature (1)..( 3000): cDNA_ID_3024365_gDNA_ID_2214539_Annot_ID_134451 3000 nt of promoter + ATG
acaacaaaccacactcaatgactcttccttgagtcaaaacaaacaaacaaacaattcaactagtaaataaaagtggtagcattaccataacttagaccgcaacaagtagatgtgttaataccgtatagttaaggttccgaaccaagaaaacccatttgatcaaccatgtcatgtagatcttggctgtcccaatccaaaggcgaaccaaccaaatcttccactttcacatccaacgctgcttccaaattaccatctctcatcatcacattcatagcctccaaacattgttcctccttagtaggcatcgaattattcgcctcatcatcgattgctgcagcgaacaacatttccatatcatccttcattctatcaaactcttgatcatgtaacaaattctcctccatagtccccaagcttggagtagaagtaagcctccgtttcctccccacatccaaaccaaacaaactcttcttctctttactcataaccgcaaactgctgaacaaagttcggattgttcaacgccttggcaaggaacgtcatcatctgctgctgtctcttctcagtaacaagcaaccgttgctccatagctgcaacttgactcttggagctgtgttgctgttgcctcaacctaactacctcagctacaagcacaccatgatccctcttcaacctctcaacctccccgtcgaaaccgtattgcccaacctcaacacatgacatcccagatccttgctgattcacattctgcaaacccatgttcctccttcttttgatgttcttcaagagatgcttttgtcctgctaaaaacccttcatttgcaaattcccatctatctggatcaatctttctgaatccctgcaatcaccaaaacaagtttcatcagctactgaacttgaggcagagtccttacttatcattccaagattctgtttttactaccaaacacattttgaacttcagaaacagaggattgaacagagtttatgttaaatgattctcttaacatatgaccaaaatctcaatgcatctaatttcaatttagccacttaaaagcttaaagaactaacctttatagctgaagactcataggaaacccatctaaagaaatccaaaattaaaaattagaaacaaaaacagaaacaagactaagtagatataaggaagcaaagaggtacttacataagtattgagctgacgaataaaacttgagaaattgctatgcttgaagtaacgtggaaggagagttgttgagaacttatgagaatcccacaccacaaagctgttacgaccattactccaagaaaccaccgtgtccgtcgccggatcttccaccatttcgtaagtcttagtcagaaacggtggtggccctgtttcgttaagcccttccattggtctaggagaggaagaggatcctacagatgaagaagccgctacagaaccagtaaacgtcaccgtttcttcctccatttccactttcagttcttccattttcgttgtttatctcaaatccataagctcagagataagctagattgtatgaatttcgtaactttcgagaaacaaaagtagatatttttgattttgttgctaaaattagaaactgggttttgggtaaagtttgcgactttcttcagaaaatgttgagttttgagttgagagattgaggcgtggaggagagagaaatgaaattataaggggagagaagagaaggttctagagacaagacaagatcatttcactgtattgaagcttctttgacatttatgtgagcacgtggcgacaagacaagacaatgttccagaaacttcgttactaatctagaatctctttttttatatatatatcatatgggcctttacttaagcccatttctaacgatgccaatttatgttctaggtccttctttttaatgtgggccgccagaaaaagcctactaaaatgaattattgggtatgtccaagggtatttatgtacttaagaggcgacctacatatctcgtgcgtgtctccacctgctgcacaatttttctctcacccgataaccaaacaggtctctcacgtgtaatttagtgtttttaagactttagggaataagattagaacggttcttccccaaacacaacgaagaagtcttttgtttccgatatagatcgaggaacttcgatttatcagacattaacaccaatttttaagatatcgtgaaggagagatttgattgatggcttggaggcgcatcatcaccaaggtttttgtttcatttttctcttttcccctttatccaatttttaatacgaaaaaggtttcgactttggtttgatactgtagtggatttgatctaattagataataatttctgatgggttttatcaagatctttgtgattcataagctaaagatgatatttttcaaaccctagaagctcaaattcttctctgccctcaaaatgttgtcttttaggattctagattgtctctgtgatattgtcatttgatttatttgactacccaagtcacctaattttgaaattggtataaaaagtttcaatttttttgattcaaaatgggtaaaagtattcacttttatcaaaatgttttcatgtgttgtctagtgtcattttgagtttgggattagtaattaacttcatctgtattgattctcttcaccgatgacaggtttcgagtcatgaaagggaattgagcagtttaagaagcttacttgttagagcttactcctcttttcctagagtgggagttactggaggtaaattctgattccgtttatgagttgttcttgttgttttagaagtgtttttgatgtaaattggttttattttatctatagctgtgggtggtggtggagcttctttaccgcgaacgaggtttcaatcgagttatgttggtagctttgctcgcagagtccgtgatagagaagaagttaatgaggttgcacatctgagagaacttattcgaagaaatgatcctgaggctgttatcagaatg

SEQ ID NO: 12268 - DNA, 3000 bp, Unknown; identical to SEQ ID NO: 12258
  misc_feature (1)..( 3000): cDNA_ID_2708603_gDNA_ID_2214539_Annot_ID_134452 3000 nt of promoter + ATG

SEQ ID NO: 12269 - DNA, 3000 bp, Unknown
  misc_feature (1)..( 3000): cDNA_ID_2708633_gDNA_ID_2214540_Annot_ID_134453 3000 nt of promoter + ATG
ttatttggaacatcgcctaaatcatttgcaaataatattggtccgagccaatttttgtcgtcttattcatgaaattaaaatatcaaatgattggttcaagaattttttttttaagtttaacacctaagttcaacattaggattttgattaattaattaaatgtaattgaaaaagattaatttatgataaacaatgtatgtgtcgtcgtggaaacaagtttgccacaccttctcctcccgagactggtctggcggccagggaccaacccttcataatgagaaaccagatttattagcacttgatagtttcttactaatttaatattactatgcaatcatacatgcatgtttgaaagttttctttttcgtatttatcttcattcatatgatactaattaataaactatttttccatagttaaaaaaaaaaagaaactatttttcaataagtcactcgttatttttttctttatcggacatatttatttacacgcgtacgtaaactggtccatcaaaataacagaaataattagtgacataactaattaatttaaattttccatatgcaccaccatataagatataaataaatgttttagttttaagaacaaaatagaccgcaaaattcagaaagttgtttacatgtttgaagaactattttgagttttggactttggtttgaattcttctggcttacaagaaaataaaatattgttgacaaatacaaatatatatttctatattatatacataatgtgagctaaattcatgaatatttgcacaatgtcaaagtcagattatactaatattctattagaaaaatagtctaatcaagtagcaatgagcaccaattccacggtgcgacaccatattaaagtttatagttaaaattgatgaactattctactttttatcaatttaattaatattcctcaaaaaaaaatcaatttataattaatataagattatccacgaactttcatcattcttaatttcctagcatattgataactcgtcgtacctagaaaaagtcaaatgttatacaatgatatgaactgaaaaatcacattaagttataattggtatttttcattgattgaagcattaatatcgtgtgtgtgctactagcagaattagggggtaaaacagaatttcgttaagaaaatgcattaattaaaaaataagaaagatatatatatatatacatatatatatataagagtagattataaatgaaaaaataattaaggattaaaaataatgataataataatatgtataagatgggtaacctaactttacttggacggtcgacaaaaaaaaaaaaaaactttacttggacgagtatagccgacaaattcattattgggaagtgccaaaacaaataacaaagctgagaccaaacctaatgaaacgttacacataaactttcttaatccattactccaaagattttaggttattgttgacgaatcgtattcacccatatcatttttttagtttctacccacttttattgtacttctcctttgtgtgttctcttgataattctaatgttacgtcaggtaaccaaacaaaaagtgatttaaaaggtgagcacccattttttacaactgtttcgaccacatattgcaatttgaataaaaatcgggtaaaataaacctaactacggacttaagacttttgattatatctagcgatatagcttgaccgagtcttaatttgtgatgtaatgactgctcaaaatataatagtttgaattccggcttttaacaccatgcatggtataaatcagtaacatttgttatcatggtatagtgacatttatatatatagttgttcttattttagtattttaccctaatatataaatatattcgtacactttagtttcaaaatgattttacttccttttttctcttatatgttttattggtacatcagtttatcttgaaagagaaagcgcgatatgatatattataaaactctaggaaatactttgtaatctatatagataactgtgagttaaagctcgagactaattatggatgtaacgagttattggtacggatgaatcaccttgtttaaaaaatttcgaaaataaagtatatgcctaagcctaactctttccaaaaagtactaaattaattggtgaatgacatcaagagaaccaaacctaaacaagatggtggggatcactatccatatgtatacgaagaaaaaaaaataactaaaatatataatacataattaaataaatgaataaaacatcaagggccaatgtgtttctatgataaggaaaaggaggctgaaaattagtgggtaaaagtaaaactgtcttgtggtccgttatttaaaggcacctcttaatcactttctaattactattcatactaatttcgtctcttttttttttttttgtctacaataacgtacgcttcatgataaaaatattcatgatataaaaatctaaaataccgatgccgactgaacccaatgataccagaaaaagaatggagaaagctttaaatataatatttaatttatattcatgatacgataattccatcttctaccaaatataaaatcattgaactttttcgggaacttttctcttattagtgggaagaatagtagcaagtgccaagtgagatgctcatttggtcaacctttgcaagtaagaaaaataaaagtagagagaattgtgccatcataatttcccacattattttttttttctttcaggaaaagaattaccaagaaaataaaatcatttctttaaaataatataaatcattcctttgattaataactattagccatccacccacccatcaatttcttaaaaatataaaataaaaaaaatacttttcttctccttcttaagaagccccattggcttcatctcctcccattatcttctaaactcatttccttttcctctcgaaatctcaaagatagataaattttaaaggcatatttttttcatttcgactcagatg

SEQ ID NO: 12270 - DNA, 3000 bp, Unknown
  misc_feature (1)..( 3000): cDNA_ID_2708623_gDNA_ID_2214540_Annot_ID_134456 3000 nt of promoter + ATG
cccatttctgtaatctaactctaagcaaaagccatatactgattttcaagaaagtaaaaaaaaaaagcagagtactttagttgtttttacagttcagacctgagtttctacagtactgaagataaggtgagacatctgatttgcctgaagcagaagagaagctaagcatgtgttcttgtcctttacgaggatcattaatagtggtagatctcagtaaagggatgccttgatgaaacgacagcgttttagcagaggcaggggaagaagagaatccatcagttgatgttcgtgagagctttgaacttctccagcaatcttcaccatcgaaaccggatctttcttgcttgttactgaaaccagatccgagttcagtttgacccggagaagaaacggtttcatgaccagaaacacgaactccaagatccataaaaaatggattcagaaggagacaaagaaaaagtagtgctaaataatcacttcagagatttttcccatgggaggtaatcgctttgagctcagtgaagaagagaaccgagagagagagagagacagagggagaagaacgaggctaagtttttttattttattttatactctagatattatttttattattttggagaaaggatatttattatttaataataacaaaaagtaataattgtgggagtgagagatatgatatagctttgggtggagacaaagaatggtaccgaaaacacaatcaagatctcggacatgttactacaaagaaatgaaaactataatcagatgctctacgtatgattttattttgatttatgtattatttaagattttaataattttgtggttacttttgtgatatgagaaaaataattatagaggaagcaaacaatgaactttttaagataaaagacatgtggacaccacgtgagacatgtctctctagtttcaacttcaaaccctaagaaaggaattttcatttgctttttgctttttgctctaaaatttgttatggtatgcatttttaccaaacgttgcaaagggaaagatggggtatactttaagtgagattttagtatgaaagaagttagagaatgagattgtcgtattgaaataataaatatagtattgagttgagtatcaaatatctatcagattcacgtggttcccaattgtatttggactgtctaatggtgttctccaatgtaccccagctgattatagttacatgggccatttatgtttttcaatcctatctcttgggtttaagttttattacaacttttttttttcaaatggccttatcccttatgtaacataagtacataagtacatcatattcatcgctagtgaaactcatatcaattaggttatgaataatttgtatttgaaaccttaaatcagaaattagataagattttaatggttatataaattatatgagtcagttcattttttgccaataagttttgaatcggaagtctataatctaatatgatattagaatatgatttataattcgtgtctatcccaatcgaaaatcggttcgatcctagcaaaaaaattttagacagcagattttgcaaacaattctaggggcattactttgaaaaatgtgcatcttgagttttgcattcgtatcaaatgttcagaaattcaaattcaccttacctttctattttccaaaaaggttaaaatgatttttttttttttaatttgctttgaaattaagaagttgggcttttcgattcacataagccttttcgtcgtaatcaaatattaaaggtgcctagaagtctaggatgggagctggatccaaactatactaaaaccatgcacgtgataacctgatacccacctcatatgaacccaaaccatactagttctttctaagacaaacagaagaagaaaaaaaacacttgcctttaagctaatagctaatggtttggaattaaacaatagaaatatttactacgttaagttgacaacgtaaaaacaaaaaatactgttaacttatattagaatatttttttattagtaatggaatttttattaacagtttaaaatataattattacccaaaacaaaaatgtttttatatttttgttgatttataaaatatcttatgatttttttttatcaaatatcttattagtcataaatataaaatttaatagatattaaaagtttactaaaagaaaaataattattagagtcatatcaatatttataacaaaaatgaatatcttttgttaacataatcaatttgtcagttaattttgtggaaccctgaacacaataaccatttaaaggttaaaagtagcaatattgacaactaaacgttttattataagaattcaaaaccttaaaggtataaactgcaagtttttgctctattagattatttatgggattaagaatatacatttgataaaattaacaaactattttgttattttttcattcaaaagaaaatttattattactcaaaaatacaataatgttacactcccatcactagctactactactaaacagaaattcagtttggtttcgagtagatccatttgatttcaagtactttggatataaagatttaagatccaatcaattatttggtttggttttttctggacttgattgatccggatctctccagattcggttcgatttcaagtacctggaatattaaaaaataatttaaaaatagtaatttttttttataaaaaactaaaacttcgatttttttttttttttaaatataaaagtaattactttcctaagtttatggttttagtttttggataactagactacatcaaatttaaatataattattatattggatatctattcggattttattccgatattttgagtataaaagtctataatcctttggaataatttatcggtttggagtcaattcagaatttttcttttctcggttttagttcggttctagatatttgatctagcaatattcgtttgtcttaaactaaacaaaaaattatg

SEQ ID NO: 12271 - DNA, 3000 bp, Unknown
  misc_feature (1)..( 3000): cDNA_ID_2708619_gDNA_ID_2214540_Annot_ID_134457 3000 nt of promoter + ATG
ccttgccgagagtatgagcaagagcggaaccggcgacaccagctccgacgatgatcacatcagtgccagaatcaacctccgtttcaagatttttggatacggtatcgttttgggaaacgacgagtccacgattcttcttattcttattactactccgacgcaaaatgtagagaagcagaaacgtaaatagagaagctataaattgatccaacgcaatcttcgccggtttcatcatcaccgtggagttcacggcggagagtttgagtgtctgcgccgccgttgctttccatcggcgaatgtaggtggctccggtggtgaatcgacgagtagagagagagaatcgagaagaggggcgatgatttgtgtagagaagcgaagatctaagagttgattgaaatcttggaaggttcctgattacgaatggtttcataattttttgtttagtttaagacaaacgaatattgctagatcaaatatctagaaccgaactaaaaccgagaaaagaaaaattctgaattgactccaaaccgataaattattccaaaggattatagacttttatactcaaaatatcggaataaaatccgaatagatatccaatataataattatatttaaatttgatgtagtctagttatccaaaaactaaaaccataaacttaggaaagtaattacttttatatttaaaaaaaaaaaaaaatcgaagttttagttttttataaaaaaaaattactatttttaaattattttttaatattccaggtacttgaaatcgaaccgaatctggagagatccggatcaatcaagtccagaaaaaaccaaaccaaataattgattggatcttaaatctttatatccaaagtacttgaaatcaaatggatctactcgaaaccaaactgaatttctgtttagtagtagtagctagtgatgggagtgtaacattattgtatttttgagtaataataaattttcttttgaatgaaaaaataacaaaatagtttgttaattttatcaaatgtatattcttaatcccataaataatctaatagagcaaaaacttgcagtttatacctttaaggttttgaattcttataataaaacgtttagttgtcaatattgctacttttaacctttaaatggttattgtgttcagggttccacaaaattaactgacaaattgattatgttaacaaaagatattcatttttgttataaatattgatatgactctaataattatttttcttttagtaaacttttaatatctattaaattttatatttatgactaataagatatttgataaaaaaaaatcataagatattttataaatcaacaaaaatataaaaacatttttgttttgggtaataattatattttaaactgttaataaaaattccattactaataaaaaaatattctaatataagttaacagtattttttgtttttacgttgtcaacttaacgtagtaaatatttctattgtttaattccaaaccattagctattagcttaaaggcaagtgttttttttcttcttctgtttgtcttagaaagaactagtatggtttgggttcatatgaggtgggtatcaggttatcacgtgcatggttttagtatagtttggatccagctcccatcctagacttctaggcacctttaatatttgattacgacgaaaaggcttatgtgaatcgaaaagcccaacttcttaatttcaaagcaaattaaaaaaaaaaaaatcattttaacctttttggaaaatagaaaggtaaggtgaatttgaatttctgaacatttgatacgaatgcaaaactcaagatgcacatttttcaaagtaatgcccctagaattgtttgcaaaatctgctgtctaaaatttttttgctaggatcgaaccgattttcgattgggatagacacgaattataaatcatattctaatatcatattagattatagacttccgattcaaaacttattggcaaaaaatgaactgactcatataatttatataaccattaaaatcttatctaatttctgatttaaggtttcaaatacaaattattcataacctaattgatatgagtttcactagcgatgaatatgatgtacttatgtacttatgttacataagggataaggccatttgaaaaaaaaaagttgtaataaaacttaaacccaagagataggattgaaaaacataaatggcccatgtaactataatcagctggggtacattggagaacaccattagacagtccaaatacaattgggaaccacgtgaatctgatagatatttgatactcaactcaatactatatttattatttcaatacgacaatctcattctctaacttctttcatactaaaatctcacttaaagtataccccatctttccctttgcaacgtttggtaaaaatgcataccataacaaattttagagcaaaaagcaaaaagcaaatgaaaattcctttcttagggtttgaagttgaaactagagagacatgtctcacgtggtgtccacatgtcttttatcttaaaaagttcattgtttgcttcctctataattatttttctcatatcacaaaagtaaccacaaaattattaaaatcttaaataatacataaatcaaaataaaatcatacgtagagcatctgattatagttttcatttctttgtagtaacatgtccgagatcttgattgtgttttcggtaccattctttgtctccacccaaagctatatcatatctctcactcccacaattattactttttgttattattaaataataaatatcctttctccaaaataataaaaataatatctagagtataaaataaaataaaaaaacttagcctcgttcttctccctctgtctctctctctctctcggttctcttcttcactgagctcaaagcgattacctcccatgggaaaaatctctgaagtgattatttagcactactttttctttgtctccttctgaatccatttttt

SEQ ID NO: 12272 - DNA, 3000 bp, Unknown; identical to SEQ ID NO: 12270
  misc_feature (1)..( 3000): cDNA_ID_2708623_gDNA_ID_2214540_Annot_ID_185213 3000 nt of promoter + ATG

SEQ ID NO: 12273 - DNA, 3000 bp, Unknown
  misc_feature (1)..( 3000): cDNA_ID_3024418_gDNA_ID_2214540_Annot_ID_185219 3000 nt of promoter + ATG
atacaaataaagtaatatatcgagcgagtgattaatgggacattaatgttacatatagaaaaacaaaaaaataagttattgcctttatacaacaaagttcccaaaattttgaattttttgtaatcatctctaagattctgttaatggtctcgcctgagacatcatcatcacattaccaatcatctccaatggcaaaatacgccggaacaagaaccagaccggttgtatgtatctccgacgtcgttctcttccttggcggagctttcatgtcactaatcctcgtctggtctttcttctccttctcttcaatctccccaaatctcaccgtgaaaaacgaagaatcctccaacaaatgttcttcaggaatcgatatgagccaagatccaaccgacccggtttactacgacgacccggatctaacctacacaatcgaaaaaccggttaaaaactgggacgagaaacgaagacgttggttaaatctacacccttcgtttatccccggagctgagaatcgtacggttatggtaacaggatcacaatctgcgccgtgtaaaaacccaatcggagatcatttgttgcttcgattttttaagaacaaagttgattattgtcggatccatggtcatgatatattctatagtaacgctcttcttcatccgaagatgaattcttattgggcgaaacttccggcggttaaagcggcgatgattgctcatcctgaggcggagtggatctggtgggttgattctgatgctttgtttacggatatggattttacgccgccgtggcgacggtataaggagcataatcttgttgttcatggttggccgggagtgatttataatgatcggagctggacggcgttaaacgccggagtttttctcattaggaattgtcagtggtctatggaactcattgacacgtggacaggtatgggccctcttattgttttgtctttttaaaaatagtttaaaaccctaataagtaggcattgtctggtttggtttagatatttttaaaccaattatggttcggtttaagatgagaatttagaatttcggtttcatttcagttaaatttagctcggtttggtttataaaagacgaatttggttcgatttaaggtaatatttcggtatctttcaatattttcgactaaatttatataaaaatgatcaaaattctgttaatttcagttaaattacactatatttcaatgatattggtgcatttttgacataatgcaataattttcgataaattatgacaaaaatttggtaatctcggttcaatttagctcggttcgaggtttttaaccgaaccagtaactgaatgtcatgtttcctcttattggttggtttagaaaataactgaatctgaatcaaattaaccaaaattttgatttatctcatgcaggtatgggaccagtgagtccagagtacgcaaaatggggacaaatccaacggtcaatattcaaagacaaactcttcccagagtcagatgatcaaacggctctgctttacttactctacaaacacagagaagtgtattatccaaagatatacctcgaaggagacttttatttcgaaggatattggttagagatcgtaccgggtttatccaacgtaacggaacggtatctggagatggaaagagaagacgccacgttgcgtagacgacacgcagagaaagtgagcgaacgatacgctgcgtttcgtgaggaacggtttttaaaaggagaaagaggcgggaaaggaagcaaacggagaccgttcgtgacgcattttacgggatgtcaaccttgtagtggtgatcataacaagatgtacgatggtgacacgtgttggaatgggatgatcaaagccattaatttcgctgataatcaagtgatgcgtaaatatggtttcgtacactcggatctaggcaagacttcccctcttcaacctgtaccgttcgattatcctgatgagccttggtgaaataattgtgttttgttgttttataaactctttagatgtgcttttataatgagttgattattataatccatgaagtgaaaggtttataatgcggaatctttttgaataattcaatgattattggtttatttgattgaaatattattgtagtatgtagggcaaacgagataaagtaaacaataattagaggtaattttaagaatttgttttttccatagtaatttatgctgagtgagattggtgattggacatattattgtggttcacgaactaagtgttgtggaaacaagtagagtagtcaccgtaagtacttgttgaacacatctctcacaatttctccaattatatgggaaacatttatgtttgtaatgaaatatgtcatatgagttatacacgaacctcttttgtgtttgtaatcttctattttatggtttgtaataaaacgcctttggtggcacttgaacttatttatgggattcttggaaaatgcatttaaaatcttcttcctaatcaaaaccagagataatgtattggattagcttgtcatcctaatatgtgtgtgtgtggttatgaagaactctatatgcttttggtgatttggttcctttgatggtggttgatatttccttgattatatacccaattcatatctctaaaccaagtgaatattttatttttgttttaacgcatctccaagtaaatgtttttttattcctaaagttttctctaaagaaaaaataaatatatatagaaatctgtattaacgagtaattttgggtttaataatactttttaatgttaggttttagttggtaacttcataaattaatccaaattttttgagattttctttgaatgttattatctcaatactctcttactttctttggtcaaaattatctcttttaaatgatttttttatcctgtcacaaaaaaaaacatatccttgttttatttagctttggaaaaaaaaacaagaaacttgatatatcttttcagacatcacatactctgcttcaatg

SEQ ID NO: 12274 - DNA, 3000 bp, Unknown
  misc_feature (1)..( 3000): cDNA_ID_3024414_gDNA_ID_2214540_Annot_ID_185221 3000 nt of promoter + ATG
tcttggctcatatcgattcctgaagaacatttgttggaggattcttcgtttttcacggtgagatttggggagattgaagagaaggagaagaaagaccagacgaggattagtgacatgaaagctccgccaaggaagagaacgacgtcggagatacatacaaccggtctggttcttgttccggcgtattttgccattggagatgattggtaatgtgatgatgatgtctcaggcgagaccattaacagaatcttagagatgattacaaaaaattcaaaattttgggaactttgttgtataaaggcaataacttatttttttgtttttctatatgtaacattaatgtcccattaatcactcgctcgatatattactttatttgtatcagatttttatttgacgtaattgtgtttgtgaaaagtaaatgttgtcaaaaaattgaaattgaagtgtactcacattaatagttttcgtgtttcgattggtaggtttataactgctagagataaggtttttatatgtcagaattgtcatgtgatagtgcttttgttctggtagagaaacttgaacaacgtgagtgtgacgaaccggaccggtttgtttcaccgacactgattgtaaaataagattggtgttggtttctacgtgtcggtaagccggtgttccggttaagcaagggcacgtgagtttgctgcgataattttagggtgcagaagattactatctcacccgcaatttcagcttttaatgttgaaaattgcactgctttaagtttattttattttattttatttgagttgggtgttttataattgaaaataactactatattggaccgatatactaaagaaaaactctaaaagctagcttaagaaattttatattgatgacagtcacgaagagcgcatctttatgcccatcacaattaatgaggaggcacaatatacgaagccattatacaaaaatatttaatattcaatttcggtaaagattaaaacttagtatatgattaaagctactcaaaccgacaaacatttacatagtccaagcctttaacgtggatcaggattagatcttaagaagagtcagattgaatctatgtcatgaatatgtatatagtacgtagttatatccctaatgcatagtcataggcatttgatatcataaaagtataacacagatcgtatagaattataaacactaactaataactttaacgtcacgatcctactttttttatatttcctagaaaaggatgataattagccatgttcatcaacgctagtaaataccgacaatagataggttgacaaaatcgtgaagaatatgacgcaagtatagttttcggaaacactaacataaaaaaactgtcgcccaaaagtaccagtaatagtaccaattcacttgccttagttaccattatcaaaaaaccgtggtattgtcatctgtgattatgcaattggataatgttgatattctacaagagttagcgagtctagcaagttctcatattggagacgggtttttgtttccgtttgcatgcaacctagatttttttaatagtaaaatgtggtatttatatttatatttaaaaaaatattattttgtctaaagaaaatcaaatatggagctatatatgatatctgattcggaaaacttttttttttttgtatgaaagttacgtttataccgttttcatacagaattttaggaaaaatgatagaagaaaaagactgaaaactataagaaaggaaacaaagcaaagaaaaacggaaaatgctttaccaaaacatgtcattattgtttctaagagagagaatcttttaaaagaaacgactataaagagattccattacgcacacctgacaccaccaactccaaggcaggcaccaaccattgagaaaataacaaattgtaacttttgcctttcttaactcatttggtttagcatttggaaggaagtgataatcgcgaggtttgagatatttatatccaaaagacgcgatatagtctcttcttgggttttgtatttgttccttagttctttgcttcgacatccgatattcatatagcacaatcaaatcaaacaggcttagattttctagcaaaagtaacgttaacctttggttaaaggttgtcttcggttattgaataaaccaactgagatctcggttaacttgaactgaactgggattggtggcattagagtttttagatggattttggatagtatatgggctcgactctagaagctgggccaagttggttataacttgcaacataattgggaagaatatcagttggactacacttcactattagtgatgagtagaaaaatattggtttagtacagtttttacgttggttagatcaagagttaattgttggtgtagattagagatcaaggtcattagaaattgaacatggatccctaatctttataacaaaatataattaagagatcaattttcaagctctagttacttttttctatttttcttatctttatcaaatgaaaccatatagtagattgtttttgtttggaatgcgttttcaatattagtccaattatattttttagtccaattaaccaacaaaatgtctgtaatattagaccccaaaaaaaggggaaatacatttttattaaatacaaaagttttttaaattattaaactacatgaatttagatatttgtaacttataagtattccataattatccgatggtagaaaaatcatatgagattctattttcatctaatcatctggctttcaaatagacacccattatcacaataaccatccaaattgaatctcttatcgctctattatctcattacacattttcttataattttctcatattctctttttttgtctaattataattatttgtttcattgatttatcacaagagtcttcgaacaagagaaagaaaaagaatcccattttttaatactaaagtcaatcacctatcatttgattttgatcttgtacaaaataa

SEQ ID NO: 12275 - DNA, 3000 bp, Unknown
  misc_feature (1)..( 3000): cDNA_ID_2708610_gDNA_ID_2214540_Annot_ID_185223 3000 nt of promoter + ATG
aatgattgaggccaaactatctcccggaccttctatttacaatatacgccgacatggtgatagtagtcgtttgcatgaaacaggcgttagggtcgatactggtaacttctttgcagcaaaggtgagtttttcactttgttgatatgttaggttggatgtagattcttgtcatgttcgatctaattaattgtcatggcagagaagaggtgttgttgatggtgttgattttggagcaactggtttagtgaagaagatagatgtagatcgaatccgtgagaggcttgatagtggttctgtagttttattgaggaacttgggccattccagcaccggagaagtcttaaattgcaagtatgctctctttattggtaataatttacttgctaaatcttgacgacattaggtttttgtcaccctgatattgggacattacttctacactgcagtacctatgaggttgctacagcatgtgctttagctataggagcagataagcttatttgcataatggatggtccagttcttgatgagaatggacatcttgttcggttcttgactcttcaggaagcagatacattagtcagaaaacgggcacagcaaagcgagatcgctgccaattacgtgaaggctgttggggatggaggcataagtagttttcctgaacctcttggttacaatggtatggtgacgactcccaacaatcatattgggagaccgatttgggaaaaactcagtccgacctttcagaatggtgttggatttgacaacggaaatgggttgtggtctggggagcaaggttttgctattggcggtgaggagagaattagccgtttgaatggatatctctctgaactggctgcagcagcgttcgtttgcagagtgagtccttgagctaacccttgtgcctcttttttacatccagctctgattcgttgatttgttgaagggtggtgtcaaaagagttcacttattggatggtactataagtggagtgctattgttggagcttttcaaaagagatggaatggggactatggtggcaaggtatacacaactgttttcactttcgaatcatgcaaagttttgatttttcttacaaaactatggaccattcttgtcacagtgatgtatatgaaggaaaccgggaggcgaaagtggaagatcttgctggaataagacaaataatcaaacccctggaagaatctggggctttagttcgtagaactgatgaggaggtttgccttttagccatatcactagcttagattctacttctttttgtttaggtgttagcatcaaaggataattggtttttggtattcagcttctgcgagctttggattcgtttgtggttgtggaaagggaaggacatattatcgcttgcgcggctttgttccctttctttgaagaaaaatgtggagaagttgcagctatcgcagttgcatcagattgccgtggacaaggccagggagataaattgctcggtataatcacaaaacttttgagcattgtgtttcgaatctactggtaagaaaaaccccggtttcttgactgtgaaattttgcagattacattgagaagaaagcgtcagctcttggacttgagatgctatttctgctgacaacgagaaccgcggactggtttgtgagacgcgggtttcaggaatgtccaatcgagatgataccagaggcaagacgggaaagaatcaatctttcgaggagatcaaagtattacatgaagaagctgttgccagacaggagtggaatttctgttgttcgaacatttcagtatgattcttgagagtgtccagaagcagaaaattcaaacatagagcaaataaaatgtaattgacacagaaacatttagctgaatctctaagattctgctgagttttgaatcaatattttcaggaacagtgaacgagacaaatgtctttccaacgctatagtggcatctatcgatcgctttgagcttctccacgaacgattcctttgcttccgtcttctcctatgttgtcttgatctcgtgcagagaccgtcgtctactctttgtattgaatacactttgccttcaactgctttgtcttctgtttggttcaacttatataaatgcgaacctataaaatgaaaacaattctgtgtgatattgtgaagaagaaatagtttgatcagaatcctcaaagccgacaagaatccgtcgaaatcgcggtttgacttcccggagaattttccagataacaagaaagaaagtacactttcctggaaagaaaaacaaaatcataaacataacttttgagctcgttcaaattgaatcagttcacaaaacaaacccacattcacttgaaactcaccaagtgattgacgcaagcttggttttaatttcttctttcgtcagtttacaatccgatgcagctaatattgcagcagtagaatattaatatacaatcaaatttatcacttatactgtatatgatcccaattctaaatgtgatcagcaaagctctattattggtagtatatatgtgtatattcattagtggagactggagagtgggtgagtaaaataaacgatatgactagtacctcgcaaaacatgacgaaacctctattattacaaagatccttgtttcctatatgaggactttaatttttgatttattaaggtattaattcatccaaagttattttaaagatcctcaattttttttttttttttttttggtagttagatcctcaatatataacctactccttttcttttgtcgaaaatataacctactcctacatttgacgtcaggaaacctctattattgataatatatggtcctacatatgactatagtacaataaaacgccatcaaacgtctattattggtaattaattaagtaattaacttcttttttttgggataaaaattaaagatccttgtttcctaagatgactcgatctttagaaactaagagagaatgaaactaacactaaaattcctacaaaaaaaaa

SEQ ID NO: 12276 - DNA, 3000 bp, Unknown
  misc_feature (1)..( 3000): cDNA_ID_1807898_gDNA_ID_2214540_Annot_ID_185220 3000 nt of promoter + ATG
gtttctttaccgttagcgttggtccagcttcgtcgttgatgctccgttgtcgaagaagacacgtgattgtgtctcatttgcttcggacatccccaagaacctggaggttcagaccgaaaatcggagttttcccaaaccacgccgcggctgagcttgccaacgcacggtcgtggagttctgcaatttgccatttattttgtacaagatcaaaatcaaatgataggtgattgactttagtattaaaaaatgggattctttttctttctcttgttcgaagactcttgtgataaatcaatgaaacaaataattataattagacaaaaaaagagaatatgagaaaattataagaaaatgtgtaatgagataatagagcgataagagattcaatttggatggttattgtgataatgggtgtctatttgaaagccagatgattagatgaaaatagaatctcatatgatttttctaccatcggataattatggaatacttataagttacaaatatctaaattcatgtagtttaataatttaaaaaacttttgtatttaataaaaatgtatttcccctttttttggggtctaatattacagacattttgttggttaattggactaaaaaatataattggactaatattgaaaacgcattccaaacaaaaacaatctactatatggtttcatttgataaagataagaaaaatagaaaaaagtaactagagcttgaaaattgatctcttaattatattttgttataaagattagggatccatgttcaatttctaatgaccttgatctctaatctacaccaacaattaactcttgatctaaccaacgtaaaaactgtactaaaccaatatttttctactcatcactaatagtgaagtgtagtccaactgatattcttcccaattatgttgcaagttataaccaacttggcccagcttctagagtcgagcccatatactatccaaaatccatctaaaaactctaatgccaccaatcccagttcagttcaagttaaccgagatctcagttggtttattcaataaccgaagacaacctttaaccaaaggttaacgttacttttgctagaaaatctaagcctgtttgatttgattgtgctatatgaatatcggatgtcgaagcaaagaactaaggaacaaatacaaaacccaagaagagactatatcgcgtcttttggatataaatatctcaaacctcgcgattatcacttccttccaaatgctaaaccaaatgagttaagaaaggcaaaagttacaatttgttattttctcaatggttggtgcctgccttggagttggtggtgtcaggtgtgcgtaatggaatctctttatagtcgtttcttttaaaagattctctctcttagaaacaataatgacatgttttggtaaagcattttccgtttttctttgctttgtttcctttcttatagttttcagtctttttcttctatcatttttcctaaaattctgtatgaaaacggtataaacgtaactttcatacaaaaaaaaaaaagttttccgaatcagatatcatatatagctccatatttgattttctttagacaaaataatatttttttaaatataaatataaataccacattttactattaaaaaaatctaggttgcatgcaaacggaaacaaaaacccgtctccaatatgagaacttgctagactcgctaactcttgtagaatatcaacattatccaattgcataatcacagatgacaataccacggttttttgataatggtaactaaggcaagtgaattggtactattactggtacttttgggcgacagtttttttatgttagtgtttccgaaaactatacttgcgtcatattcttcacgattttgtcaacctatctattgtcggtatttactagcgttgatgaacatggctaattatcatccttttctaggaaatataaaaaaagtaggatcgtgacgttaaagttattagttagtgtttataattctatacgatctgtgttatacttttatgatatcaaatgcctatgactatgcattagggatataactacgtactatatacatattcatgacatagattcaatctgactcttcttaagatctaatcctgatccacgttaaaggcttggactatgtaaatgtttgtcggtttgagtagctttaatcatatactaagttttaatctttaccgaaattgaatattaaatatttttgtataatggcttcgtatattgtgcctcctcattaattgtgatgggcataaagatgcgctcttcgtgactgtcatcaatataaaatttcttaagctagcttttagagtttttctttagtatatcggtccaatatagtagttattttcaattataaaacacccaactcaaataaaataaaataaaataaacttaaagcagtgcaattttcaacattaaaagctgaaattgcgggtgagatagtaatcttctgcaccctaaaattatcgcagcaaactcacgtgcccttgcttaaccggaacaccggcttaccgacacgtagaaaccaacaccaatcttattttacaatcagtgtcggtgaaacaaaccggtccggttcgtcacactcacgttgttcaagtttctctaccagaacaaaagcactatcacatgacaattctgacatataaaaaccttatctctagcagttataaacctaccaatcgaaacacgaaaactattaatgtgagtacacttcaatttcaattttttgacaacatttacttttcacaaacacaattacgtcaaataaaaatctgatacaaataaagtaatatatcgagcgagtgattaatgggacattaatgttacatatagaaaaacaaaaaaataagttattgcctttatacaacaaagttcccaaaattttgaattttttgtaatcatctctaagattctgttaatggtctcgcctgagacatcatcatcacattaccaatcatctccaatg

SEQ ID NO: 12277 - DNA, 3000 bp, Unknown; identical to SEQ ID NO: 12271
  misc_feature (1)..( 3000): cDNA_ID_2708619_gDNA_ID_2214540_Annot_ID_185214 3000 nt of promoter + ATG

SEQ ID NO: 12278 - DNA, 3000 bp, Unknown; identical to SEQ ID NO: 12269
  misc_feature (1)..( 3000): cDNA_ID_2708633_gDNA_ID_2214540_Annot_ID_185206 3000 nt of promoter + ATG

SEQ ID NO: 12279 - DNA, 3000 bp, Unknown
  misc_feature (1)..( 3000): cDNA_ID_1394465_gDNA_ID_2214540_Annot_ID_134460 3000 nt of promoter + ATG
agaagcaacgagacatgcatggctatgtcctagcgaacatagagtagtagtttatacaagtataccaaagctaaaccagtctcgtgaactatatatatacgtcaacaccgaaactttggaaatgtataatacttgtatagttagtctctgtgtctgatattaaattgtacataaatttctttatgattacagtttttttttcccccgatttatttgacacggtttgggttatatatatgattagtcacacaccgacttgtaatatactctccaatacacgcttttaaatttggtgcgttccaaacggatgataagaacaccatgtcacactaatcgggtagggacgtccactaaccatattgacagttgtatcaactacaactacaccatatataacggtagatccattgcattcgtgtggaatctatagtgtttatatttgcatatatcatgtcaaatgatattttgctaatgtaggtaggtgacgccatagaacttttgaatatattaatatggaatcaatgcttttaagaagtggatggtgattatcatttatcactctatcatcccacgtttcatacacgctgcgacttatattttgatttacttttcttatgggtttggtccaattccaccgctaaacactatgcacaagtgcaaacaaatatttaattaaattcaacttccgatttaatcggtcattcaaatgagactaatgagtccaccaaactccacaattagatacccataaataaaatagaaaattcgaggttatcaacgtgcgataagatccactttttgggttatataataactaaataaatgaacaaaacaaaaatagatttgactaaaatttggctataaataaatttgagtttcaaagaagccaaacccgtcaacacatcttctttaagcatctctctcccttcaaagaaaatatcacaaaaatggcaaacgtctccgctttgctcaccatagctcttctcctttgctccacgctaatgtgcactgcccgccccgaaccggccatctccatctctatcacgactgctgccgatccatgtaacatggttagtctgattcacatgccatgcatgaatcaatttccatatataaacacaaaataaccaatatcagagcttctaaatttttaaaaatatttaacacatcgaataggtttaataaattttttgtaatgtatgatgattactttggcaggagaagaagatagaaggaaaattagatgacatgcatatggtagacgaaaactgtggtgcagacgacgaagattgcttaatgaggaggactttggtcgctcatactgattacatctatacccagaagaagaagcatccttgattttcacttactcatttctaacaaacttttgctcaagattatgtaatttatgtcatccttaattagtatttgtcacatacaagatcaagatagttatgattgtgattatttatatgtattttggatgatatattgtagaactagaagtttgacaataaaaagtttatagtgtcgttgtatgtttaagaagtttgacaataaaaactttatagtgttgttgcatatatgtgttgaaaactcattaaaaacacacacacacatgaagtacgcgtatatttataaataaactataaaattgagagtggattcatggaatcttttttattgaaaatacatgttggcttgtttgattagttgagagactgctaaacatttatttcatataactagcaaagatcgatatatcgtcgtgtacacaaaagtactactgtatatgtttgatcgaatctgaagaaccaaatttatattttcagactgattgtgtatatggtctcgtaatatacaatcatatgataattagccatcactaatgtagtcatgtctttatgctgaaagagtgtagagactctgccgtcataatgcagctgttaactacgagagcgaagctaaatatttttgaaaagctcccacttcaatcgaacggagggaaaaacctcttgcgcatggaatagagtagtcaacaatcatttgtaattgtaatagaaaaaactagtttaattagaaattgagcatcaaatttaaacagctctgtaaaattttctaattgtaataagaaatttttgttatatctgtcttaaaatatacaccaaaggtagacacaatatctcctacaagtgcacattcaacttctagatatagacaaagttccaaacttataataagtttttttgcaaagttattggttataattaagtttaattggtttatcaatgggtaaagtatacagtaaactgattaaacctagctatgtgggttatagatctcgaactatttactcgaagtacattaagttatagaactttcatttcggagaaaataaggataaaacttttattttatagacatatgaactagagttaaaatatatgagctctatctactgatactttttatgagaaaatagaccttttttctaaaattatctttgatgaaaattttgtttggtactccaacatgtgtacaaaagttgcgctagatcaaaacatatgtaagtaacacaacttatgacattcttgattgcaaaattagttaaaatctagttgtttttatattattgttgacacaaaaaaaaatgtcagcatatgaaagcctccgtctgaagcagaaggaacgactctggtctaaaactctaaaaaccctatcttcttcgttctaaacccaaaacacacacaaaacaaaatggtgctacttctccgatatcgatccttaacgataaatctcactcctctaatacccaaatctcaaaaattccacactctccaatcatttcgtaaccctaatttcatctccatcccaaaaatctcagcctccacgaacaatccaacaacaacaacgaatcggtcgatctccgacgcgactaaattcgctaagtcagtgttattcatacctcctggtgtagagattgaggaactaacagatgat

SEQ ID NO: 12280 - DNA, 3000 bp, Unknown
  misc_feature (1)..( 3000): cDNA_ID_1807898_gDNA_ID_2214540_Annot_ID_134463 3000 nt of promoter + ATG
accgcaacaatcccaccagagtctgcaaaattggaatggctctttgtttctttaccgttagcgttggtccagcttcgtcgttgatgctccgttgtcgaagaagacacgtgattgtgtctcatttgcttcggacatccccaagaacctggaggttcagaccgaaaatcggagttttcccaaaccacgccgcggctgagcttgccaacgcacggtcgtggagttctgcaatttgccatttattttgtacaagatcaaaatcaaatgataggtgattgactttagtattaaaaaatgggattctttttctttctcttgttcgaagactcttgtgataaatcaatgaaacaaataattataattagacaaaaaaagagaatatgagaaaattataagaaaatgtgtaatgagataatagagcgataagagattcaatttggatggttattgtgataatgggtgtctatttgaaagccagatgattagatgaaaatagaatctcatatgatttttctaccatcggataattatggaatacttataagttacaaatatctaaattcatgtagtttaataatttaaaaaacttttgtatttaataaaaatgtatttcccctttttttggggtctaatattacagacattttgttggttaattggactaaaaaatataattggactaatattgaaaacgcattccaaacaaaaacaatctactatatggtttcatttgataaagataagaaaaatagaaaaaagtaactagagcttgaaaattgatctcttaattatattttgttataaagattagggatccatgttcaatttctaatgaccttgatctctaatctacaccaacaattaactcttgatctaaccaacgtaaaaactgtactaaaccaatatttttctactcatcactaatagtgaagtgtagtccaactgatattcttcccaattatgttgcaagttataaccaacttggcccagcttctagagtcgagcccatatactatccaaaatccatctaaaaactctaatgccaccaatcccagttcagttcaagttaaccgagatctcagttggtttattcaataaccgaagacaacctttaaccaaaggttaacgttacttttgctagaaaatctaagcctgtttgatttgattgtgctatatgaatatcggatgtcgaagcaaagaactaaggaacaaatacaaaacccaagaagagactatatcgcgtcttttggatataaatatctcaaacctcgcgattatcacttccttccaaatgctaaaccaaatgagttaagaaaggcaaaagttacaatttgttattttctcaatggttggtgcctgccttggagttggtggtgtcaggtgtgcgtaatggaatctctttatagtcgtttcttttaaaagattctctctcttagaaacaataatgacatgttttggtaaagcattttccgtttttctttgctttgtttcctttcttatagttttcagtctttttcttctatcatttttcctaaaattctgtatgaaaacggtataaacgtaactttcatacaaaaaaaaaaaagttttccgaatcagatatcatatatagctccatatttgattttctttagacaaaataatatttttttaaatataaatataaataccacattttactattaaaaaaatctaggttgcatgcaaacggaaacaaaaacccgtctccaatatgagaacttgctagactcgctaactcttgtagaatatcaacattatccaattgcataatcacagatgacaataccacggttttttgataatggtaactaaggcaagtgaattggtactattactggtacttttgggcgacagtttttttatgttagtgtttccgaaaactatacttgcgtcatattcttcacgattttgtcaacctatctattgtcggtatttactagcgttgatgaacatggctaattatcatccttttctaggaaatataaaaaaagtaggatcgtgacgttaaagttattagttagtgtttataattctatacgatctgtgttatacttttatgatatcaaatgcctatgactatgcattagggatataactacgtactatatacatattcatgacatagattcaatctgactcttcttaagatctaatcctgatccacgttaaaggcttggactatgtaaatgtttgtcggtttgagtagctttaatcatatactaagttttaatctttaccgaaattgaatattaaatatttttgtataatggcttcgtatattgtgcctcctcattaattgtgatgggcataaagatgcgctcttcgtgactgtcatcaatataaaatttcttaagctagcttttagagtttttctttagtatatcggtccaatatagtagttattttcaattataaaacacccaactcaaataaaataaaataaaataaacttaaagcagtgcaattttcaacattaaaagctgaaattgcgggtgagatagtaatcttctgcaccctaaaattatcgcagcaaactcacgtgcccttgcttaaccggaacaccggcttaccgacacgtagaaaccaacaccaatcttattttacaatcagtgtcggtgaaacaaaccggtccggttcgtcacactcacgttgttcaagtttctctaccagaacaaaagcactatcacatgacaattctgacatataaaaaccttatctctagcagttataaacctaccaatcgaaacacgaaaactattaatgtgagtacacttcaatttcaattttttgacaacatttacttttcacaaacacaattacgtcaaataaaaatctgatacaaataaagtaatatatcgagcgagtgattaatgggacattaatgttacatatagaaaaacaaaaaaataagttattgcctttatacaacaaagttcccaaaattttgaattttttgtaatcatctctaagattctgttaatg

SEQ ID NO: 12281 - DNA, 3000 bp, Unknown; identical to SEQ ID NO: 12275
  misc_feature (1)..( 3000): cDNA_ID_2708610_gDNA_ID_2214540_Annot_ID_134465 3000 nt of promoter + ATG

SEQ ID NO: 12282 - DNA, 3000 bp, Unknown
  misc_feature (1)..( 3000): cDNA_ID_2711751_gDNA_ID_2214541_Annot_ID_134471 3000 nt of promoter + ATG
ggtcctattgcgtttggtttaagccgaaaacccgagttctccaatttccggttcggtgtaatcccggttaaatatacgcttcacagttttaaaccatcacagtgaaaaagcttcatagctttcttcttcttcttcttgacgatacaacgaggatgatcatcagataaatttccattgattgccaacaaaaatggcgactttaaagccacccgaatctcaattactaaaaaccctaacatcaatcctcacatcagagaaaacccatttcctcgaaaccctaaatccctacattcctcaaatcacacagcctctccttacctctctcctctcttctccttcactcgctaagaaaccagaaaccctagtatctttcttccaatgggctcaaacttcaatccccgaagcatttccatcggattcacctcttccacttatctccgtcgtccgttctcttctctctcaccacaaattcgccgacgccaagtctcttctcgtctcctatatccgcacctccgatgcatctctctctctttgcaactctctccttcacccgaatcttcatctatcacctccaccttctaaagctctattcgacattgctcttagtgcttatcttcatgagggaaagcctcacgttgcgttacagatcttccagaagatgattcgattaaagcttaagccaaatctgctcacttgcaatactcttctcattggtttagtcaggtacccttctagcttctctatctcaagtgctagagaagtgtttgatgatatggttaagattggtgtttcgctaaatgtgcaaactttcaatgttttggttaatgggtattgcttggaaggtaagcttgaggatgctttaggaatgttagagaggatggttagtgaattcaaggttaatcctgataatgttacttacaatacgattttgaaagcaatgtctaagaaaggtcgtttgagtgatcttaaggaattgttgttggatatgaagaagaatggattggtgccaaatagggttacttataataatttagtgtatggttactgtaagttaggttcgttgaaagaagcatttcagattgtggagctgatgaagcaaactaatgtattaccggatctttgtacctataacattttgatcaatgggctttgcaatgcggggagtatgagggaaggtcttgaattaatggatgcgatgaagagtttgaagttacagcccgatgtggttacttacaatacattgattgatgggtgtttcgaattggggcttagtttggaggctaggaagttgatggagcaaatggaaaatgatggagtcaaagctaaccaagtgactcataatatctctcttaagtggctttgtaaggaagagaaaagggaagcggttactagaaaggttaaggaattggtggacatgcacgggttttctcctgatatagtaacttatcatactctgattaaagcgtatttgaaagtaggagatttgagtggtgcccttgagatgatgcgtgagatggggcaaaaagggattaagatgaatactattacccttaataccattcttgatgctctatgtaaggagaggaaacttgatgaggctcacaatttgctgaatagtgcgcacaaacgaggatttattgttgacgaggttacttatggcacattaatcatgggattcttcagggaagaaaaagtggagaaagctttggagatgtgggatgagatgaagaaggtaaagattactcctacagtgagcacgttcaactctttaattggaggtctctgtcaccatggaaaaactgagctagcaatggagaaattcgatgagcttgctgagagtggtttgcttcctgatgacagtactttcaattcaatcatcctcggatactgcaaagaaggacgagttgagaaagcattcgagttttataatgaatccatcaaacactctttcaagcctgataactatacatgcaacattctcctcaatggtctttgtaaggaaggtatgacagaaaaggctctcaatttcttcaacacgctaatagaggagagagaggttgatacagttacatacaacacgatgatctcggctttctgcaaggacaagaagttaaaagaagcatatgaccttctatcagaaatggaggagaaaggactagagcctgatcggtttacatacaacagttttatcagtttgcttatggaagatggtaagctgagtgaaacagatgaattgttaaagaaattttccggaaagtttggatcgatgaagcgggatttacaggtagagacagagaaaaatccagcaacaagtgaatcaaaggaggaacttaacactgaagctattgcttattcagatgtaatagatgaactttgtagtagaggaagattaaaggagcattctagatcttacactagttgaaggagaaactccttttttgtggtttcttttttgtatttcgattttctcaaagcatacttattacttgttacagaaagacattgtaatgtagtttttatgtgatgatgatgattattatgtttagattgattaaaaaattgtgtattaacatatcaggaaactttcaaaatgtcgtgtactcgtacgtataatattttactgacaacaaaagagagaaaaaaacgatctgaattccttttttgtaatcggtgaccggttcggaaggctggaccgatcgggttaccgaattttttttataattttggtgaattgtttccatttttgggtttaaaaccgagcctaaccgtgacaaattctccaaaaactaccgaaatatatcaaaactaccaaacataaaccgaaattacccacataaaccgatattgttttttaaaccgaacttgggttccaattgagaattattttctcgaaacagaacttcatcgttctttctcaaacgtcaacggtcaatgaataggccatctccatttttgtacatcttctgagcttcaacttttctcgctgctctctatctcatg

SEQ ID NO: 12283 - DNA, 3000 bp, Unknown
  misc_feature (1)..( 3000): cDNA_ID_3024477_gDNA_ID_2214541_Annot_ID_185245 3000 nt of promoter + ATG
ttttactaatttatagtttttggagagtgtgttgaataaaagacattgagtgatttatattaaaatgaaatatcctatgtactaaatgtaggttggtacatgctacattaccacaaagtcagttggaaaaaaggcgagtttgcacccaaaatccatattgaatctaaaatcaaatactagcttaatataatttatttaactgaataaaataagtaaaaagaaatggagaaaatattgattaaatttatctcccgctatgatttcaaatcctactgtcgctcttttagatgtttgatactagtttgagtattgtttatctatgttcgggagttcgtttctatcttcatcattaacaaatccatttggcaagtttgtggggtgtttttggttttgaagttcagttttagtaattagacttttaaaaaaaaaaaagttattatccaaaataccctaaaagtcttggaacttaaatgtcatgatcagatcgattacaaaacaatataataataaagcaacaatgaagtgtttaaagaaaaaggtcgattacaaaccaatataataataaagcagtgttcaaagaaagagccaagatagtaataaagcagtgtcaaagaaaacgaagtagagaaagaagtcagaagacgaatggaatgggctacctctgaaaccagtagcggcactgggtggcgagaccggtaaaccaccactgagacccttgaggaaaaaaatcatctgcctcactgttcttaacctgaaagatctccacctaggtaactcaagattgaggttgatgaggagccttatattcttttattatgcagcagcgtagaaagtggagcttgccaagagtagaattcagactaggacgatctaggatcatgattgatctatctccctcaagaagacgatgatggcgggacctcaaaatccaaatgattaagcctacgtctctgaaaacttgtttttctatgtatctggtgccattaatcgatctccgatatcattaggattaccaaaaacaactccgcttgttttgctacctacaaaacccattggttcgtccctgccacatgaggccagatctgaccatgaccaaactgctcttcccaagagcgagctaagtggtcttttaatatattgtcgtgttgttttttcaggagtttttggatcaaacagatccttccagtagttgtaatccttgtactgtgagaactcctcttggggcttccccttggattcccataagacattttcttctttcacctcgacattttgtttatgttaatgcatgatgttattttaaagtatatgcgtttcaacaccaataaattctttcaaatatttataagaactatagttttaaaattgttgaaaaatatgactatagttttttgttgatttttatgttcattttgataaattcatctatttaatataattattattttttatgattagattcatctataactcgaactatcaaatctagtacaatatgaatatttatatatttattattctaatatttcactatcatgatcacatacaacaacaatatatgatatactgatacaatgtatgtagttatattacttatgtgtttagaaatttgtctaacttattgtaacaaacaattttttattctatatattctctcgtcatctagtacacaatcacatcataatatgctagtaatttaattcaacactttaattctcatctctaccatatagtcgtatatatagacagactctcatgttttttttttttggtatgtctaatgtcttggatgactattacgtcaaaaattgtatatcaatgttacaaagttatcagaacccacagaaatatacagaatgaatgtcatatgataaatcaaattcacaaaacgtaataataaaaaaatatccaactaaaattactaaattaatatgaggttaggtagtaaacatttaaactacaacacaagtaactttttaggcattatggatcaatgactatcgataaaaataaaaaataataagtagaatagaataaaagtagtacttgatacattattatgattttttatttattaatatttttagaaaatttatttaaaagtgagattaatggagaatttaacacaacaatagacttttgattttttctcaattagttttactaattttttaattaattaatgtagaatgacacatgtcattttattgtgtgatgatgtgtcactcatatggaaaaagttgggcaactttcatatatatgatttaagttgaaacctaaatttaaacttataaatgacataaatataacgttatttgtataatatataaatcatttaaatatttgagattttaatatataaatttatttataaactaaaaattgtgttattttatggaattatatagttcgatatttaatttaaaatatttagcacatttattaaatttgattttgacatctccagattgaacgatgaaaactttgattatatagtaaaacaataggaagtagagaaaatattatatagtaaaacacagtaacatattataatataaaaaataaaataaaaacttggattgggcctttggacccgaaagagggttttaggctgaatctgggcaagtgggtaagtaaacctacagagagttagcgaccacctcacaagcttcttcgtctccttcacagagctttattcttgccctagagataccgagcgggagattccagattgagagcagcttcgagtctctctctcctcgccgttccttttcgcttcttcaagtttcgttgccagagaggtaagtaccgagttgccaattcgccttttcaatttcaatctgaaattcgccgtatcggaggaatttgactgtggaaccgaattagacagttgccgtatgaataatgtttccattgggagtgactgatgttgaggttgtgcttgttattctactaatctacctttcttttctagattctaggtattgaagttatagaatg

SEQ ID NO: 12284 - DNA, 3000 bp, Unknown
  misc_feature (1)..( 3000): cDNA_ID_3024485_gDNA_ID_2214541_Annot_ID_185242 3000 nt of promoter + ATG
ttcagatttgattaacatctacttccgaataaaaaatttgatttgttgaatccaaacagagactagagggaaacaaaacagcagctgtaattgaaatgagtgttgatattctaagataccatcatcttttactcgagagatcatataatctaaaagaagaaacgaagacacgtttagattgtcgagtttgctatgaagctgtgttcaacttagtcgattttgcagctgcggcttttgtgtagatagggtgaagaacatgaccacctattggatcaacatgaatccatttgcgtcctgtaatcttgcttttctcgaacctgactcgtccttccttcaatgcaaacagagtatggtccttaccaatcccgacatagtctccaggatgaaaccgagttccacgttgacgaactatgatgtttccaggtatcacactctgcaaaatcacacacacacagactaagattgatttgatcatctcaaatgttatctaggtaggtcaatgtttggtttcttacctctcctccgaatttcttaacaccaagaaacttgggattagagtcacgaccgttctttgtagaaccagcggttttcttagtagcccaacgcttcaagaccaaactcaacccacttgaagaaccatctttaacatcccaagaacaagaattacacaaatgagttaaccagatcaaaatatagacaagagattttgaaaacatataccggaaatgctgctgccagtataagcaggaacctcagtgatgagttccctcagactaactcttctgcaaatggatgcagctgagtttaagaaattcattttctgcaagcaacagagatcaattcaaacattaagcattcaagtagaattaatactctatacaaactcaattcagtggaacgcaacgaataaacgaattgaaagcagatccacacgaaatcgaatcctaaagcactctaaatagagaaatttcccagagaaggagcacaaaggagttatagagaagaagctatacaacacagtcacataagagatgataaactctggagataaagaaacaaacttgatttgaaaatcaagcacgcttataagaatctgaccgaaagacgatcaccggagagcgagttttggtttttggatgggatcgtcggctgcgagagaaggagagaggtctccgggagatttttcaagtgagagagaaagaaaaagcgtttggagaaaagagagccgaaccgaaccaaaccaaaccattcggttgtattttttctcaacccaaataggtaggttcggttcggttttcgataacccaatatatttaattaattaattaattaattatattaataatattgtaaataatgtaaatatactagattttaacccgcggtataccgcggaaacaatttattttttaatgttagtatataaaagtttacaaattgtatctaactataaaatatttttattttatagtttacaattattattaagtaacgtcctattaaactcgttccgtcaacccgtcccgtaaaacaaaaccatttattttattaatgttgatcttatttatgatatgtttatgaattattgtctaaatattttgtaattttgtagtaattaaatgctatcaaattatatttctgctttgattattataactcaattgttatagtcatggagaaaagcaatatcaaaaatgataattttgtagtaattaaatgatattaaatgttggaagttttattttagaaaataatcgtgtagttaatgtggagagattttggaaagattgttaaatgtcaaatatttaattcgaagattttctttctaattatcaaaaacaaacatcaaaatccagtggcagccattgtaaataagtccaactacatgatttatttcacaaaatggctgcaaaaatgtatatatagatttatggtatatataaattattcaatttaaaattctgatttgaattttttgtttaatttaatatattatcaaattcaaagttgagccatacattttgctcgaaccatttgatgtggtcaaaacgaggttgatggctcaaaccaacctgagactgtgaaagtggggtgagatataaagggatgggtgatgccattagaaggatttatgcagaggaaggattattggccttatggagaggattgtttccaatgctaatgaggattccaccaggacaagccattatgtgggctgttgcctgttgctgatcaagtcactagtttttatgagatgagattactccaaaatactcctctatagagattctttttttttttaaaagaatcagtgtttcttgttggtttatttctgaaaatcttgtttggatttggatttgatctttaagaaaaataaaacgaggctacagttttttatttatttttaaaatcaaattttggagttaatttggtaataaaatatgtttaccacaaaaatcactaccccaaaattgctaacagcgtcaggtaattaaacgcgaaattgccacgtccatattagtttgggctgggattattttattttgggccacgtttggaacacaggcccacatttttcaaccgcagatgccaattgttatatgtttatgcttttaaccagcttcttgtatttttaattctcgatattgtgcgtgattgataagactcaatatctgttagatttcataagaatgtagtaacattttttaattatttagcctagaaatcaagagaaagttaactatctttgtcacattcgtagttgaacagaagagtgctatcaatcaatgttttcaattattcgaaattgattacaaaatattttaacgaatataattcttattaccttatgcaattttggtttttataataatcagatagatacaaaaaaaaaaaaagaacctgaatccggcgacttggtaagcagatccaacggctgagattcggtgagtggcctggtgggatgtcataaaaaaaaagaaacaattagagacaataatg

SEQ ID NO: 12285 - DNA, 3000 bp, Unknown
  misc_feature (1)..( 3000): cDNA_ID_3024501_gDNA_ID_2214541_Annot_ID_185238 3000 nt of promoter + ATG
agatagagaagctagaagggtacctgactaaaccaatgagaagagtattgcaagtgagcagatttggcttaagctttaatcgaatcatcttctggaagatctgtaacgcaacgtgaggctttccctcatgaagataagcactaagagcaatgtcgaatagagctttagaaggtggaggtgatagatgaagattcgggtgaaggagagagttgcaaagagagagagatgcatcggaggtgcggatataggagacgagaagagacttggcgtcggcgaatttgtggtgagagagaagagaacggacgacggagataagtggaagaggtgaatccgatggaaatgcttcggggattgaagtttgagcccattggaagaaagatactagggtttctggtttcttagcgagtgaaggagaagagaggagagaggtaaggagaggctgtgtgatttgaggaatgtagggatttagggtttcgaggaaatgggttttctctgatgtgaggattgatgttagggtttttagtaattgagattcgggtggctttaaagtcgccatttttgttggcaatcaatggaaatttatctgatgatcatcctcgttgtatcgtcaagaagaagaagaagaaagctatgaagctttttcactgtgatggtttaaaactgtgaagcgtatatttaaccgggattacaccgaaccggaaattggagaactcgggttttcggcttaaaccaaacgcaataggaccctgtcgtttcatgatttttttttttttcattggtaaaaatcatttcattctcaaatgttttggtcatgctacatagtacatacgaattttcgcatgattatttttcttataatttatattttaaaaaaattggatcagtaaagtaaaacagatttctttttaaattaaaataaatttatttgttttaattattattgtttattcttaggtttactgtatgacattcatatttctccaaaaccttattttgcgtagctacagacaaatagaaaaaaataatttacttatttacaagttagaaaatatcttttgcgaaattgaaatgttgataaatgtagtgattatattccaataaaaaaactaactgttgcatttgtgttttcatccctaattacaatataacgtttaagaaatgttaagctataagttagtaaaattatattttatcactaattcacaaacacgaactctagtacaatagcactaaattcgatgatgatacgatagcagcacgaatacaaaagcacttaattcaaagttgtattaaccactagattataagtttggtcagtgataaactaatatttacattagatataagcatttgctattcaattattcagcaacatctaaatctaagtattgaaggagcattatatattctatgtcgacgacaacgaaacgagccaacatgacatgaagctaggatactttatatgttatataagttataaaatgagcttctagaaaaagaagtaagtgtatatacgtatctacagaaatatcttgtagataggtgttgatgtagtgcaaaaaagtaagtctaaagactaaaagtgaaaaggacaagaaacaaaattttcaaaatataaaactaagaaagaaaaacgaacggcgagacattgcctagaacgcgacattgtcactgcaagaggctgtggctagtacttggctctaatgcaaaagtggggcgaaacgatagaccgtcgtagtgacttttgtccatgtcaattgcatcatcatagtgtcctttctataaagtcataataataaaagaaaaaaaaaaaaaagatttatgatactacttagagtttgaagatcatagttctttacaactatactttaagtgaacaaatagcgtatatatacgtatatttattcagtgaaaatatgaatatagtgtatccaaattatcatcttttaatatatttttcctcttcgtcaatttttgtatttgtttatttgatatatagtctttctagagtattggtttctagaagaaacttctgggacattgcttgcttccgtgagaaagttatacgtaacacctgtcttgcccaaatctttgtgattctttttcttcttttcatctaggttttacgtttaaacttacgcatgcatgagtgatattgatacataaggctataagcattaatcattattaatatatgggaaattactcgaagtgtcagctttggattatcactttcttcttcttcttctttttgatttgaaatttgatttgaaggtgatttcactgatatgtaacaaatgagtattttaaaatgttaatctttagataaaaattttttttgtcacaaatataatttaatttaagtcacaaaatatcccacataccttatgatgtctattattaccctatatgtatacgtaatattaaacttttatttaccctagtgtaatggtttttgctatcatcatcgatgtgtctccactctctacctaaattcaactcgataactaagttcgtacgtaaactagaatcagttgaacttacatatacagataaagtattatcagatgacactgttctttcttaatattaatgttatgacaactccactcaaccaatatacttgtaacttaatatgaattttatgtatatttttttttttctgtttaacattaaagatgacactattcgtttccgaatttatcctgtcttgtagctgattaatgtttgacacatacttgtataattagaaataatggttccctcagtttggttttcaaactcgagttttagcttaacttgtgtcgatgaaaataaactgtacacgtatgtattaaaatatttatttaaagcaccaactaaaatgttatgctatttgataatatccaaataattaaatcaatatcacgattcacttcctatatatatagggcttgcggaccgaacaacatatcgtgagaactaagaaacacccaagaaaacaaacaaactttttaaaaa

SEQ ID NO: 12286 - DNA, 3000 bp, Unknown; identical to SEQ ID NO: 12282
  misc_feature (1)..( 3000): cDNA_ID_2711751_gDNA_ID_2214541_Annot_ID_185236 3000 nt of promoter + ATG

SEQ ID NO: 12287 - DNA, 3000 bp, Unknown
  misc_feature (1)..( 3000): cDNA_ID_2711743_gDNA_ID_2214541_Annot_ID_134474 3000 nt of promoter + ATG
acgagtttatctaaggtcctagcgagtgactaaaccaatgatgtggtgtactttagtagctatggtgttccatgtgccgttgaattattggcttgtgatggtgaagcattggggtgttcttggtgtggctattgcatctgttgtgacgaatttgatcatggttgtgcttttggttggttatgtttggatgagtgggatgttgcggaagagagtgagtggtgatggtgatggtgggtctactacggtggtggctcaattgtcatctatgttggagttgtttggggatatgtttggagtggtggtggtatgagattgtgattgtgatgggtggatacttggagaatcctaagcttgttgtggctgccactggaattttgattcagactactagtcttatgtatactgttcctacggctttagctgaatgcgtctctgctcgggtatgtatctctatacttctttgttgtgatatgttaatggtcagaattttagttaaattaaagaagactaagtggtcaaaatttgagtcaaagctacaaagttgatttgagtcatgattagactaatgattagtgattaagtggtcaagatttgagtctagaaaactatttaactaagttgatttgggttttgcatttgaatgttcaaaatcaaattgtggatgaaacgtttgaagtcaacacatgtctttgctttttttttttaaagaaaatttttgttgtgcctatgattgatattggagagagtgagagtaattagattaaattaaagactaaaaaggcaaaagtcttggaacttgaaggtaccaaaacatttcagtagaggcaataacgttttattcaaaaaagatgtacaagttttttatctgttagctggtgctgtaagttttaccgaaatagtgcaaagctctatgaaaaagttgtaggagaaaactgtacaaaaaagttgagagtaaactgtttgtaacgcttttgacaaagtgtacagctttgtaaagcttttcccaatcaaacccatgaacttttattcttgtattgctttctgctatatatattcaaaatatctacaattcatatataaaaaaatgtctatagagaacctatcatgaagaagaatttactacaatttatgtttagcataaaaatgataatatttaaaaaatttaaataatatacctactttacttagaaaaacaacttgtgggcaaacttgaagagtgcttatgatcttgaattgactaacgtaaaattttctactaaatttgataatttgaaactctaatttttctaagttttatatctcctggataatgtatttttcttgataagtttaaaaaacgttttttcttatttaatgtattttttttgctacgaatttttttaattgatttattccttttgctgatttgtagtttgttttaaagtgtatttttctgttgttgaatgtaatgatcaatttggatttttaatatgttagaaataaatcaaattaacatatttactatgtaaaataacaataaatataccttaagattttatattggtcgaatgctatgttagtattgattttcaatattttctaataaacaaatttcatggtcatgagaatgtgtaggtagctttgttttaagcttacatattttaaaatttctagaatttctttttaaaaacatgtctaattattaattcatttgtatttacaatatgtttatccacaatatatttcaagtattgtttattatacctttcaccattcaaatatttataccatatttcatattgtttcctttttatctttcacacattattcagcaacttattttatctaactacatgaaaaatatacaatgacgaagataatcccatcaaacaacaatcactaaacagtaccaacgagatttaccaaaaatacctacggataatctaacgataacttctatttcctcatattaagctgctgagaacctttctctcgataaccccatcaaacaacaatcactaaacagatcttaaacatacttccaataacacccaactacaaattaaattagcaattttactaataaaaatcttaaaccaatgagaaaacaaaattagtagtccccacaaataaaattgaaataaaaactaaaactattaaaataaaaagtcggttaataatgagtaggtgtgaacaaatgagagaggaggaggatcagctttgcttttgttcccttttctcgtctctgcagcttccttgttgtcaacttctggaagcctttgattgattgcaacttctatctccattctcctgctcatttaatattccaattaatagtcaatctcgtcgaatcttcaattttttaaagcttttggtcaaatcaaatgtaatgcaaagacagaccaaaacctcctcttcttcttcttatatacttcctctcctacaaaatctctatttacttccatcttctctgctaaagacctttcttcaccattcccaattttccggtaactctctctttctcatgtgtatgacaaaaagtttatagctttgatcgtaaaattcggtgctttattgttctagctacagagattttttgtgggtctgctttgatttctcaataacgatgttccataataaagttatggttttttgtttgattcgagttattgttgtggcctgtggggattgtttggtacagtggtttatgtatatgttttggtaaagttgtcttctttgtttctctctcttttggtggaaaccagattggagttgttgaactatatgctagtgtttgatttttgtaaccattttgtttattattgatttgaggttctaaagtcttgaccttttttgacataccctgaagtgactttgttgaactcgagaagccacatttgttagtgttcttgatgagctcggttctttctttttttgttattcatgctgataggcttcttgttttggttgtttgtttgcagttcttgtttctgattgaatctagatattgattaagctatg

SEQ ID NO: 12288 - DNA, 3000 bp, Unknown
  misc_feature (1)..( 3000): cDNA_ID_3024485_gDNA_ID_2214541_Annot_ID_134476 3000 nt of promoter + ATG
tatctaggtaggtcaatgtttggtttcttacctctcctccgaatttcttaacaccaagaaacttgggattagagtcacgaccgttctttgtagaaccagcggttttcttagtagcccaacgcttcaagaccaaactcaacccacttgaagaaccatctttaacatcccaagaacaagaattacacaaatgagttaaccagatcaaaatatagacaagagattttgaaaacatataccggaaatgctgctgccagtataagcaggaacctcagtgatgagttccctcagactaactcttctgcaaatggatgcagctgagtttaagaaattcattttctgcaagcaacagagatcaattcaaacattaagcattcaagtagaattaatactctatacaaactcaattcagtggaacgcaacgaataaacgaattgaaagcagatccacacgaaatcgaatcctaaagcactctaaatagagaaatttcccagagaaggagcacaaaggagttatagagaagaagctatacaacacagtcacataagagatgataaactctggagataaagaaacaaacttgatttgaaaatcaagcacgcttataagaatctgaccgaaagacgatcaccggagagcgagttttggtttttggatgggatcgtcggctgcgagagaaggagagaggtctccgggagatttttcaagtgagagagaaagaaaaagcgtttggagaaaagagagccgaaccgaaccaaaccaaaccattcggttgtattttttctcaacccaaataggtaggttcggttcggttttcgataacccaatatatttaattaattaattaattaattatattaataatattgtaaataatgtaaatatactagattttaacccgcggtataccgcggaaacaatttattttttaatgttagtatataaaagtttacaaattgtatctaactataaaatatttttattttatagtttacaattattattaagtaacgtcctattaaactcgttccgtcaacccgtcccgtaaaacaaaaccatttattttattaatgttgatcttatttatgatatgtttatgaattattgtctaaatattttgtaattttgtagtaattaaatgctatcaaattatatttctgctttgattattataactcaattgttatagtcatggagaaaagcaatatcaaaaatgataattttgtagtaattaaatgatattaaatgttggaagttttattttagaaaataatcgtgtagttaatgtggagagattttggaaagattgttaaatgtcaaatatttaattcgaagattttctttctaattatcaaaaacaaacatcaaaatccagtggcagccattgtaaataagtccaactacatgatttatttcacaaaatggctgcaaaaatgtatatatagatttatggtatatataaattattcaatttaaaattctgatttgaattttttgtttaatttaatatattatcaaattcaaagttgagccatacattttgctcgaaccatttgatgtggtcaaaacgaggttgatggctcaaaccaacctgagactgtgaaagtggggtgagatataaagggatgggtgatgccattagaaggatttatgcagaggaaggattattggccttatggagaggattgtttccaatgctaatgaggattccaccaggacaagccattatgtgggctgttgcctgttgctgatcaagtcactagtttttatgagatgagattactccaaaatactcctctatagagattctttttttttttaaaagaatcagtgtttcttgttggtttatttctgaaaatcttgtttggatttggatttgatctttaagaaaaataaaacgaggctacagttttttatttatttttaaaatcaaattttggagttaatttggtaataaaatatgtttaccacaaaaatcactaccccaaaattgctaacagcgtcaggtaattaaacgcgaaattgccacgtccatattagtttgggctgggattattttattttgggccacgtttggaacacaggcccacatttttcaaccgcagatgccaattgttatatgtttatgcttttaaccagcttcttgtatttttaattctcgatattgtgcgtgattgataagactcaatatctgttagatttcataagaatgtagtaacattttttaattatttagcctagaaatcaagagaaagttaactatctttgtcacattcgtagttgaacagaagagtgctatcaatcaatgttttcaattattcgaaattgattacaaaatattttaacgaatataattcttattaccttatgcaattttggtttttataataatcagatagatacaaaaaaaaaaaaagaacctgaatccggcgacttggtaagcagatccaacggctgagattcggtgagtggcctggtgggatgtcataaaaaaaaagaaacaattagagacaataatgacgactatacccttgacgccgctgagctcctcctccttcctcttgccttgttcaatctttctcctcgattcttcttcttcttctgataaagaaaaagcaattcatagacgatcaaaaaacgtaatcgattgaaatcttcctccgatcaccacttcttctccaaggttccaattcggtactcacaaatctgttcgttgccagctcaatgtcattatatattcgcgtagaatctctgtaatagtttttgatgatcttgttagttttttccttcgatgatgaattaatcggaatgtaatgttctattggcatggaatgtcttcgctttgagaattgtttctttattaatctgtgttagcttggaggatgttgttgttgttgttgttgcatcatagttttagatccttactctcttgtaggttattttcattatttttgcactactctctcatcaaaacttttgctttggcatttttttttctagatg

SEQ ID NO: 12289 - DNA, 3000 bp, Unknown; identical to SEQ ID NO: 12283
  misc_feature (1)..( 3000): cDNA_ID_2711733_gDNA_ID_2214541_Annot_ID_134478 3000 nt of promoter + ATG

SEQ ID NO: 12290 - DNA, 3000 bp, Unknown
  misc_feature (1)..( 3000): cDNA_ID_2711729_gDNA_ID_2214541_Annot_ID_134479 3000 nt of promoter + ATG
atcatgtatttgaacttatttacaaggtcatgacactaacattaattatttaggaattaaagatttaaatcttttaaatccttgcttttagagttattatatcattatctaaaaggctcaaaatataaaaaatttaaatattattatttatatatttaaactttataaaacattattaatatttaaacttataaaaggtttaatatatcatactttttaacatcattatataatatatggagtttaaaaaaatctcaattcttccgtcatattttgtgactcaaaattttaaaaatgaacatgtattaaccaattggcgaaaaatgtgtgagtttaacgtcccacatcgactaaaatatttagacaatgattcataaacatatcataaataagattaacatgaggaaaaaaaaaagattaacattaataaaataatggtatttttacgggacgggtttggcgggacgggtttgacaggatgttacttaataactattgtaaactataaaataaaaataatttatagatagatacagcttgcaaaattttatatatactaactttaaaatataaattgtccccgcggtgtaccgcgggttaaaatctagttattttcttatatgtattaataatttaacacatattaatttttatttgcgcttacaagaatttttaatttcatcacaacaatttcttttaaattagtaaagttaaatgattttattttttattttatttttatttttgataaaggaagatcaaagctattttttacttttcgtgattaatcacaatgattttctttgattcattatgattggggctatcaatttgaaagcgagagttaattagtgatttggaattgagataaagatatttgaagctagagagcaaaaatgcatgtatcgattcagagtgatattgatgaagccctatataattgagagatgacctatattattatttggaaactacatagtagaaagtaatcttgcctttgtaaataattacattagaaaaaaaattaagagtaaattaattcacctcatacttggtaattatgaacaccaggatagtagcaccctttgtgatgtataaacgttttgcactgagcatcttttttggctcgggaagttggtctttgttttctcagttcgtggcacatgcttcgttggcttatgcctctttcccagcaactccattttctctttgtggacgacgaaatccgaggcccgatataaggcgtcctgaatttcaagggtttggataagttataaacaagccaaatactaattttgcaatctaattaatttaaataaattattaaaaatgaaaatacatttttcttaaagaatgattgatcaaaataaacatatgaattttattttataaattatgtttacaagccaatgctttcataaatctagattcgtgatccaagcaattctatttcttaaaacataaactatacaataaaaattattttttgataagacaactcaagttttcatattgagtacatttatagacgactttatgttttttctcctatttttttttgttggacttaacatcatattaatttttttctatttttttatttcctcctattagagttttgaaggctgttctataagtctgtagagtgtcatcgagtttggtggaccagtatattcttgaagttccaaccattctattcaagatagtttttatctgtttgttgctgacttcaccttgaccactagtctagagatggtaggctgtcgcaaccttatgctgcactccatacttctttagcaagttctcaaacatcttgttcatgaagtgagatcctccataaccactcttggtataccgaagatggggaatatgatactcttgaatagtttcaaaactaccttagaatcattggttggacttgcaactatttcaatccacttggagacataggctacgacgaccaagatatacttatttccctaagaagatgggttaaaagttccatgaagtcaatcccccagacatcaaacatctcaaactcgagtataggattctttggcatctcattttttctggtgatatttcttatccttcggctataaacttatgaacattcttgaacatggttggccattagagcccaacttgcagtatcttctgaacagttttgaaggttgcaaaatgtccttcataagcagagccatgtcaatgttctaggactccttggactttttcttcaactatgcatcttctgaataaaccatatacgcctttcttgtatatagaaggctcatcccataaataatggttaatatccctaaataatttctttttctgataaacatcaaggctttaaacaaatcaaatactaatttatgcaatataattaatttttaaaagttataaacaaaaatatattattaattttttaaaaatgaccgatccaaatgaacatatgaattttagtatataaattgtgtttacaagccaatgctttgataattctagattcgtaatccaagaaattctatttcttaaaacataaactctacaaaaaaacatattttttttatgggacaactcaggttttcatattaactacatttatagactaaattttatttttctcctatattctttggacaacattaattaatattttctctattttttcaagctaatggttgacaaaaaaaaagaatatttaggagacaaatgaaatttacaaaaacaagaagaagttactattttgcaaactctctcttttaattaacagctttaaaagaaaatagataaactcataaaaagcccataagagaaaacttgaacagaacaaaaaacccaacaaaacccaacttagtagcgtctctccattctcttcttcttcgtcgtcgtccctgtcttttccaaacttttttgctgtgcgtttttttttgtccaaagaatcatattcttttgccctctcacacgagtcatatttacctttttgccacaacaatc

SEQ ID NO: 12291 - DNA, 3000 bp, Unknown
  misc_feature (1)..( 3000): cDNA_ID_2711725_gDNA_ID_2214541_Annot_ID_134480 3000 nt of promoter + ATG
tagttgagaacagtgcaattaccctcgggagactagcattgattcgaccagacttagttgcaccatacatgaagccatggtccatggcattgtcaatgttagttaacctctgtgttggatttgagtgtccacactcttacattttgctccatagatcgatagttacaatacttgcttttcaggttatatgatgtcaataagaacgaagacgcatttatttgctttgtgattcaaacatgtaaaccaagtttgacatttatatataagttgtctgcacaaattcagtttaaagtggatccattagaagtttttgactcactttatttcatatgtcaagccattgcgagttcgcacgtaagtaaacagaaaactaattctgaccctcctagctatatttcaattcaaactcgatactgagatttggaaaaattggtttacacaagtgacacctttttttttttatgtcaggaaataagaagtgaggaaataaaaattggaaaaattggtttacacaagtgacaatttatttcacttttttttacacaagtgatccaacatattttctgtccagtgtttaaccatcttattgctcatatacattagaagtgattatatgtcaaatgattaatgtctttgatttaatctgtcttcaaatgatgggaggaaacttctgagagcaatgtctctctttatgtgaaggaaaggcttgcgagatattaagtgtaacaatgattttacaccggttagtctcaaatcagagagatgtgatctagcttattctcattgcaaacaataactagattgacagagtactttgagcaaaaggtgttttagaggtatttacatttttgaatccaaaatgtgattgtttggatttggatccatggtttatacacaaaccaaattggattaatgagaaagaactctattaatcaagttgcagttttattataaataatagatttcttttatcaacaataagatttaattgttttagtactgacatacagatcgtttcgtaaaaggtcaaattaagtttttgatagaagagaattttttgtcttaaaagacttataaatctgaatccaagccaaaacaagtaaatcagaaaaaaaaaaattaaataaatttgaaaaacttctatagtaaagttccgttaacaaaataaaaataacatatatcgatctatatgtactatcgtcaaaatcctaaggatgtcattaaattgatactttacatttttggtttgttaaaaaacgatgcatattttttttctggaacatacgagaaagcgatgtttgttttaaaataattttggatgaatcaattgagaaggatcaattaatatattcatatcagtatcacccctgagttttcttaaaataatgaaagttgaaaattctatgtagaatttaaggagttaaaacaaacatggaatttaaggagtcaaaacaaacaaatctcttgaactcgttaattgcttaaacaccatgttgtgtagcgtgtcttgtgccggcgagactcgaggctgtggttttttctccaacgtcatcatgtcttttgacaatgaccaatcttccatttcccggattgtccatggtcgtgtctccgatctaccatcttctcgcatatgacattgcgtcttacaacccttttgctccttttattgtttttaatcttgttgtatcaaacattgagaatagtattctcccaaaccttgtactacatttgagttattgaatggaaaaacaagcttttgcccaaagaaaaaaaagacaaacatggataaaagagaagcatgagaaagagagacgctagctttacacttttcacaattttaggattttgaataaacataaaagattttgaaaatttagggttctataaacaaacatcacaatgttttatgtaagaaaaatgttgttttctaacaaaccaaaacaataacatcataaaatagaatatcgtttaaacaatatatgtttaggcaaaattatagaaaaactattttcttatcttgatacattttttattgataatttaactaaagggtttaaaatggattaaccgacatttgggaagttgttttattaaactaacttacttaagggtttaaaatttagttggaggcttaaaattagataagtcaatagttgaaggttttttcatgaaagtctttttattttgagaaaatactatcatacccattaaaattaatctattaataaacataccattttaattttttttttttggaaaatataaatcttaacaaactaaaccctatttacattttatttttctttctctttaaattagtcgccgcctcctctctccctcgggattctcgctctgattcgcctgtcactgtcagccgtatctttctctctctttcatcctttttctcctttctttcaccccctttctctcctttcgtatcaactgtgggtaaatatattttcctttttcgttcattttcctctcaatttgtaaaatcttatacaagtttgtttatgtaatagtgtttactcaaatatttcatgttattttggtgttagctttacattttttcaatttattaatgcttaaagattgtttaatttaacattagtagaccaaaattggttaactggccttattttgtctatttcagttgatctccagaatttcatggcatataaggcatatgtcttaaaaaagctcaatgaagaagtatctcttacatcatgtaaattttggtaaatgatttttttctgttgttctgttttttttttaatcaaattattttctagcttgtaaaattgcttaactatactattgtttgccaggcctgcatattgtgatgctcagctggaaccaaaggacttaaaggagttattgccacgcctgattccagtaaaatgatacttctctttttcttctactattttttgggcacattctagtagtttgacattttaataaaatttggtttggatttattagatgttgctctcagat

SEQ ID NO: 12292 - DNA, 1294 bp, Unknown
  misc_feature (1)..( 1294): cDNA_ID_2711783_gDNA_ID_2214542_Annot_ID_134482 3000 nt of promoter + ATG
aaaaaacataagctggcggaaaaagagaattcttcggaatctagatcctaaataaagaagatgaagtaaactcaaattataatgcagaaaatatcaaaccaatctcgaaaaaggacgatagtacaaactaagatccatattaacaagacaaaatcttaaaaaaataagagatccaacaaagcagaaactccacttcttttaacacacctgcaagtacgattgatcaaatccaaaataacatttaccacctcctatcacgttgagagccaatctctcgagaaccaaggatatcataacccgacatgcaagaccactaaaagaaacacaaacaccattccagatacgacgatgaccaccaattcgtcacttaacgtctagatagaatccttcaaaaaacaatcagattacgacaaaattgtaaaagaaggacaagaagcgaggcaaaacttctcaaaacccaccaatcacaagatcaccaatcacgagtaaagccacaactattttaattaaatcatacaatatcctaaattaggcttttctttttgataaattaaaaaaaaaaagataggatcatccaacaaaaatagtacaaacaaaaaatgtcaaaatcttgcatcacctctaaaaacctttcatgttaacaaaatcttgcatatttttgccctatacaaagtcttgcatatatacaaagtcctttggtatattgttgttagccaccttatctaactcttttacgggctctgtcctcatgaagaagaacaatttttttaataaattgttaccttaccacatataagcttaatctggaatggttgtgatttaatcaatgaagatattgcctcaaacctgaatagaggagtgaaagtggatttcaattggttggttatcaaacccatcagcatgatacctgttagtttctcggccataccactcaatcattgccataaatatcattgaagtctactagtctgtttgagacattcaactcacacaagtggtgggttattttctctgacaaacacggccaaacaataaaattgctgaaaacaagaagttgcctaaaaaaccaaaggacttgtgagaaaaatggcaaatgcgggctaggatgggctgtggattagaggcccaatatgcctaatgggatacaacacgacgtcgtttagaccagccatagttctcttgtccgccaagacgggagagactaaggaaaagcataagaagagaagaaccaaagaagaagcaaagaagcactgataaatctctgcaactcaacaaatttctgagattagctatg

SEQ ID NO: 12293 - DNA, 3000 bp, Unknown
  misc_feature (1)..( 3000): cDNA_ID_1807247_gDNA_ID_2214542_Annot_ID_134484 3000 nt of promoter + ATG
ctggcgttggtaagtgctgtttatttccccctaccattttccatttcgattggaccactctcacactctgtatgtatcttgtttatcctagtatgtaatggctaatcactacttgtgcatgcgtcttcaaatttcagttagagatgttatgtattgtaacatcatcactccctgttagatatgctgtatatacaaatatggtctttgcatactctgcttggctgacttcaccatcattcacatgtataaactcttatatttgtgctctttcttttgtctttgagaacatactgtttttatttttttccggttttcgttcctgtgtaaaactgatctgtaatcttttataacacaggtataactggagtcctatgtagcaaattttgccgtaaagttatttttactgaccacaacgatgaagtgctcaaggcaagattacgttactgaagatttgatatgggaattcaacattggtagaatataatgaggtcttttaaatgaacttttcagatactgaagaaaaacattgaccttcatggacattcaagtggtcccaaaccctcagctggtgagaaagaaaatcaactaagctattgactctcattgttcatattattgatgtgttctgtttctcatttctacctacagaattagaggctgcaaagcttgaatggggaaatagtgatcagcttggtcaaattttaaagaaacacaatgatggctttgatcttattcttggagctgagatctatatccttatgttcgttaacgaattctttatctatccgctaggacagtggttgatcttagttttatccgtagttgaagttttggtccggatcttctgttcagttttcatcagttaaaccgtcatgggcactcctataatttacaccggaatgaaaaagaaaaccttgacattacgtaagctttcagcaatcaagtgtgccattgctatttgacagtgttgagcagcttctgcggatcaggggacaaggaaactgcaaattcatactagcatacgtatcacgggctagacagtaagtttgtcagctaaaacttttgcatttttctcatataagtataactgcaagtttcatacgagtcagagaataaactatctgaaacgttatttcaggatggattctgcaatcttgagagaaggcgctcagcacgggatgctgatgaatgaagtttctgggactcggtgtaccgtaggaaacttggaaggggtcatatatgaaatcacacttcaaaagaagagaggaattgtgttcgagtaacttagttcctttgatacctcagaattttgtaacattatttttatgttatttagatgcatacatttttggtgaaacgtttactaaagttacagttcaaaaagtatacaatgacatttgtggatgctttgaagtgaatccacattgttagctgaaaaactgttgcaactatcatatctcctttatgatagttgtcatgtccaatttcttgacttcacctacttatcagttttcatgtatatcattctttttgttttccacatcaatggatcatctttatcctgcgtgactttaaaagtaaatatttttcagtcttattttatcttctatattatttttcagttttttttttttatcttttacattatttttcagtcttattatatcttctatattattttcattcttatttttcttttgtcggtattttcattcttattttatattctaaatcatttttcagtcttattttattttccctattatttttcagtcttgttttatattctacagtattttcagtcttattttatcttctttgtcattttcagtcttttttatcttccatattattttcagtcttattgtatcttccatattattttcagtcttattttatttatctcttacattatttttcagtcttattttatctgaaagtgtcatttaggtaggtgcagactgaagatattgggactttagttgatattcgaaaaaaaaagatattgggacttaagtttgcaaagttttactactatagtaatatcgtaagtacgtaaaagatatattttactaatgttttaacaaatcgtttaatatcataaaataaaataaccatgttatttatttttggggaaagtatttaataaaaatacaccacataatttctattcccacaaaaaaatacacgatctattttttcgtaacaagaaatataggcttttttttttactcattttagtatttaaagtttaaaccaatattatttatttaaaacaaggactaccacacaccacttggttagggtcaattttattcaaataaatttccaccatataataacttaagttacactatacagtttactcaattaaaaatttgttgtccaatcagtaaagaaggaaagaaaaaaaacatgttataaattgattgaggtctaaattaaatgttggtcatcttccaactccaaaaggacccctcccaaccagaattagtggagataaacttgacgcgtcccttcttcattctccgtcttcttcacgtcaccggaaaaacgacgaatctcattgcctgagattcttcatcggaattaaacctccggaggaattaatcacggtaaatttcagactcttcgttatctcttacgctgatcgaattcaatagaatgttagggctgatcacaaagagcgatgatttttgcagcacgattctgttctaatcggagaacatttttcctaattttgtgaaattcatgttgaatttattgattttccggataattagtagagaatcgattttggaatttgaatgataatttgtggtatatttgaacatattttttgagcaatggacctgaccattttctccagagaactcaaactattgctgaaaaatgcaatggaatggggtgagacgagcccattctatatggtgcaagagattaacaaacaacactcatttgcatcatccttctattccagtctcacattttttcaccatg

SEQ ID NO: 12294 - DNA, 3000 bp, Unknown
  misc_feature (1)..( 3000): cDNA_ID_3024525_gDNA_ID_2214542_Annot_ID_185274 3000 nt of promoter + ATG
gctcaaaataactaaaatatatgaatgtacatacttatatgtgtctagagtaaatattttttgcaaactaattcattagattgaacaaattatttagttcttttttccacatagtttatgtacaaatatttaattcaaaccgaacccaataaaatttggttatatgtcggtccgaactgagagataaccgaacatagtcaaaccgtaaaataactaccgatccgaaccgcatgttttttggttctatatgaattctaaaccccttaaaacaatttactcaaaatcgatctgagccaagtcgattatcggatgtccacgttagatttttccaaaagaaaaagagtagaataaaatagtcattctcacaactaataaatacctacaatttacatacttgttttgtattattatctttgacatgtgtaatggggacaggtataaatggaccgttagattagagggatactagtctattatatactgtacctattttgattaatttattgattctagcaacattctactttcttctcaccgaatttttccttctactgttttttaattaattatagcaatgttttttttcgaacatttcaaacatgtatttagagtgacttgtaatctagaaatatcaagatgagctggaatcttttgagtcaatttggtctggtctggttctatcattttcattttaggattagaattttcaactcatgtattaatggaagtatgaagtcaattctaacatgtttagtggttattggttagaataaattatgcatcattattggtcataaaagatagataaagtttttaacgaataataacaaaataattaatagaaatggtaaaaaaaaataacagtatacaagtagatattagtctctctctctctttttttttgtctttcaacaaattgttatgtgattacaaatagttttttctttttgttttcaagaaacagaaaataaaaaataatgatatacgatgacgaagtacgggtctggcctgttttgatcaaaatcagatctactctttgttaacattaagagattgatgactagccatcggatccattctctttggtttcatggccgatcatagctgatctatttctttgaattttaagctagcattctattaatgcttttatttcattggtcctctcttgttgtaatctcctttcaaactatgtagataattttttgttgaataaaatttaacattccaaatttccaaccaaaaatctaatatcttaaggtcattttgtttcctcccgagacctttcttcactttaggaggtattgagactcaattcatcaagcatctaatctaacgagacaaatgaaataaaagtttggttgcgggttgatgacttttgaaagatgtgacagtcttgttcttttcctaaaaactaggagtggatatatcgtaaaagtgtcttaagatgccaaagctgagagagtgagtgttgaacaacctgcgttgaatcattgtagttcaacttgtttatatccaacaatattcatagagagacataaccttatgtcattccatttagtttgtagaagtagagaagattcgaacatgcatctttaaataaacgaagaatgggaatttaaagagaatgcaaagaaagaaaagtagagtagaggccaagaaacataaactagattatacatctctcgacgattctacttattatttatctcttaagaaatttatgcatatcccccaacaaaaccaaaaacataagattttcaaatgtaaaaatgtcgatgaaacatacaaaatttggcagtgaaagagtgaaaatcagcttcgtcggccaaagatttgtctgtcgccaaccaaaatattaatattaatggttacaaacaaagtatgggggtttcttggctggggcatggtgctaatcattatccagaaaattcaaacaaactgtcacagaactcagcactcacatttaatgaaaactttgtatttgttcagtcgaataaattaacgtgtagtgtttcaaaatgtgttaaatcaatacttcatcatgtgattgtcttgattttatgagtttatctaactaataaagctattttcacagtaaaaatagaggcaaatcatttggtggaaatagaccatattttcagcatatttctacatcttgattgacttttccaacatcaataaatatgtttttgcagcacagttttcaaatatagaatttctgtggtatgaaccatagtgaatatgtgcatcttatccatatataaactaaaatgtataaaaatatacaatcttgtttaacaatacaatcagactgtaaacaaaaaaaattcaatagatatgattgattaatacatgtgaaacttaggcatacgacttttgagcgaaccgaaccgttcggtttggataattggtttttcgagtatctagttaggagataagactgccaaatttaaccgaacaaaaattcggtttggatcggttcagttatcagttaactcagttcggtaatgtgtctcaaatccatacaaaaatttggtttgtatagcaattttaaagaattttggtattagtttataaaattggatatgatttgtttatattagtttaaaaaattagaaaaaatggttaaaagattgttcgattaaccgtacctaaccaataggaaaagttaccgatcggaccacttctattaatcgactggttaaccgaacactcaaatctcaattaggttctgttcgaaaacacatcggaaatgacgacaggaaaaaaaaaaaaaaacacacacacatcgacgtagttgtagtagaatcgatccaaaaatgttaagtagatattttccagataggattgttgatgaaaggggcagatgaagaatgtgtggctctcctctctttcacaacactccacaaaaccctttgtctcctcctcatttggagatgtcactaactcatcttctctgattcaccaacatcctaaaacccttttgatcaaaacatg

SEQ ID NO: 12295 - DNA, 3000 bp, Unknown
  misc_feature (1)..( 3000): cDNA_ID_2708658_gDNA_ID_2214542_Annot_ID_185272 3000 nt of promoter + ATG
agaacttgtgtggacaccagcaatggcagcatctttatccgcacagattgcaaccatggcatcagatatttatcgtgaacaacagaagggttctgttattgaatgggatgtaccagagcagtcagctggtcaacaagaaatgagagacgagccacaggttattttatttatttaaccctatatatgaatcagagcagcagggaaagagttcctttaagtggaagcataattattgatgaaatttttctctctaggttggtggaatctatgtcaggcgtttcttaaaagatccaaaatttcctctgagaaatccaaaacgattcttggaaggactgctggatcagtatttgtcagcaatggccgcaacacattacgaacaacatcctgttgaccctgagctccctctccttctctctgctgcattggtttctttgttgcgtgtgcatcctgcacttgcagatcacattggacatcttgggtatgtcccaaaacttgtcgctgctgtggcatatgaggggaggcgggaaacaatgtcttctggcgaagtgaaggctgaagaaattggctctgatggagtgaatgagtctactgatccctcaagtctacctgggcaaacccctcaagaacgtgtgcgccttagttgtttacgtgtgcttcatcaacttgcagctagtaccacatgtgctgaagcaatggctgcaactagtgctggaaatgcacaggttctctactctatttctctcctcctactctaccacacgctgttaaaaatggaaactagttgttggtgttacctatgacatgtataatgactcttaagttgattaaacaccaggtggttccacttctcatgaaagcaataggatggcttggtggaagcattttagcactcgagacacttaagcgtgttgttgttgctggaaatcgggccagagatgcgcttgttgcgcagggtctaaagtgagtaatcatgttactatatgataatgtctttggtactcaagctgacgggtgctcacatcttaattatctctaactgcaaaactctgttaagactgctgaagtgttaatctgacagtacctagttacagaataaaattgtggaaaatagtcgtttagaagaagtggatttgggtgagatatatctaattgtctgatacaaatgattgtgaaaattggtagggttggtctcattgaggttcttcttgggctgcttgactggaggacggggggtaggtatgggctcagttctcacatgaaatggaatgaatcggaagcatcaatcgggcgggtacttgcagttgaggttagtgttgaatttgttagcgagatgtttgttatgtgtgttacacatgtgaatgatgaaataattaatatatgtctcaggtattgcatggttttgcaacagaaggagcacattgctcaaaagtgcgtgagatacttgacgcgtcagaagtaagttgtgatattgaaacactaggaataaagtcttgttcaacatagtagttctctgttgttaaaaaaactcatatgaatctgtcacaggtgtggagtgcatataaagaccaaaagcatgacttgttcctgccatcaaacacacaatcagcggcaggggtggctggctttattgagaactcatccaacagtctcacttacgctcttaccgctcctcctccgccttcgcatccttgaccatttcttccttgtatatccttttgtaaagtccaatcattaccgtgcttttttttttctttctatagagaaatactgtcgtttgtaaatgtttgatgagaaagtagaaaatatttgtggtttccttggaccaacaatgaaaactacggtctgatgacaggatttgtagttgttgggtcgtagacgatatccaaacaacttgtccctttatattttgggattaaacttgttgcttattaagtcaattttctccattatctaaaataatctgctcactccgtaacttcttcagctgaattacttatttgaacaactcactccgttggtaataacgtaaaatccgaatcttattccaactaattaagaaagaatacgtaatcttttttaacaatataccaaacagaaagaatgacttctacaagtgtagttgtatttatgcactcgatgtactaaaatcttttctctattaacagactaactgtattatcttatccacttgaacagtttctcgtcagttgccagctcagcttgaagctcctttcttcttccttcctacataaactttcatgcaaatcccatcgatattgagatgggtaaatgactaatctgaaaatcatttacttagaagttataaccttaaaacatgttgttttccacaaacggaacacctaatcgtctacttgtaatagctcaatgccagctccatcgactattttggaaccgtttgatgctgcaaatgattttatgtactatgttcccaacttgtttttagatatgttttttagaattgctcatccatgacatgactacactttcctttctgcatagaatcacggtgaacggctcaattgtacatcgttagagatcttttgtacacttgctttcattaatctacaattttgttaataaattgcaatgtctagaactcaaaccgcatgccttgaatagaagcatgaattaaccctacatcaatcattggtctaatggggcttccactagaaacaattttttcatttcattttggtttggatatatattttcaatttggtttagatagaaaagattcggtttatcttaagcacctccaagaaacagtctacaccttttaagaaatagtaattaatttacatctttaagaatgattcatattgtctctttcttttgactagaattggtgcccaaaatcttatccatttatttcaactctatataaatgatttccattttccagcattgttctttcatcacgtatgacatacccagcaacaattttaattttaaaagagagagattaaaatcaaaaagatg

SEQ ID NO: 12296 - DNA, 3000 bp, Unknown
  misc_feature (1)..( 3000): cDNA_ID_2711755_gDNA_ID_2214542_Annot_ID_185271 3000 nt of promoter + ATG
ctcctcctccgccttcgcatccttgaccatttcttccttgtatatccttttgtaaagtccaatcattaccgtgcttttttttttctttctatagagaaatactgtcgtttgtaaatgtttgatgagaaagtagaaaatatttgtggtttccttggaccaacaatgaaaactacggtctgatgacaggatttgtagttgttgggtcgtagacgatatccaaacaacttgtccctttatattttgggattaaacttgttgcttattaagtcaattttctccattatctaaaataatctgctcactccgtaacttcttcagctgaattacttatttgaacaactcactccgttggtaataacgtaaaatccgaatcttattccaactaattaagaaagaatacgtaatcttttttaacaatataccaaacagaaagaatgacttctacaagtgtagttgtatttatgcactcgatgtactaaaatcttttctctattaacagactaactgtattatcttatccacttgaacagtttctcgtcagttgccagctcagcttgaagctcctttcttcttccttcctacataaactttcatgcaaatcccatcgatattgagatgggtaaatgactaatctgaaaatcatttacttagaagttataaccttaaaacatgttgttttccacaaacggaacacctaatcgtctacttgtaatagctcaatgccagctccatcgactattttggaaccgtttgatgctgcaaatgattttatgtactatgttcccaacttgtttttagatatgttttttagaattgctcatccatgacatgactacactttcctttctgcatagaatcacggtgaacggctcaattgtacatcgttagagatcttttgtacacttgctttcattaatctacaattttgttaataaattgcaatgtctagaactcaaaccgcatgccttgaatagaagcatgaattaaccctacatcaatcattggtctaatggggcttccactagaaacaattttttcatttcattttggtttggatatatattttcaatttggtttagatagaaaagattcggtttatcttaagcacctccaagaaacagtctacaccttttaagaaatagtaattaatttacatctttaagaatgattcatattgtctctttcttttgactagaattggtgcccaaaatcttatccatttatttcaactctatataaatgatttccattttccagcattgttctttcatcacgtatgacatacccagcaacaattttaattttaaaagagagagattaaaatcaaaaagatgacaagaaagaaggtgaaacttgcatggatagagaatgacaacacaagagcaataagtttaaggaaaaggagggtagggttagttaaaaaagtgagggagctatccatattgtgtgatataaaggcttgtacaatcgttttcagtcctaatgaagctgagctaatggtctggccatcagttgagaggctcgtggccttctagatgatttctttgctttaccgaggtatgagcatattaagaaagagatggatattgaattatttctaaatgagaagacaaataaggttaatgaaaagttgataaagagttgtaagaagaataaagagtatgtcagtaatgagttgatgatgcaactacaacgcggtcgtagaatccatgatcttaacttaagtgagatctatacattactatcttactcaagggaaactatcatgtcttttaggaagaagtttgatttcatgcagcattctcctcttcgtgatccaccggtgcttccattcgaggtgcaagtcgaacagtttaagagcaccactaaggacgcttttttagggggtgatctagacgttgagagagctaggaacacaaatgaagcaacaagaataattaacattgatagtttaagggagaataaaagttattacttaatagatcaatggtttccaacacctgaaccgcctaaacctgtaacataccagcaaattgggtatgaaacttcaaaccgtagaggctacaatccataccaaggaagtagtagcaatgggaaccctaatttcgagatgatgtcagtttccccgaagtgatgactttccagggttcggttggatctacctctcaaccattacaacatcaaaacatgaataagaatccaatagtggctatgaatcaaccaagccaatacccttttgatttatgtaaacatttttagatggaaaaggaatttactccttttgttatttttaaaatatttattttcttcgttgcttttcagtaaatttctagataagttttaatttgcttgttaagagtttaatatatctttctttgttgtgattaatattgaagctaagtgctttgctttcagtagtaagaaaaagtttaaaagacatttccatgtatttgtgctaatcttttttaccttcatatataacccaaagatatgtttgacatcttttttaccacagtcatttattaatacaattttcacttgtcaatttatcagtagtatattatttgcttgttaaagggcttgtaattacttatcattattatatgctatctatgtatttggtaatcaatatttatgaatttttgaatatatggaggcctaatttacaccatctgctttagaattttcttttagctaatacataaaaaatgtgagattgtctttttaattttgttccttttgaattgtttctttggggaataaaaaattgtttaaaattcgtttccatttacttgtgtcaatctttttttataatatatacacatgcttggagagagatttagaacatgcacacctttgaccaaaaaaaaaagaacatgcacacctagaaaaatacaaacatataagaaaaaaacaaataatagaaaaagaagcctataaagttatccactcatttatcatctccaccatcaaaatctaccattcccccaaaacaaaatg

SEQ ID NO: 12297 - DNA, 3000 bp, Unknown
  misc_feature (1)..( 3000): cDNA_ID_3024541_gDNA_ID_2214542_Annot_ID_185268 3000 nt of promoter + ATG
aatacactctagtcattggcaaaacttctctagtagcttccgattaccagagcgaaaatccagcctccactgaaagaaacttctcaggtatttttctagggtttttcagttttcaacattccagcttttttctaggttttttattttggctcgttactctgttttggtttctttcgctttcagacaaatccttattagttcttctctgtttacttgtttgttaatgttttatttcagggtctgacaaaattaaatgataaaatcgaagttcagtttacaacaattgggtttttgttaaagatatggacagaatcagtgggttacctgatgaactactagtggagatattacactgtcttccgacaaaagaagttgtatcaactagcattttgtctaaacgatgggagttcctttggttgtgggtacctaaactcacgttcgtgatgaatcactacgaatcagatcttcctattcaggattttatcaccaagaatctgcgattacttaaacctcaggttatagaaagctttcatctccaatgttttagttcatcatttaaacctgaggatattaagcattgggttgttactactatctctcgccgcgtgcgtgagctgattatcaactattgtgatttgtcttggcttgacaaacctgttgtgttattagatttaccaaacagcttgtatacttgcacatcgctcgtcactttgaaacttataggccattccattattgttgatgttcctcgaacggtttctcttccttgtttgaaaactttggagcttgattctgtggcatactctaacgaagaatctcttcgactacttctatcgtattgtcctgttcttgaagatttgactattcatcgagatatgcatgacaatgtcaaaactcttgtgattattgttccgtctttgcttagactaaacttaccgatagacggggcttattcgtgtgatggttatgtgatagttactcctgctttgaagtatttaaaagttcctggcctttatagagaagatttctcgtacttgcttacgcatatgcctaacgtggaagaagcagatcttagtgttgagcaagatgttgagaggctttttgaatcaatcacatctgttaaacgcctttcgttattcgtattactcgacattgaagacgaggtatacttcttataactatcacttacaacggctaaattgttttttcttttcttgagactgaatcataattttttttggttatgtttttgtgtgcagtctatgtatcataatggtatttacttcaatcagcttgaacatctgaacctacatatataccgcgataactggtccaaattacttgttcggttgctcgaagattctcctaaactacgagtcctcaagattgttgtcgatgtaagtttcttcattggcaatctaaaggcactagtcttattaattatctcttttctcacaaaaatttaatctcagggtgaaccatcctttgatgaggagtttgaacatgttagctggatatataatgatgagagctctgttcctaaatgtttgttggatagtcttgaagttttcgagtttgctggatacactagaagaccagaagagagagatttcgtgagttttatcttgaagcatgcttgtcatttgaagtcatcatcaatatcgcgcttatcatgttatgttctagaatagaaacttcgaaatcgatttgttgtaccgatctctggattttaggcttttttttgttgtccaagaacgaagtaggtgtttttctttatctaactgtaatgtggaacttgctttccaatgatcatctctctttgatgactccatatttccttaatcaaccttgaagttttttgttgaactttctttgcgttatcaagtaaaagtagtatgtaggatttgaagtgtaatcaaataattagttaattttaccgtcttaaaaccttcatttactgttttctcgtcgaatttgtttagccgaaagttctcttgatctctctctagaacaatataatattagttttccaaggcttataattcaatttggtttgctgtttgcattcaccttgtgttagtttcttagcttaagtcacaagccaaccttgtattgattccttttcacgaaggttttaactctctttattgccttcatggcttcatgagatacaaccctttaaacccaagttcagaatttatatcacgtacacttcgtaagtgcttctttcttttttaaccatgaaacgtgaaagctgctgcgatgtgtttgtataagatgtttggaggagcttatgattctctattcctttctctcattttttttatgttgtataagatgtttggaggcggaagaatttatacgagtcttcaaggttagagaaatgagaatggattaattagctaataagagataaatattgaagaacgattttgtgatatatatggaatgaaaatcgaagtgttctctctttgaaattattgacaaaaaaaggtaaataagtaggaacctctcgtcttaattatcctaatgaaagtatttgctattttgcgttagagattagaaaaaatagataattttgtctaaaataaggagttttataagaaaggactagttgattgtttgcataattttgttttgtttcagaattgagacttttgggaggaagaagaaagaaatttgttttctgaagaaggtggaggtgccaagagaattatcttaatccttgttcctcctcctcctcttcttcttcctcattggttgtttatgtttttatatataatctaggttttgttagtccaactctatctttctctctcttgatttcaacaacttggtttcaagttcataaacaagagagagaaagaattgttagtctccatgagtaggttatgttatcccataaccccaattggctatctatttatcacctccatccatttatactcctagaaacaacaaatctaaaggcaacacaacacaaatagtaccttctaaatg

SEQ ID NO: 12298 - DNA, 3000 bp, Unknown
  misc_feature (1)..( 3000): cDNA_ID_3024545_gDNA_ID_2214542_Annot_ID_185267 3000 nt of promoter + ATG
atattagttttccaaggcttataattcaatttggtttgctgtttgcattcaccttgtgttagtttcttagcttaagtcacaagccaaccttgtattgattccttttcacgaaggttttaactctctttattgccttcatggcttcatgagatacaaccctttaaacccaagttcagaatttatatcacgtacacttcgtaagtgcttctttcttttttaaccatgaaacgtgaaagctgctgcgatgtgtttgtataagatgtttggaggagcttatgattctctattcctttctctcattttttttatgttgtataagatgtttggaggcggaagaatttatacgagtcttcaaggttagagaaatgagaatggattaattagctaataagagataaatattgaagaacgattttgtgatatatatggaatgaaaatcgaagtgttctctctttgaaattattgacaaaaaaaggtaaataagtaggaacctctcgtcttaattatcctaatgaaagtatttgctattttgcgttagagattagaaaaaatagataattttgtctaaaataaggagttttataagaaaggactagttgattgtttgcataattttgttttgtttcagaattgagacttttgggaggaagaagaaagaaatttgttttctgaagaaggtggaggtgccaagagaattatcttaatccttgttcctcctcctcctcttcttcttcctcattggttgtttatgtttttatatataatctaggttttgttagtccaactctatctttctctctcttgatttcaacaacttggtttcaagttcataaacaagagagagaaagaattgttagtctccatgagtaggttatgttatcccataaccccaattggctatctatttatcacctccatccatttatactcctagaaacaacaaatctaaaggcaacacaacacaaatagtaccttctaaatgcttctatacttgctcatcacttgtctctctttcttcttcttttccaaatctttatcctttcctcaatgggcatctaaaaccaaaaatttgctctccttctacttctccaagtatttgtttacaaacagtctacaccagatcacacccgatctagcctctccggtgctcggaaaaatgtcaattcttgacctccctgaccttccactcgactgcattcttgaacttcttccaccctctgaactatgtaccatggctagggtctgtagctcgttaagagagagatgtgtaagtgatcatttatgggagaaacacttgaagactaaatggggaaaaatccttggaccttctgctcacaaagaatggcaatgctatctatcttctccatatcatctcgattctcctcatcacaaaactagtcatcttggtttggccaaaatcatatctcttatgcgatcgctttcatccatttttcgagatgatgatcataggaggagatatccatcttcaatccctcttgactctaccatgaacttctacctatccctcgaaacaggtcgcttttggtttccagctcaagtttacaaccgtgaggtaatcatagatttcataaacatatatagctactccattttattctttatgggtttgactaaagtagtgagggcttttttggtgtaagagcagaatggacatgtagggttcatgttgtcatgctatgatgctgagctcagctatgacactgacactaatacttttcaagctaggtataaaatatttcatgtccatattcaacacaatattttgcttattcttcatagaatgctataaactatactgtattgaggattttaggtatccaccacatggtaaaagagcaattgcggttgaaaaagacgtgacatgggagaggataagagcagctcccgttgatgcatcaccccataatctctatgtgtcagattctctaaatgagttaaaacccggagaccacatagagatccagtggagaaggaacaaagagtttccttatggtaagtataatctataatgcttgtggtttggacataatatatatgattctaaaacaagcttgtgtaggatggtggtatagtgttgttggacacatggaatcttgtgatggcaatctaaaccattgtcaatgccataatagcggtgagtcctcaactttatatttctgttttggctgtcacattcaacataaaccccctaatcatatggcattagcctttctctattaatgttgtgtcaaaagtatctatgcattcacatgttgtactaaatggtaagtgttgatgtatggtgaaaatagagatgatggtgttggaatttaaccagtacacagtcggatcaaggtggagaaaaacgatgattaacaggagagatcatagagagaaaggtaacgaggaagacgggttctatggaggaattcgaaaaataaattgtaaagaagatattgaaatgtggaagcgtctttggccatcctccatcttggagtaggatgagtaggatgttaatcttagaagtgtttgctcttgtaccaatgtacaattgatctttcattatttattgataaaatagtaaaaatatgcatgaaacttttgtgtcacttgaaaatgaggttgtttgatttgagaagaaatatgggggtggtgttgtatagatatattcaatacaattgatttaaatatatatgtcatcaaagtagattttgttttttgatagtccattctgagaattatttaggtcttaatattgttaaatacattttctataaaatgtaaaacacgctcttgtatgtcaatgtgtattttttttttttttgggtacctgatgttattggatgtatgttgacgggccaaagcccaatttgggatgccttattaatgttaaagcccgtttaaaaaaaatattagataaataaaacattaataaaaaaatagacaaaacacaaaaatgaaactgagagttagttttgctcagtgcttcttcttgtaatg

SEQ ID NO: 12299 - DNA, 3000 bp, Unknown
  misc_feature (1)..( 3000): cDNA_ID_3024551_gDNA_ID_2214542_Annot_ID_185263 3000 nt of promoter + ATG
tcatctaattcattgatttcacttcctttttatttttattaatttcatttatttttatgagccttttcatttaattttgttttgaatgctttttaatttaatttcaaaaatatatctattccacgtttcaaatatatatgatactttggaatacatatatatatatatatatatgtattgatactatgttatcaacttttatgtcttactatatactacagttaatgacataacacatatatatttgtgtttttgtattcgtctaaaatactttttaaccactattaaaactgttttttaaaaaaatagaaaattcatctcgtacatagaataataggatgttatctagatttcttctataaaagggatattttttttattttgttttggaaagtctcggagaaaacgaacttgatttaaaatccgtaaatcgcgttcactgttcaacgattacactaactcaagtttcatagattgacccgataatatttttcaacccatattcaaacctcttattgaactagagtttcgattttatagcattgttgtcaacaatgaacacgatttaaagattttcattgcagttgatgagctagttaaatttttctaattggtatgagtttaatagtttaggtaaaattatgaagtttataattagttcataatgaattgagtagagactaaaaatatatgattatccgagttgagcgcatgtaatatatagaggtgggtatccacatgcaacatagtagctttcgttcatattcaactttcaagtggtgttaaatcacttggccaaaacaaacacttcacaaactattaatgattgctttctttaatcacttggcaacatatcggcaccggaattggtttctcaatgcatataaatatgaatttgaccgcagtgaacatatatatatatatttgtaaaagaaaaaatgatttgtattaattttctgattggtagagaaattcatattattattatattataatcaattgtgtaataaaaacacataatttttattaacaaaacacataatacttttatgtgccgaagttttatgtgcttggagagatctaatgcgcttttggatttgataaccactttctaacccaaaatattgtaattttgtttttatcttttttttttttgccaagattactctactctagatattgcccttgtaatacttttttcatttccaatgatattaacattcatagcaaaaaaaaaaagaaggtatatgacaaacatgcttattcattaggtgatagtttaggatattaagcttgagttgaagttttgatggagcacataccaggagtgtcaatgacattgattattggaccatcttgtattgcagctctgtacatttcacatatcatggtaacgccttttgcctggtttttagatttgaactgctttgtaccaagaagggtgttccctgtgctgctttttccattaccagtacggcctaccagaactatgtttttgattggctctgacatatcgaagaggagaaaagaaagaacgagtttcttttacgttttctagtgtagaacaagaaagaagaagaaatggacaagttaacggacgacacaattgaagcttatatacgaacgagctttctttaccaaatcgcttgctgaaatttatattttcatatttttatatttgctaacaaagaatctcaataaacaaaacaaattcaattggcaattaataatattgatagtgcaattggaatgacgaaccgaaaggccaagacgactttttgaattttgaggagtgagatgactttgactttgtgaattgttaaccactcgctattagattcaatttggatattgaaaataataactataatcatctactaggtttattaaatataatacgattgtccgtaagaaaaaaataaaataaaaataaaaaaaataataatacgattactattacataaagtcggcgagttcaataaactttagcaatcaaaaaccaacgagaaaagatattttttttcttctagagcaacaagtcggtaaaacaaagatattaagataggactccaagaactaaaaaactaagtaaaccatgaagctagaataatccacgaacaacatatccaaaatttcaagacaaaaataaagcaaccactttgtaacacttcatttcgttatatatccaagcagatgagtttaagtttattatcgaacatatgatgatcataaaataacgaaacgcaaaaagattgactcttattgttcgtgatttaagtttattgaagtcagaaaagaaaaggataggaattaattacagtaaaatctttacaaaaattaatatatttcaaaattctattaacgtatagagacattaaattattaataaattaattattaatttatagaaagattttattaatttgataacttttacaaaaattatatttcaaaatagtttttctctttataatcgaatatcagctttttaaaaccaaatataagtaaaaaaataattattaagtttagaaaataacacacctttttcgatatggtaaaaacgttaaaaataaattcaaccaaaaattaatacaaatttttaaaaaataaaaaatattagagttatatttcactaaattattttaaatataatattttacatacctaaattactatagaataatttggtgtgtacatatatgatatatagaataatattttatattcatattatatataaatgatatatgtatatatatattgataagtttatacaattattaatttatgatattaatgagattttacatagaattttcaaaaaaaatattatcttattattttatcaatttgtgtcaatttttacatggatcggaccgaaattttttattaatttataaaatttattaattaatcgaacattaatttatatagttttttgctgtattttagtgtatttttctctcaaaccggttaatatcagataaccgaaaaaacatg

SEQ ID NO: 12300 - DNA, 3000 bp, Unknown; identical to SEQ ID NO: 12293
  misc_feature (1)..( 3000): cDNA_ID_1807247_gDNA_ID_2214542_Annot_ID_185262 3000 nt of promoter + ATG

SEQ ID NO: 12301 - DNA, 1294 bp, Unknown; identical to SEQ ID NO: 12292
  misc_feature (1)..( 1294): cDNA_ID_3024559_gDNA_ID_2214542_Annot_ID_185260 3000 nt of promoter + ATG

SEQ ID NO: 12302 - DNA, 3000 bp, Unknown
  misc_feature (1)..( 3000): cDNA_ID_2708670_gDNA_ID_2214542_Annot_ID_185275 3000 nt of promoter + ATG
tattcactatggttcataccacagaaattctatatttgaaaactgtgctgcaaaaacatatttattgatgttggaaaagtcaatcaagatgtagaaatatgctgaaaatatggtctatttccaccaaatgatttgcctctatttttactgtgaaaatagctttattagttagataaactcataaaatcaagacaatcacatgatgaagtattgatttaacacattttgaaacactacacgttaatttattcgactgaacaaatacaaagttttcattaaatgtgagtgctgagttctgtgacagtttgtttgaattttctggataatgattagcaccatgccccagccaagaaacccccatactttgtttgtaaccattaatattaatattttggttggcgacagacaaatctttggccgacgaagctgattttcactctttcactgccaaattttgtatgtttcatcgacatttttacatttgaaaatcttatgtttttggttttgttgggggatatgcataaatttcttaagagataaataataagtagaatcgtcgagagatgtataatctagtttatgtttcttggcctctactctacttttctttctttgcattctctttaaattcccattcttcgtttatttaaagatgcatgttcgaatcttctctacttctacaaactaaatggaatgacataaggttatgtctctctatgaatattgttggatataaacaagttgaactacaatgattcaacgcaggttgttcaacactcactctctcagctttggcatcttaagacacttttacgatatatccactcctagtttttaggaaaagaacaagactgtcacatctttcaaaagtcatcaacccgcaaccaaacttttatttcatttgtctcgttagattagatgcttgatgaattgagtctcaatacctcctaaagtgaagaaaggtctcgggaggaaacaaaatgaccttaagatattagatttttggttggaaatttggaatgttaaattttattcaacaaaaaattatctacatagtttgaaaggagattacaacaagagaggaccaatgaaataaaagcattaatagaatgctagcttaaaattcaaagaaatagatcagctatgatcggccatgaaaccaaagagaatggatccgatggctagtcatcaatctcttaatgttaacaaagagtagatctgattttgatcaaaacaggccagacccgtacttcgtcatcgtatatcattattttttattttctgtttcttgaaaacaaaaagaaaaaactatttgtaatcacataacaatttgttgaaagacaaaaaaaaagagagagagagactaatatctacttgtatactgttatttttttttaccatttctattaattattttgttattattcgttaaaaactttatctatcttttatgaccaataatgatgcataatttattctaaccaataaccactaaacatgttagaattgacttcatacttccattaatacatgagttgaaaattctaatcctaaaatgaaaatgatagaaccagaccagaccaaattgactcaaaagattccagctcatcttgatatttctagattacaagtcactctaaatacatgtttgaaatgttcgaaaaaaaacattgctataattaattaaaaaacagtagaaggaaaaattcggtgagaagaaagtagaatgttgctagaatcaataaattaatcaaaataggtacagtatataatagactagtatccctctaatctaacggtccatttatacctgtccccattacacatgtcaaagataataatacaaaacaagtatgtaaattgtaggtatttattagttgtgagaatgactattttattctactctttttcttttggaaaaatctaacgtggacatccgataatcgacttggctcagatcgattttgagtaaattgttttaaggggtttagaattcatatagaaccaaaaaacatgcggttcggatcggtagttattttacggtttgactatgttcggttatctctcagttcggaccgacatataaccaaattttattgggttcggtttgaattaaatatttgtacataaactatgtggaaaaaagaactaaataatttgttcaatctaatgaattagtttgcaaaaaatatttactctagacacatataagtatgtacattcatatattttagttattttgagcctaatcataactaaattttctggtttataaatatagttttgaatatttggattatctcaaacataaatataattaacattttctgatttttatgacattgactaatattttctgatattaagatattgatctccttaaattgtttttatcattctttaaagttcattatcttgtttggttccaatttcttgtacataaaccataaatttgaaatttcaattagaaaaataatttccttttatgagatacaatcatacaattgtatttcaagtagttcgaatactcattccgttttcggtttagttccaagttgttataaaagatgaactacactatttggatgtttatgattatctggttcggttcggtatctcttaattcggttatttcggttttagtaatccacataaaacagactataatctcttgcattatatccacatagacctaaataataaacaatttgtttcttcccgctaagtgattattaatgagcctcccttcttctcaactgttatttcactttaacgtacaaaaaaaaacacacacagagagaaagagagagagaaaagtttccgcattaatggtggcttcacctaccagttgtctagtggtgagagattaatgtgacgacgacgacgacacagaacaagagatagagggagaacaaaccaaaaccaaatctacactgcaatctcttccctcatcttctccaattatcatctctctctgattctgttgcgccgccgcggaga

SEQ ID NO: 12303 - DNA, 3000 bp, Unknown
  misc_feature (1)..( 3000): cDNA_ID_2711775_gDNA_ID_2214542_Annot_ID_134485 3000 nt of promoter + ATG
ttgtgtttttgtattcgtctaaaatactttttaaccactattaaaactgttttttaaaaaaatagaaaattcatctcgtacatagaataataggatgttatctagatttcttctataaaagggatattttttttattttgttttggaaagtctcggagaaaacgaacttgatttaaaatccgtaaatcgcgttcactgttcaacgattacactaactcaagtttcatagattgacccgataatatttttcaacccatattcaaacctcttattgaactagagtttcgattttatagcattgttgtcaacaatgaacacgatttaaagattttcattgcagttgatgagctagttaaatttttctaattggtatgagtttaatagtttaggtaaaattatgaagtttataattagttcataatgaattgagtagagactaaaaatatatgattatccgagttgagcgcatgtaatatatagaggtgggtatccacatgcaacatagtagctttcgttcatattcaactttcaagtggtgttaaatcacttggccaaaacaaacacttcacaaactattaatgattgctttctttaatcacttggcaacatatcggcaccggaattggtttctcaatgcatataaatatgaatttgaccgcagtgaacatatatatatatatttgtaaaagaaaaaatgatttgtattaattttctgattggtagagaaattcatattattattatattataatcaattgtgtaataaaaacacataatttttattaacaaaacacataatacttttatgtgccgaagttttatgtgcttggagagatctaatgcgcttttggatttgataaccactttctaacccaaaatattgtaattttgtttttatcttttttttttttgccaagattactctactctagatattgcccttgtaatacttttttcatttccaatgatattaacattcatagcaaaaaaaaaaagaaggtatatgacaaacatgcttattcattaggtgatagtttaggatattaagcttgagttgaagttttgatggagcacataccaggagtgtcaatgacattgattattggaccatcttgtattgcagctctgtacatttcacatatcatggtaacgccttttgcctggtttttagatttgaactgctttgtaccaagaagggtgttccctgtgctgctttttccattaccagtacggcctaccagaactatgtttttgattggctctgacatatcgaagaggagaaaagaaagaacgagtttcttttacgttttctagtgtagaacaagaaagaagaagaaatggacaagttaacggacgacacaattgaagcttatatacgaacgagctttctttaccaaatcgcttgctgaaatttatattttcatatttttatatttgctaacaaagaatctcaataaacaaaacaaattcaattggcaattaataatattgatagtgcaattggaatgacgaaccgaaaggccaagacgactttttgaattttgaggagtgagatgactttgactttgtgaattgttaaccactcgctattagattcaatttggatattgaaaataataactataatcatctactaggtttattaaatataatacgattgtccgtaagaaaaaaataaaataaaaataaaaaaaataataatacgattactattacataaagtcggcgagttcaataaactttagcaatcaaaaaccaacgagaaaagatattttttttcttctagagcaacaagtcggtaaaacaaagatattaagataggactccaagaactaaaaaactaagtaaaccatgaagctagaataatccacgaacaacatatccaaaatttcaagacaaaaataaagcaaccactttgtaacacttcatttcgttatatatccaagcagatgagtttaagtttattatcgaacatatgatgatcataaaataacgaaacgcaaaaagattgactcttattgttcgtgatttaagtttattgaagtcagaaaagaaaaggataggaattaattacagtaaaatctttacaaaaattaatatatttcaaaattctattaacgtatagagacattaaattattaataaattaattattaatttatagaaagattttattaatttgataacttttacaaaaattatatttcaaaatagtttttctctttataatcgaatatcagctttttaaaaccaaatataagtaaaaaaataattattaagtttagaaaataacacacctttttcgatatggtaaaaacgttaaaaataaattcaaccaaaaattaatacaaatttttaaaaaataaaaaatattagagttatatttcactaaattattttaaatataatattttacatacctaaattactatagaataatttggtgtgtacatatatgatatatagaataatattttatattcatattatatataaatgatatatgtatatatatattgataagtttatacaattattaatttatgatattaatgagattttacatagaattttcaaaaaaaatattatcttattattttatcaatttgtgtcaatttttacatggatcggaccgaaattttttattaatttataaaatttattaattaatcgaacattaatttatatagttttttgctgtattttagtgtatttttctctcaaaccggttaatatcagataaccgaaaaaacatgggtttggtctgctctaaaaatctaattacttttcacagttccgacggaaccgccgcagctgtagtcatcaacaagcgcaattctctaacaaagtaacaaagaggaggtatttgtcaatcaatacctttcttcgtcgattcccttagctgatgtgttgttattttcgaatttgatttgttggaacacacttcgaagcttgggatctgaaatatctgattctgactgtatactgtagtcaaagatg

SEQ ID NO: 12304 - DNA, 3000 bp, Unknown; identical to SEQ ID NO: 12298
  misc_feature (1)..( 3000): cDNA_ID_2711767_gDNA_ID_2214542_Annot_ID_134488 3000 nt of promoter + ATG

SEQ ID NO: 12305 - DNA, 3000 bp, Unknown; identical to SEQ ID NO: 12297
  misc_feature (1)..( 3000): cDNA_ID_2711763_gDNA_ID_2214542_Annot_ID_134489 3000 nt of promoter + ATG

SEQ ID NO: 12306 - DNA, 3000 bp, Unknown
  misc_feature (1)..( 3000): cDNA_ID_2711759_gDNA_ID_2214542_Annot_ID_134490 3000 nt of promoter + ATG
gtagtgtcgtagtgatctcgaacatcgtattcgagactctttcatcactggagcaccacaagaatgtggccatatctagttctagaatatacgattttggttttggtggctacagaggagaaatataaccgtgtcttccaatcttttttaatcttgttgaaagttatctcatcttagctttcaagaaattgtgatgtttatgttccatattgtctttctacatctatgaacttgacttctcgccatctgataggaaactctaaacatactctccattgtattctgaaactttttatctgtaacttgaatttccgtaccacttatgtaatgaaggaaaaaaaaactctttgattttgaatctaatgattattctactaattattcattgttctatggctatagagtgcaattttccttcctttttaatgcagtcaactataataaccgtaagttttcatttccatgctcgaattggtaaaaaaaaaaaagaatataaaataggtccatatggagaattcaaacatatcaaaatctaaaaaatatttgaacataaagtatgacatatataaaaaaaaacaccttacaaattgagaccaaatatggaagttaacaaaactttgactaatattaattgaaaaacaatgtagtcatcatggtctgaaaattataaatactgaggttttcataagaattcattcatagacataaagaagaaacatttaaagtagaaaaatggcaaaagtaattagcatgacgtttataattatgatactagcggtaatagtgatagaaggcgacgcaaaatcagagatagaatgcagtaagatttgtcgagagcactgtaaacgctcatcaccagcatctgaatgtgcggcttgtcgtaaaaaatgctacgaatctccaccagttgcagtgagagccaggaatcccatcatggagttagaagagcaaaaatatcatttgttttagttaaatataatatatatggtgatttatagatggagaggtcaatacattttaatatttctatgcaactgattaataataagatgataaattacatgtttatctctccatgctcaaattagtgatttctttttttaaagtacaaacaaatagcatatatagtagaagtgtgaatgaaactggttgaatcttggtaatattattatttttacttcgattggaaaattatttttcatgcaattatgaaagtgtttaatcagtaaaaatccgttgcataatgctagaaaaacaaaggcaaaagtgcagaacatgtgttttggcttaaaaaatacatatgccatttggaaatgaatgggaagcacgtatttgctgcatttgttctctagcaagaattagaccatttggttttcgatgatgcatatagctttcgcaacaaagacagaccgagctcaaatttctagcggacccataacttaattagacccaatattgcaacataatttttttgaaaataaaatatttgggtttttttttactaaagaaaaaacccaaaaggtctgatggacgctttgctttggcactctcagcacatgcacatgatcgggcctgattaaaggcggatcaagtaattttattcaccaatcacacatattgtatatgaaagtgtagtttaggtttagaaattaatttagatagaacctgctggtgcggttcaaaatgtgattaaaaatatgtggttagatgcagaacttttgatttttattcttttattccaaagtaaatctgaaacaattttgaattttattcttttattccaaagtaaatctgaaacaatatatacaaattaatttacacattttcattcaataacaattggtttgatcactctaaacatttttaaaaattagttaatattggatttgattataccaaactatatttatgataattaccattcaaacattctcatgtaccgtttgttacacattaaacatacgttttcatatgataaatttttctccaacgaactacaattgaaccatattacactagtcaattcgcttatcccacactgtttgatccgttgtagccattcacattttttcttctatcgatatcaactttttcttctttttttctctactccatttttttttctcatcacctttatgtcaatcttgttcaaaaacgaacaagcaaattattttgcaggaaaataagtttccactaataagtggaggaaagaaatatcaaaatgaatgccaaaagcattggaaagaaaaatatgcaaataaccaaggaaaagcctcccaaaacctttaaaaaacaagcctcagaagacaaacccttcttccatatccacctttactccgttaacatttgatacaaggtcaagtgaaagggtaaggctaaaaatttgcaatagtaaaggcaatcatcactttagagatgagaaagaaaggtttaaaaaagagtctccatctccttgagaagatcctcactctttaggtacatgaaaaacttacattcttcaatccttcgatcattgagacaaataaaatatttgcaaaaaaattgtcaatttatatatatatatatatatatatatatatatatatatatatatatatatatatgaatacaagaaaaacaaaacgtgattgggctaaaaatctatcaaaggcctaataattggctactggaggcccataaaagagtatccacatcaaatacactctagtcattggcaaaacttctctagtagcttccgattaccagagcgaaaatccagcctccactgaaagaaacttctcaggtatttttctagggtttttcagttttcaacattccagcttttttctaggttttttattttggctcgttactctgttttggtttctttcgctttcagacaaatccttattagttcttctctgtttacttgtttgttaatgttttatttcagggtctgacaaaattaaatgataaaatcgaagttcagtttacaacaattgggtttttgttaaagatatg

SEQ ID NO: 12307 - DNA, 3000 bp, Unknown; identical to SEQ ID NO: 12296
  misc_feature (1)..( 3000): cDNA_ID_2711755_gDNA_ID_2214542_Annot_ID_134491 3000 nt of promoter + ATG

SEQ ID NO: 12308 - DNA, 3000 bp, Unknown; identical to SEQ ID NO: 12295
  misc_feature (1)..( 3000): cDNA_ID_2708658_gDNA_ID_2214542_Annot_ID_134492 3000 nt of promoter + ATG

SEQ ID NO: 12309 - DNA, 3000 bp, Unknown
  misc_feature (1)..( 3000): cDNA_ID_2708662_gDNA_ID_2214542_Annot_ID_134493 3000 nt of promoter + ATG
ggttctcttcgtccgtttttacttctatgggctgtatacgctttagccaaatcaaatgttgattggaatattctttctttgattaacttagatccaagagtcgttgcatgtccaaacatcactttttcttgaaacgtttgaatcaaatatttgctttctagttactgtagaaacaattcctggcatactcacttactccttgagggatttctcttgtagagaggattgatatggacatatgctatgtgcatttggaaacactacatttggttaacattaattgttgagcagccaactaatacaaactttttctgtgtgttttattttagactcttaagctttcggcacctcttgcgactggccttatcctagtctcatgctgccctggaggacaggcgtcaaacgttgctacttacatttccaaggggaatgtagcgctctctgtactcatgacaacgtaatccttctattttcacttctttctcttttcgttctttaattttattggtcagatttcatatacattatctgttctttaatttattaggtgttcaaccattggggctattataatgactcctcttcttactaagcttcttgctggtcagcttgttcccgttgacgctgctgtgagttttctctataactattttgaatcgtttcattcaaaattgcattgataagatacatttctttttatgtatgaaatataagatacatttcacttagctaaaatatgaataatcatggttcagtaaaagttattgaatgatttaaagtagaatgaagcgcaagaactctattagaatatagttgcagccctccacaacgaaagcttatggatccatttttttacgtcagggacttgctcttagtacgttccaagtagtgttggttcctaccataattggaggtaagtatggtgctacgtgtttccggaaaaatgaatttgtgcttatatatccttagggactaatgtctttttctgcattgtgtgcagttctggcaaatgagttctttcctaaatttacgtctaagatcataacagtgacgcctctaatcggagtcattctgactactctgctctgtgccagccctgtaagttcatatatccagatatatatattttttttattgaattttgagactggaattggtattgattactaccttatctcttctgaaaagattggacaagttgcagatgttttgaaaacccaaggagctcaacttatactcccggtggcactccttcatgctgcagcctttgctattggctattggatttcaaagttttctttcggcgagtccacttcgcgtaccatttctatagaatgtggaatgcaagtaagttactttctcctataccgtagatatacattgccgtttgctttactaaggcttctttttgaaaatctgtgtactttgcaaaccgcagagttcagcgctcgggttcttgcttgcacaaaagcatttcacaaaccctctagttgctgttccttctgcagtcagtgttgtctgtatggcggtaagttttcatagccatttcactaaagttcacatgcaaattccttaagtttaattatgttcaatggcattctgcagcttggcgggagcggcctggccgtgttctggagaaacctaccgattccggcagatgacaaggatgacttcaaagagtaaatgaagtaggaaaggcggtttgcatcttctccaaacgatgtgattgttttgttgtaatgttagtaaacattacaaaatttgtgttgaaaaacatgaaacaaaatgtgtttaagagacatagaaacaagggcgtgcatgatgacaactttgtggtcaaccttttttttatttctcaattaatggacaaatcttttttggcacaccttctccaaattttgaatctaagtttcagattgggattagcgttgttcccggaatcctgtctactctcacaatgcactccctcatttccagccatgacttctcttagctcatatacgtcttttgtcagcaatgataagttttgatgtttttagcattaggtggttttggtgaattttcattttaaattagatttgagtgtttccttttctgatgaaaacacaacttccaacaattaacataagtaaacatgtaaagttgattggaatgtggccagttgatctcggtttcaataaggtgaagagtctcattgtattttggtctttacatgattggaatagtactatgcttctggagttctggtctcagtgtataaatggtggtaaaaaatgttttcagtttacagtaaaaaatgtttagctatattttaacatttcttttactgtagaatgtttcccatatagattttctgttttttttttaattagtaatatttttagttttcatatttttttaatatacgtgctaattcatttgttgaaagagccaaagaaatagtaatctagacaattatacattttgacacacgtttaatccgcgttaaaggaacagaagaattgatgatgattgcatttgcaccggagagacaccgaatcaaaaatggcctttagcctttaaccctctcaaacaaagtcgtcacactgtaaaaacaacagcaacaacaacaacacacaaattcacgactctttctctcccaatctcagatcgaaaatttgcttcatttccctctgatcatcatcattcaccaaatttcgtattcaagaacaaatcgatcgcattcatcttctccccgaggtttcttacatacgactaaaattagggtttaagcttcccattttggatccgattgttgcaaaaggaccttctagccccggtggcttttgctataaccaagtcaaagaactgggggcgaatcagtcccacccccgccattatcctggcgtttccgatcattccagggtaggattctgggattttctacgacctcttcttaataatcctcctcgaaacaacacgttacagtttatcgattccgttggatctgatcggactatg

SEQ ID NO: 12310 - DNA, 3000 bp, Unknown; identical to SEQ ID NO: 12294
  misc_feature (1)..( 3000): cDNA_ID_2708666_gDNA_ID_2214542_Annot_ID_134494 3000 nt of promoter + ATG

SEQ ID NO: 12311 - DNA, 3000 bp, Unknown; identical to SEQ ID NO: 12302
  misc_feature (1)..( 3000): cDNA_ID_2708670_gDNA_ID_2214542_Annot_ID_134495 3000 nt of promoter + ATG

SEQ ID NO: 12312 - DNA, 3000 bp, Unknown
  misc_feature (1)..( 3000): cDNA_ID_1807682_gDNA_ID_2214543_Annot_ID_134500 3000 nt of promoter + ATG
aaatccaaggactaatcaagccaacttacattcatactaactctgtagctaatttccagtttatctcagctctgtttatagagacctaatgggcatacaatattggccagtgtaaacctttccagatgataataccaaaactacatcccaattcctagtacacctaagaacggtaactagaccttttcgtgcagatccatatttaacacagcagtaagggatttgcgtattcttgattgattaccgtttaactcaacacaatggtcatggatcttacaacaagcatcaagatcatcacaaggctcctcaccaggacaaccagaatgtccaatcccacaatacttcccatatcgaatagaaagagctgaaacaaacatacatgtgagtcagctaaaaagctaaaaaacctaaggaaacttcagaaaagttgtaatcttactgtcacaattctgtgcaatgcaagttcttgtacactcctgtaacaatttgatgcaacaaacaagacacaaaatcaattcattgttcgaaattaccgcaagaaacaataaaacacagagacataaagtgaagtgaaattagcaaaaacatcattgtcaaaatcagatttttggcaaggttccaattaagtcaatgcctacaagaatgtgattcctttcgtctaatttgggaaacagagaaaaacacagaaccaaatcgaacctcactgcgagcgacaccgacgagaacgacgaagacaatggcgaagaaagctgccgcgaaacgcatcaatgaagtgcgaaacatcatcgtcgtcgtctcgtaaatcgttgttgtcttcttcgctaaggtttcgaaattgtggctaaagattccaattgggtctccttaagatcccattggtcttcctgctttctcgcacataccaaaattttattattatttttttgaatattctctcgctgagatttgaagttaattcaatattttatcttaagtccactcaaataaatgtattatatatttctatttttgaatttatcagctgcaaaattaaatttttacttcaactatgatatcagtttctcaaacaaaataaaaataacagttttttactcaaaaatcattttcttgtgaatatcataaattcttcaaaataacatttttttcaaatattcctctatttttgaagttattcgacaattaacaatcacttaatatattaaaaaaaataattctctgatgttttaaatattgtgaacagatattaaactttgtggataaaataaatatctaaagaagaatcttgtatcaaatgcatttttctcaacttattaagagctttaccaaaatgtttttttttcccttagctccaacacttctgtttcaggaaaaaactgaaaatataaatggattcgaggaagtatatatagttcaagtgaggaatcatatggagggagttacaagcgtcaggaagaatattccggcgacctggttgtttgttgtctcaatttcaagggtagtagccggtgaaagtgaatcctctgccgacgatttcacctgcgcaaaaccaagcaaagcattctaagccaaacaatgcagcgattcctgcatcttccaccttcagattcgctctgttcttcaataagttctttgcgtagtctacttctttcctaaatgtttcgtagcgcccgggaatgctgtagttagtaagaagagtattagctatagacgcaagattgcgtatcacagaaagccgaactcttcaactgatagcaaaacacaatgtggtgcttataatgtgttatctagacaggaaaaacaagacaggcacatatattatcctaatcaaaggatatttacaagctcaattccatcgaggacaaaaactactagaggataacaaattctcaagcatatttttttcaggcaaaaaaggctacctactcgcgagtaatgcaaattcaacttgcacatttcatcagcattctctaaagattaatgtttcaaaagtatacataaaagatagtttgagcatggccattgaaaatatgtccatgagataaagagagaagaaaatggtaatgacctagcaagacgagtgtagagcaattgtttagacaattcactgcacttctctatagttgcaggctcttggatgtattgcttgttctgctccaacaattgcttgtagtacgaattcccatgcttggccacaaactttgaagcctgacatgcctttgattgaagttgaaccaattttgatgccatttttcaataccaaaatcctacaaaatcatagaaaccaagtttagcatttaccaattgagtctcagaaactaagcctaaacaagaaagattagctcatcatatacaatagcatggttcattatacacctccacgatagaattcaataactaaaacaggaaactgaaaaaatgtaatttcagaagcaaggcatccaaaagcataaggcttttcacacatatcaagctaaatcactaaaaccctagtcctcaattccagactaacaaatcgaacgaatccgaattatggaaaaattaagcaattcaaaacctaaaaagcattatcgcagtgaagagatttcaaattagatctgagactcaaacacataaaaaaacaaactttaaacccctaaaaaccaaaatccaaaagagcgaagaagaattttagaccaaaatatcagaatcttaaacgaaataaaagaagaatgaatcggtgatcgtaagcaagccataccttttggccgtgctcaccactcaccactaccagcgtcagaatcttttcctccaaatttcatctacactgccttataattacgacaataaccgaaccggatcggtataaaccaaaccggtttatctgtcaaaaacaattgaaccggcggctgaaatagaatcatacacataacataaagttcgtatccatcctaaaaccctaaatctttttgcttattcgaatctgttagccatccaaaacctctctctttgccgcaaaaaatg

SEQ ID NO: 12313 - DNA, 3000 bp, Unknown
  misc_feature (1)..( 3000): cDNA_ID_2708706_gDNA_ID_2214543_Annot_ID_134502 3000 nt of promoter + ATG
tcctcaatcttccctttcaaaaccgttataactgccaacaaaacaaacacaaacacttgtttcagccaactaccatcagatcataaaccatttgaataacactctaaacacatacataccatctgagaatccattcgacttaacaatctcctttgctgtgtcagccatttgagaacactcaacctaagaatcattagtcaaatcagatcaataagagccaaactttgattaacggagaagataaagagacatactgcgtaaacgtgagctgctcctgctttagcacagaagagagacaagattccagttccagctccaacatcaagaacaattttgtccttgataagaaacttgttcttgtaaataacatcttgataactctttgtcctcactacatcctttaacatttcctaataataataacatcaccatagaaaaactgttatacacattgcctaggtttcagaacaaaggattcaaaacaaaacaaaaaagcaggagactttacttacttcatgaatacctgcaaaaatcaatcaattggaaacagagtaagcactttgcagagaataagataacatgaagaaagcaacattatataatgaaagttcaagggtttataccgaaatgagagtaagaatcgaagtagtaatcggcgctggtaatgtcatcagcaacatcggcattgttgtcatctccatcgtgcattgattcatcagcatcctcgaagtgtaacttcgtcgtctgagtttcatcagagccgttgttgttgttctccgtactagtcattttttgcggcaaagagagaggttttggatggctaacagattcgaataagcaaaaagatttagggttttaggatggatacgaactttatgttatgtgtatgattctatttcagccgccggttcaattgtttttgacagataaaccggtttggtttataccgatccggttcggttattgtcgtaattataaggcagtgtagatgaaatttggaggaaaagattctgacgctggtagtggtgagtggtgagcacggccaaaaggtatggcttgcttacgatcaccgattcattcttcttttatttcgtttaagattctgatattttggtctaaaattcttcttcgctcttttggattttggtttttaggggtttaaagtttgtttttttatgtgtttgagtctcagatctaatttgaaatctcttcactgcgataatgctttttaggttttgaattgcttaatttttccataattcggattcgttcgatttgttagtctggaattgaggactagggttttagtgatttagcttgatatgtgtgaaaagccttatgcttttggatgccttgcttctgaaattacattttttcagtttcctgttttagttattgaattctatcgtggaggtgtataatgaaccatgctattgtatatgatgagctaatctttcttgtttaggcttagtttctgagactcaattggtaaatgctaaacttggtttctatgattttgtaggattttggtattgaaaaatggcatcaaaattggttcaacttcaatcaaaggcatgtcaggcttcaaagtttgtggccaagcatgggaattcgtactacaagcaattgttggagcagaacaagcaatacatccaagagcctgcaactatagagaagtgcagtgaattgtctaaacaattgctctacactcgtcttgctaggtcattaccattttcttctctctttatctcatggacatattttcaatggccatgctcaaactatcttttatgtatacttttgaaacattaatctttagagaatgctgatgaaatgtgcaagttgaatttgcattactcgcgagtaggtagccttttttgcctgaaaaaaatatgcttgagaatttgttatcctctagtagtttttgtcctcgatggaattgagcttgtaaatatcctttgattaggataatatatgtgcctgtcttgtttttcctgtctagataacacattataagcaccacattgtgttttgctatcagttgaagagttcggctttctgtgatacgcaatcttgcgtctatagctaatactcttcttactaactacagcattcccgggcgctacgaaacatttaggaaagaagtagactacgcaaagaacttattgaagaacagagcgaatctgaaggtggaagatgcaggaatcgctgcattgtttggcttagaatgctttgcttggttttgcgcaggtgaaatcgtcggcagaggattcactttcaccggctactacccttgaaattgagacaacaaacaaccaggtcgccggaatattcttcctgacgcttgtaactccctccatatgattcctcacttgaactatatatacttcctcgaatccatttatattttcagttttttcctgaaacagaagtgttggagctaagggaaaaaaaaacattttggtaaagctcttaataagttgagaaaaatgcatttgatacaagattcttctttagatatttattttatccacaaagtttaatatctgttcacaatatttaaaacatcagagaattattttttttaatatattaagtgattgttaattgtcgaataacttcaaaaatagaggaatatttgaaaaaaatgttattttgaagaatttatgatattcacaagaaaatgatttttgagtaaaaaactgttatttttattttgtttgagaaactgatatcatagttgaagtaaaaatttaattttgcagctgataaattcaaaaatagaaatatataatacatttatttgagtggacttaagataaaatattgaattaacttcaaatctcagcgagagaatattcaaaaaaataataataaaattttggtatgtgcgagaaagcaggaagaccaatgggatcttaaggagacccaattggaatctttagccacaatttcgaaaccttagcgaagaagacaacaacgatttacgagacgacgacg

SEQ ID NO: 12314 - DNA, 3000 bp, Unknown
  misc_feature (1)..( 3000): cDNA_ID_1807082_gDNA_ID_2214543_Annot_ID_134505 3000 nt of promoter + ATG
ttggcatcttcatcatcgtttctcttacgggcaacacggactctaattctcctcgggggacctcggatacctttgctccatatctgcttgttgagtttaacatccactctaacgtcctttgttcccattgctttcaatgcaaacttcctgatctctttaatggcattgggtgccttcttcttgaaggtgctgttcaatttagaaaccatcaaactcagtatttcttaaaccacatgatcaatcttgacaacgaaaaaagctctaatctaaaatgtacctaagcaacaagccaacctttctatacaataaaaggagtctaatttctccattttaaactaaaatttagacaaagatgcaaggagccaaggtgatcaacaacaactaggagatctttatgatcattactcatctacagaatcaaaattttcaacaaagattcaaatattctaactcttttcattcatcaagaaacctaattcgaatcaatacaagttgcaattttagtctaatcattagactctatgcccagaacgaacttaagcaaaacggaaacgagatattgcaaataaggtcaaaagtattgaagctttaggttttaccagctatggaggcgcctgtggagattgatagtgtactccctggtcacgacctcttcctttcttccctttcctttctccattttgcttcgatctccctggtcttcgaaatggtgttggagacggccacagcaagagaacagaattaattcatgtctaagaaaccctaatataaacctttccgtatgctataagttgggccgtctatgggcctgatgggcttttggataagtatagagcatgctaagatggaattctcaagttggtttttgatgggatctaatgaaaatgtcaacattatagtccacaagaacatcacatttgatgcaacaaatctaaacatttatgtttgctattttgagtcaatttaggctttcaaaagtcataatatataaggacttggttgttgattacatttgatttgctaataaaatctagaatagagattttaagaaagttcttgattcgataaaaggatctaacaaaatgtaacacaagcacaccagaaacatcaagcataacaagataaacttctaactcctttataataaggataatgaaaaaggagaatagcattatggttcaacttcaaagcaacaacttaaataaaacctgttcaacaaaatcttttacttcaaaaaaaacagattgtgaaagaagaagcttaagcttgtctgtttctttgcttggcaccggacttggcaaccctgagacctttgctgatggcgctgagtctagcaagtgcagctttcttcaagtccggcctgtagtagttgtccaccacctaaacatttacacaatcatttggtttagattgtattcacgtatgaaaccaataaacagcaacattaagcagatcaatgaaaatagccaagtgtaaaattaatatttcatcaatatgccacaaaaaggagccttatatgaagttaaattttaatctttgcacagctatgcatcatatcgttttaccataacatattaactctcctctcacaggtagagggaagaacataaaaaccaattgtagatcatagccgtgaaaataacacacaaaactagatatagagacctataagcacaccatagacatataaaaaacactaaagtaataaaaattgagtaatacctggttagcaacagcctttgacatcctggggaattccttcttgaggatagacttgttgacagagagcttaggcttgttctgcttcttggtcttggtggtggcgagcacaacagcttggtccttgtcagcggcctggatggtcacagtctttttgtttgcaagacctgaaaccacatcaaaagattcaaactttagcctaattcaagacaataacaaaacctaatacatagtatgaagtgtctgctcaactcagactaccatttttgtctttaaattagaagatacatacacaattgtaatacagattcaaatggtcaaatgtaaagaaactacatttcacggtcaacttgcaacagataagaaaataagcttatactcgagaatcaataaaatagtgcataaagacgatctcaaacagccaagtttcaaccacaatcatctaatagtcgagaatccacaatctttcatagaaccaaaagcacttaacacatcaacatttcttaacaactttagttcccaatctattctactaaatcaaccaaccagagatgtaaagtaatcatttgttctcaaatggccaagatatcatttcgttcagaaacaaagaatctcgtaaacaagagtacaaatttaccagagtgcttgtaagagtgaacgttggtgaggttgttagtctccttgctgaattgaaccttagagtttcctctaccgaactgcttcaccaagaaacagttgttgttcttcacgatctcccagatcaattgtcctggaactgtcgccatttcaaatacctaccttcaccacaccaaaaatgatactaccaatcaacaacacatacattaacagatcgattcctaaaggctactactatagagctcgctgaatcaaaatatctacacaaaatcagatcatctaagctacgaaaatcaagacatactgaactgagaacaattgagagtaatactaagctcaccgtgaaatttcgcagatagagatcgagagattttaatggtggcgccggagctttgttagaagacgaatggagctatttatatatgacctctgaaaaaaataaaaccctagctcatgtaagtgaacgtgaaaagtctaaaatacccctaatgtttttcgaaatgtcgaaatacccacaattctgagaaacgttggaataaacccatttcctgctgctctgttgaactttaggggttatcgattctttttgattcgttgtcattcgattatagaatttgtattagaaatcggaattttcgatcaatg

SEQ ID NO: 12315 - DNA, 3000 bp, Unknown
  misc_feature (1)..( 3000): cDNA_ID_1383333_gDNA_ID_2214543_Annot_ID_134507 3000 nt of promoter + ATG
attttgtaaagtaatagacaaaaaactagctgattctgcggtttgagcatagaaatggtatctttatacttcagtcacaaactatcaactttgaaaagaactacttcaaattcctaactaaaaacatacaaaacacagacgaagatcgaaacaaacttaagttagaccataaactaaacaggagcagatatgactttctccaaccatagatcaagatgtaacttatccataagaatcaaaaaacagaaacttttcaatcttctgcaacttcatagttaaccaagaacaaagcttaatcattgggaccatgttgtaaccaatctcttacatcgagtgatcacacatggaaattcttgagctatacgtgttaggatcagctcaaggaccaacaaaacaatagagactatggatcattaatcatacttcactacaagcaaaagtgactaaaaccaatgtcgacgaaactgataaatctaaacaagtagatgaaaaattagggaaatgaattaagacccaattagaccagaagaaagaagaagtgaaaaatctcacctttctctttcatgattttgagaaacgaagacattacggtagagacaggtttcaactccaccgaagctttccctcgcttctcagcattcacgatcgttctcaatgcatcgttcaatattctcctccccattgatcgaaaattccgatttctaatacaaattctataatcgaatgacaacgaatcaaaaagaatcgataacccctaaagttcaacagagcagcaggaaatgggtttattccaacgtttctcagaattgtgggtatttcgacatttcgaaaaacattaggggtattttagacttttcacgttcacttacatgagctagggttttatttttttcagaggtcatatataaatagctccattcgtcttctaacaaagctccggcgccaccattaaaatctctcgatctctatctgcgaaatttcacggtgagcttagtattactctcaattgttctcagttcagtatgtcttgattttcgtagcttagatgatctgattttgtgtagatattttgattcagcgagctctatagtagtagcctttaggaatcgatctgttaatgtatgtgttgttgattggtagtatcatttttggtgtggtgaaggtaggtatttgaaatggcgacagttccaggacaattgatctgggagatcgtgaagaacaacaactgtttcttggtgaagcagttcggtagaggaaactctaaggttcaattcagcaaggagactaacaacctcaccaacgttcactcttacaagcactctggtaaatttgtactcttgtttacgagattctttgtttctgaacgaaatgatatcttggccatttgagaacaaatgattactttacatctctggttggttgatttagtagaatagattgggaactaaagttgttaagaaatgttgatgtgttaagtgcttttggttctatgaaagattgtggattctcgactattagatgattgtggttgaaacttggctgtttgagatcgtctttatgcactattttattgattctcgagtataagcttattttcttatctgttgcaagttgaccgtgaaatgtagtttctttacatttgaccatttgaatctgtattacaattgtgtatgtatcttctaatttaaagacaaaaatggtagtctgagttgagcagacacttcatactatgtattaggttttgttattgtcttgaattaggctaaagtttgaatcttttgatgtggtttcaggtcttgcaaacaaaaagactgtgaccatccaggccgctgacaaggaccaagctgttgtgctcgccaccaccaagaccaagaagcagaacaagcctaagctctctgtcaacaagtctatcctcaagaaggaattccccaggatgtcaaaggctgttgctaaccaggtattactcaatttttattactttagtgttttttatatgtctatggtgtgcttataggtctctatatctagttttgtgtgttattttcacggctatgatctacaattggtttttatgttcttccctctacctgtgagaggagagttaatatgttatggtaaaacgatatgatgcatagctgtgcaaagattaaaatttaacttcatataaggctcctttttgtggcatattgatgaaatattaattttacacttggctattttcattgatctgcttaatgttgctgtttattggtttcatacgtgaatacaatctaaaccaaatgattgtgtaaatgtttaggtggtggacaactactacaggccggacttgaagaaagctgcacttgctagactcagcgccatcagcaaaggtctcagggttgccaagtccggtgccaagcaaagaaacagacaagcttaagcttcttctttcacaatctgttttttttgaagtaaaagattttgttgaacaggttttatttaagttgttgctttgaagttgaaccataatgctattctcctttttcattatccttattataaaggagttagaagtttatcttgttatgcttgatgtttctggtgtgcttgtgttacattttgttagatccttttatcgaatcaagaactttcttaaaatctctattctagattttattagcaaatcaaatgtaatcaacaaccaagtccttatatattatgacttttgaaagcctaaattgactcaaaatagcaaacataaatgtttagatttgttgcatcaaatgtgatgttcttgtggactataatgttgacattttcattagatcccatcaaaaaccaacttgagaattccatcttagcatgctctatacttatccaaaagcccatcaggcccatagacggcccaacttatagcatacggaaaggtttatattagggtttcttagacatgaattaattctgttctcttgctgtggccgtctccaacaccatttcgaagaccagggagatcgaagcaaa

SEQ ID NO: 12316 - DNA, 3000 bp, Unknown
  misc_feature (1)..( 3000): cDNA_ID_2708688_gDNA_ID_2214543_Annot_ID_134509 3000 nt of promoter + ATG
aaggtcaccaccttaccgccgccgctatcatcggccatgatggtagcgtttgggctcagagcgctaattttcctcaggtataattacctcctcctctattatcgatcgatcatgttttggtttcgttggtcttaaatcttttatgtagagaaatatgatttgatacttgctatttctatccgttacgtacgtatattatggacatatttatagtgatatataatatagatgagctgatcaactttgatttgtaatctcaccatttgcatcaagttcattgttccggatttagttcaacgttaaaagtctgaggattcatttgtcttcaaatagttcaaacctcaagagatcacagacattatgaaggatttcgatgagcctggtcacctcgctcccacgggtatgttcctcgcagggctaaagtatatggtcatccaaggcgagcctaatgctgtcatccgtggcaagaaggtatgtttaggattaacgctcgattgtttgtgtttgcattctacaaaaataatctaagaaatcctaaaatatattgttttatttttttaaatatgtgaattttactttgcgcatgttaaatgcacatgtataccattgcatttgaaacaatcgacgtttaaggcctagcaaccatcgggatcgaaaaatattttatgaaacttgaattattttctaataaaaaagattcacatgcaaacgcttaaaacaattgaggcctacgattttatgagaatcaacccctcccattgcactccatagagccgactatgattaagagaataatctcatgcaaaaatggtcaatactctaatcattttgatagtatttgatgttatgaatgtaattcaaagtcttaccaaaagcatcgcttatatggtacatagtatatagtcgatgattttgcactcccaaactttttcatttcttgaaatgataattacattcttgaaactataagcttatcataaaaacatttaatgttaagaatttggtttgaaactcaaaaccattaatataattggaacttgggcagggagctgggggaatcacgatcaagaaaacaggacaatcaatggtgtttggtctgtacgaagagccagtgactccaggacaatgcaacatggttgtcgagaggttgggtgattacttgatcgaacagggtctttgaaccatctacaatgttttatatctctttctctataaatcattaaacctttgtttctctttttgggttttggttttccgtttctataatttaattttgggtcttcctggtttctactttagccaagtttaacagaaagcttaagcctaaggttgcagataataacactaagcctgtgtgaagaagccaagacttataagacttttgtttcttttttctctttttcatggttattgattaatttgtgtttttaaaaaaaaattaattttatagtattgttgcgtatatataaacttgtcatgttaattaatatctcatttcttcatatacataccaaagccatcatggataacaattaattatgtaatcgggtgttggacatataatagctatccatgcgtttatcgcttgaatcgacggtgtcggttcacatacatgcacattgttaccggaggaagaatggaggacatgataactcctagttttttcgatgtttattttgacaagactacgaatgtaaacatgaaaataaaactcgactaaccaaaacaagaaagtaccaaaccagaagtatttcgattattcgttctttatttattttcagttattgcatacattaagagatttggttttccttgagtttagaaacactatctccacttttgaaattaatatctagtgttcaagacatcaagtttacattgctttgattattttagtaaaactaatggcgtttttatcagttgaaccaatatcacaaaaccctcaatattcatgtatgtatctcctaatttcttttcatgataagcactaaatagatgggatcttaaattgaaatagagactatattttcatattttgaatcttgtgaaacagaaggtattgttgtcaattaaaatgtctaaaatgaccagccatgattgcgagaactcgaactcaaaattttcaattcctataatgacctaccatgatcgagagaactctgaactcataatttataattccatgataattcttttaaccacaataccactaaattatttctcaagtttgattaaaaaattgaaaatacgaaagtgatggaccacacgtaaatgcaatatttggtgtaacgcaataatatatgattgagaatctcaatttgagatcttgctatagcatatccactctgtatttgaagagaacaaatgatgttgccttctggcatattaatttttttctttttttggaataaaaaactttatttttataattgggaaaagtttttgagtttcttttttttttttttgttaaacaaacatccatttggaaaaaattaaagaaagtattatgataaagaaggattaaaaaaaaaaaaatcttcttaatatagcttacaatgttttgttgttaaagtatagctaagtaaagtatgttataaatggtgcatgattttttatttttgattaaaaagtggtaaatgatatttttttcctccattttgcatttttacactttgtatgatccaatttgcttttatttatctacatataataaatctctataataaaccatttacataccattactaaaactaaaattataatggaaaaatattattatgttatttattgttactttggtaaagcattattatttattttgcttattttaagggctaataattaattgaaattaagcagttgacgaaagttttttttattaatttataaagcacaacatttccttgtctacacgatcataaagctcacaaagagagaattgagaagaaacaaactcgtcggagaattcagtactcgccgaagaggaagaagaagaagatg

SEQ ID NO: 12317 - DNA, 3000 bp, Unknown
  misc_feature (1)..( 3000): cDNA_ID_4283538_gDNA_ID_2214543_Annot_ID_134510 3000 nt of promoter + ATG
ttccccaagaagaaaagacagcaactttaatcaaagcttctcgagtttgttgagtatcaaaaagcaaaacaagaatcatgaagaagaaaggcaccaacaacaacaactttagccttctgtctttgtctctgttcctgaattgtttgattctaacaaacggatacagcattggagtcggagttggaatcggcggtggagacggtgacgacggcggagtttggataggtggaggaaaccctaattccaatcctggctcagctccaaaccaacaacagacaacaaatgcagcttacaatgctcttcaatcttggaaatccgccattacagaggatccatctggtgttcttaaaacatgggttggtgaagatgtttgttcttacagaggcgtgttctgttctggctcatctataacctccatagatctaaacaaagcaaatctcaaaggcaccattgttaaagacctctctttactctcagacctaaccattcttcatctcaacagtaacagattctctggtcaaatcccagattctttcaagaatcttgattctcttcaagaactcgatctcagcaacaacagattctccggttctttccctcaagtcacactctacatcccaaatctggtttacctcgatctccggttcaacaatttcactggctctataccggaaaatctcttcaacaaacaattagacgcgattctcctcaacaacaatcaattcaccggagaaatccctgggaatctcggttactctacagcttcggtgattaatctcgctaacaacaaattatccggcgaaatcccgacgagtttcggtatcaccggttcgaaattgaaagaggttttgttcttgaataaccagttaaccggttgtataccggaatcagttggtttattctccgacattgaagtgtttgatgttagtttcaattcattgatgggtcatgtccctgacacgatctcttgcttatcggagattgaagttttgaatctcggacacaacaaattctccggtgatcttcctgatttggtctgtactttgaggaatctgataaatctgacggtttctttcaacttcttctctgggtttagctctcagtgctcgagccttagcgttgggtttgatttcaccggaaattgtattcccggtaagggttatcaacggcctcagccggattgttcggcgattcctggtggccaattgagctgttttagaattccggcgcagccgttaacgtgtgctgcgattagcttggggttgaaggtggcttcatctccatgaaaacataaaaagttcgaagcttttgtattggttatgcaattgtgacttgatagaagaaaatggtttttatcagttacattattaatcaaactgatttatattagtagataaaacttatttctgattttgaaacctttgtaatctgatctttctaaaaaaaaagaaaagttgggatcttgctaaggattttttttgtttgtttactagaaagagcaaatattgttgagatgaaatttattatgttcatcactaaattaaatggtcttcaataaataaccaaaaaggaattgataatgttgttgttggtccaaaactggtcctgtatttgcctaaccaagtaaagaattctacaatgagtaatgatggctaagaaagatccataaaacatatgaaaaatgaaatgtgatgaggattagcaaaaataaaaaagaagacatgagcagaaacatatcaatacaaagatagataaccaaacggatctttaaagtttatgggttgagatagataaaattcttaaattctttttagacttcgcatgaatcgacgacattgagcctgacagatgctaaagagagctacgaagaagagaaatgtgtttgcatgcaaatgatgtgttgtaccgcaacgtgaaccactagttttgctcatttttatttgttaaatggtttgctccatcagaatttattttattggtaacgactctaccttcatccctgttatatcaatgttttccctcttcgttgtatactatactaatcagtcttgttatcatccgcattatagtagaccacaacaaaaatcatttaactaatcttcgtgtattgtcgattcaaattaaatgctctagtagataatttaggagtagctaactagctatagatcggataaaacactagtttcatagtcttttcatgcatttagttagttttgttgcaagaaatttgagaatatagtttggattaaaggaaaaaagcatgtggaaaattggagaaaacatcatggcgatcgccgatcagctatgatcagatcaatcgtcacctcgaccgatcagaagagggacaaattagcagaaatgacaacaactcttctgaaaatagtttgatcggtcactaaaatgatcatgatatccattaattatatcacgtttagaacagatacattggttcttttagctagaatctaagtctatgttgttatttggtacggcacaatgtctcaaagagtaaatccaaactgtgtcgagaaactataaagatccaaattcaaattgagacaatcttttttgagaggctgctacaaaaccacatcttttttacaaaatcttgttcatttccttagtcttttaatcatatatgctaaacaaatattaatagtttaatactgttattatttcctgaaatccttcttgttcgttattattaggaggaaattagcatagggaagaaaagacacgtggcgtgcatgtagtgaatgattaagctataacaaaggcgagacgtcagtagcaataataataaaaaatgagcggctgagaatgtgtctaatgaatccaacggcagatacttcatcctacaacattcttcttcgctccctatttatcgagacgaccaagtccccctgggagttgcattgcacacacatacatacgtagagagatccaaaatacccaacctcgcagagtaaaagcaaaaagaagaagaaatcagagagaatg

SEQ ID NO: 12318 - DNA, 3000 bp, Unknown; identical to SEQ ID NO: 12312
  misc_feature (1)..( 3000): cDNA_ID_1807682_gDNA_ID_2214543_Annot_ID_185284 3000 nt of promoter + ATG

SEQ ID NO: 12319 - DNA, 3000 bp, Unknown
  misc_feature (1)..( 3000): cDNA_ID_3434971_gDNA_ID_2214543_Annot_ID_134512 3000 nt of promoter + ATG
tcacatgaattttataagcattatttagctgggaatagtatatactccatgatattatttattgcatatggttaggagagtttatatgtatgtctttcgcaacatttaacatttagagttcatgtttccatgcttttagaagaaaaaaatactatcgattaaattatttttagaagttaccactgaccagtgacaattgtcataataaaaccattaattaccttctgtgttcagaggattcttgtatcgactttttttgttaaagaacctgaaaaaagtctcctatgaattaattgagaattcagagaaatacatattaaaaacttatccatgtgctatcaatagaacgttcttaagaatgtttctaagcaacactttgtttttaaaacttatttacaactatgtcactagacatatgtttaaaatttgatcataataaatacatgaaatgtattaatatcaaagaaaattaactatttgtatataaaacaaaatcatcttattttatggagtacctactaatattagtgtttccacgttccactttccactgactccgatttgctatcataatatttgtctgtcatatcagttgatttttctgatattccatttccaccaaagtaataatgtgaagaactgaaccactattgtgaccgacgtaaaaacaacattactgttgcgtattatgaccaaatttgatacaaaggaaataattaaaaacgacaaattaccagatagtattagtttatactccttatcatgcattgatgatgcatatatcaaaagtagaaaagagaaaaaaagaagaagaagaagcagaatctagggaggctatttaaagtatagaagaaagaaaaatatgtagcagcttctgagtgtgaaatgctgtgagattgtgttgacttgagataacgattttaatgaaatgttaaaaaattgggagatttgtatcgcctcacatggaggggacacacaccaatagattttgggaatgagtcatccatatatactagaaaattaatcaaaataaatggcgttaaaatatacaattattttccacccattatattctggctctgagtactattgttcgttttaagattaggtggatacttaaatttcttgtagatttttccattcaaaatctattagttatacatgcatctcattgtattttacgatttttaataatatttgtgaaaatgcatctcatattaactcaatttacgtaacataattttgatctccgttttgcactactgaagctagaaaaacataaacataagacaaaaaccaaaaaaaaaaaatccttttacgaatgagtgagatcatccacacaaattttgatggaattcaaaagaagactaatgttaataaagattaaggaaaatacaaaatatatgaatctagctagtggacaaacaattgtatgtttcttatatctggggcacccaagcagctaactagtgtttcaaaataaaaacaaaagaatgtccacataatattaggatattaatacttaaatctagcaagaatacaacaattgtatgaatcttatgtttggatatgcaagccgccagctcatatctccatataaaaccaaaaaaaggtatttttggtaaatataaattagataatacaaaataagtagatgtggatatgtatgtataatgtttaataaatttggtccatgtagtgttaatatgtgatgttacatatattgataaataggttaggttatagcgcacttaatgattacataaattagtgagtgagagatttaatgtgaatgcgaagaaggtggaggagaagaatcaacaatttgattggggtttctgtaaatttgagttgtaagctatatattccccactaggccactaataacggttattttttcttcatcactattcttttgggtgaaaaaggtaacgattataaaagaataaacattatgatctttttttcctccccattttgactttcgagtatagagacattatagcattcataaagaaacacatttttcttttatctatatcgcatgccgcatgcgccatctatagcattcatacgaaacatatcgagttttatctttattccatgttctattgtatcaatttttgaagaggaaatgaaatggtggtaatggattatattaaccaaaggccattgttatagacttatagttttgaattaaactcacggtatattgttttagggtcatacactttaaaagcttacgaagcttttgactctacacgtgttaaacattaataattacagtatatcaaaaccaacaaacatttgaaattttgaaacagaacagaacagaaccatataacatttgtctaacctaataatttgtagctggcatgacggctaatctgttcgttttattgttgttacttgtcgtcgttgtcgatgccaaaatcatgttttttttgtgcgtagtcaatggttcaacgatatattttagtaatgaattcctataatttcttaaaattgcaaaccaataacgtcagtacacataaataccatgggcttttcggtgccttaatattagtgggcttatataggcagaaacatacacttttcccccaaaactagttttgataacatgggcttttcaatgtttaatattagtgggcttatatcaatctaatgaaatttgaagagaagagagagaggaacctgcgggtcgttgactcgttgtatgtttcggcccatataagcccagtattaactgaaaataaaattagtttttttcatattaccatgcatgtttttttcggcccatataagcccaatattaccgtgcaagttttttcttattttttaaattttatctgaaagtaaaattgaacagagtaccgatgacgtgtcctaactcccaagtagaagaagaagaagaagtaaaaaaaaaaaaaaaaagatctgaaagaaataaaaaacgaatcggaagagagagagagagagagagattggagctagttggag

SEQ ID NO: 12320 - DNA, 3000 bp, Unknown
  misc_feature (1)..( 3000): cDNA_ID_3024594_gDNA_ID_2214543_Annot_ID_185312 3000 nt of promoter + ATG
atagctcttccaggaattcgatcaggaaagacactcatatgacaatagttggatcctctaacgttgtgtgtccgaggaacaactccttcatccaacactttgacaaattcttcatcctacaaaacatttttgaaacataataagtaacaaaagtagtaattggcttacaacataagagtaatcatcacctcataagacgtcttcaattgctggtgtaaatcttcggttctaaccccgggagccatttccacatatatagtcgattgcattccacggatctacccaaacaactgaggatcagttaatgggtttaaggttaaaaattatagaaatcatgctaagattatttgtaccattggcatgagatgtggcgtaaaactgactgttacttttgactgtgcaacatcagataatccctgttcaatttcaggaactgcaaaacaaaagagatattgaattcaaatcatggcaaaattttaactcattgtgataattagtttgtgacataccatggcgatgacgggtgacaccataagaagaaatgccttcagctatctcagagtaaagatttgcctccttagcaccacgtcctgatgaaaatttcatatcagtcaagaaactagaaacattgcatcattgttcattgatcacggagtaagctcaaacctgctccactaacaccagattttgcatcgataatgatgttttcatgtttgatgagatttgcctgcaccaaaatcaacacattgagtagagagacggaagactaggcagttaagtaaaatcgcataccagaaaagaatagaaaaacaaacctttagtaaaggaacaagaggaagttgaatcgtagtcgggtaacagcctgggttagccacaagtcgtgccttttttatgtcctcccttagtatctctgttagaccatacacaacttctttctgaaccccgtaggacacttggtaagtataaccattatgaacacaacagacctaaaatcaaggaataacattgagagaaatgtacctgtaactctactgccttgtgaggctgaccataccattcttcatattctgcaatattacgcaaccggaagtcctgaaaagcgtattttagatgggcttataactgaaagaaaaggaacaaaaaaaaaacagttcttcaaggattaccgctgaaagatcaacgattttcaatgcagtaggcagttccttgatgatttcctgttgaaatacacactcatttccgttaagctaagaaaagctttaagaaattgaaatggaagaatgaaaggaaaatgaacctgagttgttccgtgaggtaaacagcagaatacagcatccacagtagaaaaatctgcatcctttaccgagaccaaagtaggtagtttctgtggacagtaaaggttcaattattaatcaatatacaccatcacaaagtaacattgaacagattcatttcttggtatattactagggatagaaatcacttatacttgagctctcaggtgtgggaaaacgctttccattgactggccagcttttctatcagcagtcatcaaagtgacctggaaatgcggatgatttgcaagaagcctaacgatctgcaattcaataaagaagagtaaacttaccatctcatgggtttgaatgaaaccttgaatgcctcatccattctttcccttgtaattttaaacaactttaaagcaacgactataagacttttctcttccttttatcgagaaaagattaactttgcatatgtttacagcttaagctaaattagaaggccaatacccaaaaagtcaaaaacttgcaacaagatgcataccacttaagctctgattcattgcaaaaccaaagagatcactaaaacaaacaattccaagaaaattaaacttgaaacagacagattcaacattgcacaaacctcagcaccagtgtagccacttgcaccaagaagaccaatcctaatatccttttcaggtttaacagaactactagctgaaactctgaagctcattgaagatggcgaagccacatgggatcccaaagtaagcctcttggctcgcttatccgctacacattttcctttcgcccttttcaaaacaaagaaaacccacatttacatgattatcagattgcaataacacaacacaagctacaatgagcttgaatgtggattcagtgggaaaaaaaacagagattttgaagagttttaggaattgaccttgaaccagcatccttggattgaactaaaagccgacgcagtactcattattggattcgattctgcaaaaaacaaaattcaggaacaaaaaaagactaatctttttgctaagaacaagaagaaattagcttctctcaatgtgatttgatattgagagtcaattatggtagtgatgaaacaaatacccgtaaactcttcgtcactctctctctctatacgaagtggtcggagaagttcgacggagaagaagacagcagaaaaccacgacaaagattgtgggacgaaaacgcaagaacgacgacgtttcagctagccctacttaaaacctatcaaagcggtgccgtttcagggatcgaacccgtttactgaacaggctacccgtggttcaacccggtttatcgacgaattaatcgtttgcagaaaacgcgatatgtcttggcgtttgcatcgggtgacgacaaaaatctggcattttggtaattcccagactaagagtaaaggcattcatgtcaattacttgagtaagcgccgaagcggttagatgaatttgtttcaatggagtcaaaagaaaatctagagaaaaagctccgacctttttatttcctctctgtttcttcttgtgtcatcgtcaaatcaaatccaatcactaacagtagaaactgtttctctactgggtatttttttttggcaacccttaaattctgaagtaagagagaagaagaagaaagtgtgagattccgacgaacgggaagaaaaatgataaattttcgcagcatg

SEQ ID NO: 12321 - DNA, 3000 bp, Unknown
  misc_feature (1)..( 3000): cDNA_ID_3024598_gDNA_ID_2214543_Annot_ID_185311 3000 nt of promoter + ATG
aacttcctattgacgaatcatactatctcatggggacagtggatcccaccggagagctaaaggaagatgaagtctgtgtcatcctgtatgctaccaaaattttatttatttttttgtaatataaagtgtggatggaagaataaacaaaccgtgcaacttgcttcattggagttgtgagttagctcttcatttcctcactactttctttttcgttgttttgcagcgggtctggccaaatctcaggatgtgctagtttacaggaatcctggactacattttggagacatacatattctaaaggctacatatgttaaatccttggaacagtatgttggaaattccaagtatggtgtgttcttccctcaaaaaggtccaagatctttgggagacgaaattgcaggtggtgactttgatggcgatatgtatttcatatccagaaatcccaaggtacactgctatatccatcacagttatagtaaaatttcattgctgagacctaacttataaaccgcaacttcctctgtttagctacttgagcactacaagccaagtgaaccgtgggtgagttcttctccacgtagtaaaatttacactggtagacaaccaagtgaactttcacccgaacagttggaagaagagcttttcaaaatcttcttaaagacaggatttagtcccaggtacattctttaattctcgggttactttcaaggtcacatagtcctttgggttaaatatgtcttgttttctgggtttacagctcagttataggacaggctgcagatagctggctagcaataatggaccggttcctcaccttaggagatgagaatgttaaggaaaaagctgaaatgaagaagaaaatgctaaagttgactgatatatactatgatgctattgatgcaccaaaaacggggactgaggtcaatctcccgttagacgtaaaggtcgatctttttccacattatatggagaggaataaaacattcaagtccacttctattcttggattaatctttgacactgtggattttcataatgcagaggacaccacaccatctggtacgggtcttcttgttactattgataatcaaagtacacaataactcatcacgttgaatatgttttaacggtttagctctgggttacctttcaggaatcagtaaacttcagtgttttgaagatgagccggtctctgagtttgacatggagaaatgtaaactctggcacaaggattacagaaaggagatgtgtcaagcgatgaactcagatgatgatgattcctgtaatgaagttatccagaaatacaagcaggtaagctcttcaatttagttaattctaagagaaaagctttaaccaatagccttcatggatcactggttttttgttgattgtaatgctttataaacaaatcattggttgaacggtttcttctctctgtaacaggagttctacagtgctgcagggtttaaagaaagcaagaaaattctagaagaactctacccaaaggcccttgcactttacaacgtcacttaggactatgccatcaagtggaataacgttaaaagttgcgggtttgtctggaaggttgcaggtccggtcctgtgcagattctacgagaagaatttagtaatgtgttcgatttccatgctgaaagagattttcggctgaacactcttactgttctgttctggtgataacaataagtatttgctgtcttcatgtctcataatatgcgtgttaggcaagtaacctacttataggccaaaccaagatgtgtggtgtagtactggctttgatttaggtctaatcttagatttgtcctctagttaacatataattccgtgtgtatgtatatttgcttatggaatagaaaaaaatgatgacctttatagtgtggtggtgtacaaagctatcttctccagtgcgactcctctctgcgtcctcatgcttccatttggattttccacaaccttcttccttccattactatatttttcaagaaaagtagcaaaagtttcttcctttgtgaatagtagcaaatatagtataatatattagcaaatatagtaatggaagtagcaagactaaattcttcagaagttaatgaatagtgcacttgcagagcccaccttcctatatcttggttctggttaagtaagaatcaatttttggaatcacacagtctgatcctttatgtccacatatttttattatgtcttcttgtttggttattgactggaacagaaatagcgtaactcataaacctccattggaattttcgagttctgaggtgtaggggaataataacctctaataatgaactctctccgtcttgcttgtagcaaagtttcttcttcactgaaccgctgatatacctcagtatccatttcactgcatgccaatgcttctttatgattttgctcatgaatctacagactaagtaacttagctaataggtaccaagatgttgtagcgactttggtttggttctaaacttctaatatagatttgttgcctctgctgagtattttttgtgaataaatgcttatgacaatgaataaaattacctctgcaggtgtgtttttgtaaccttgaaacttgtaatatgaatgtgcatatataaataattcgcgattatgcaatgagacaaaatagtccgaaaacgcgattttacttgcgcgtttgcagcgccggcgagaaagtagtggcagatttgtaaatatagtagtgatggttgggcattttgataaaaattaaaaaattaataaacggctagaatagcgtactgcatataaatctccgtgtagtcaaatcaaagtatcaaacagatttacacaaaacttctgtttttttctttttttgaaacctaaaggacgaaactttgagaaaatggcagcaaaagcaattccagagttaaacaagtttctctcttcccactagggctatatattatgaaccctagattatagacactgactccgattttggggagaaaaaatg

SEQ ID NO: 12322 - DNA, 3000 bp, Unknown
  misc_feature (1)..( 3000): cDNA_ID_3024608_gDNA_ID_2214543_Annot_ID_185308 3000 nt of promoter + ATG
tttctaatattattaaatattatagatggtatatatttttaataccaagtgtctggtagctcaattggtaaagatcatagatgaagtttagaggtcgccggttcgagtgacgcttggaacgaaactaagggggtgttattagttaatgaattttaatagaattaaaatccaacactaatcaactgttattcaactaatgattctaaatccagttttaaaatctagtgttattggaactcatctttgtaatcatgcttaatagattttaaaatttagtgttattcaattaagattttaaatatttcattaaaatccagtattattcaaaacaaaaaaacttgtaaaatccttgtatattagttcatttgaaatgaaatctctttggagtttcatgagtaaatcattagaatcaatattcaagacatattgcatagattatattgcatagattttgaaatttatacaaacatatttttaaaagcaacatcagaaaacaaatctaaagcttaaagaattgactttaactccataattgaataacaccacctaatattacatgctgtagttttggatctggaaaaattacggatttcggcctagaaccttcttatattaaaaaaaaaaaaaggtatatatttttattgtcacgaagaatgtgtgtatacacgaacgctcataatccattgaagtcaatttcttgcgataaacgtagtttatttcttgcacacaatcaaatctagttacgtacattagcaaacactgttttagattggtccgagtgattgtttgactttgatcgaaaataaacacacaattttaattaattacctttgaaaatatgtaattacaatgctcatattagtgcaaagaaaaaacaacaaatataatttgaaccaatagtttgttcactagcaatatattatatgtatagttgactctagtacattagtatcaatctaaaaatctaatctaactcgatattaggccatatgttttaacaccaaattagatttgaaaaacatggcaatggaaacacaataatatttttaagtcacatcagagaagaagatgcatagaatatacctagaaaatattcaattcgccaaggagatcaatgattaggtcataggagtaataaactatagaataaaattatgtggaaaaaataataaataaaattaagaaaagaaattgggttgtcaaaaacacacatgtatctaagctgtcaccactcgtgatactctgttcgaaaaggacatctttagattcggcatcacattctggcatctttgccgccaaaattactttattgtataaacaatattttcctcttgagtaagaataatccttcacgagaaagtaaaaattaactttgatcttgcgagcaaaagtagtttacatgtttaatgtgatatatgcaaaataagtgatatattattaaactgtaattggtaattgatgcggatcaccacactaaacatatttgatcattgttcatgtgaaacttaaaatatttttaaaaagtcgagtatgagtaggtgtcttttggagatgccatgttctgatggtttgatttagcttcaagagtgtgattcgacatttgaaaaattaaataatgcatcaaaaaatggttagaaaaactctctcttcaagaatatatatgtcttaatatgcaggttaagaagcacatgaactatttagtctatttcacgtgcaattaagatgtagtcatattccaagagacatgttactgttgcaatcttaggtcgaaagcatcatcttttgtcgaaacaaaagttccaagagtccaagacattaagttacaatatgcatatgatgcgagcaaatcatcacccatttgcacaacttctttcaaaaccgcataaaacagtttttttttttatctcgcttaagagaagcaatttttagaattagaaaaataccttcaaatgacaatgatccatatcttgaaagttatttttgttgcttcagctctattcaagcctcacatcttattcgaaatatccgtaaaactcattgaattcaacaaccacaaaccgtacttcatctttcgagatcctaaaccgtataaatcacaatccttgtctcaaatgtagaatacgatctccatacacaaataattgaaaaaaaaaaacttgcacatgaataatccgtttgtttgaaaaacaaatatctaattttttacaagaatctttccaaaacataaccaatccaacacttaaaccaataagcctaccagttgacacatggtcactagctagagtttataatcttttcaatgaaccaaaaaatgtttcttaacgcggttttaggtttcgaaatataatcagaatattgacaaacatatgttcttctaatagcaataaattttagtatatgctctatacaaaataaatgaaagattataagatttaaatgcttatagatatatacaacacacacgtaaacatagttttttttttttgacataatacaatgatatatatttcttttaacagaatatttatttccttaactattgggaataatttcttttgaaattgatgacaaccaaaaaaaaaatcttatttgaaatttcaaatagaaggtgctgattcttaaagatttatgaatttattaaaaataaaaaatagtaaagttgagttttttgaattaaaaaaggaagaggaaagaaaagggatgtgtccatgattgattgaatggtgtgatttagtttttgaaaaatattattataagtttagttttttagttttctctctggattttcgctggtccgtcaatggtgatctgagacaatttcacgaatctaattggtttcgatgtgtgacagagagagacaacgagacgaatttcaaatctagggtttctcattttttgctcctctgttctctcttcttcttctcaatcctttattgtcgcgaggaagaggacgacgttgaatacaaggagaggacacaaggaaaagaaaagagacgaaag

SEQ ID NO: 12323 - DNA, 3000 bp, Unknown
  misc_feature (1)..( 3000): cDNA_ID_3024612_gDNA_ID_2214543_Annot_ID_185307 3000 nt of promoter + ATG
gagaaatcttgcgtagagttcttctgaagatggctgaagaagctgccttctttggcgatatcgtcccacctaagctgaaaataccattcatcataaggttgattagttgctccgtcgttatgactacttgccatcgattcagaagtctaataattatgtttgcggtatgcaggaccccgaacatgtctgctatgcacagtgatacttccccggatttgaaggttgtaggaagcaagttaaaagacatattggaggttagactctctcctatacacaatgatttcacactttaatctataaatctcaaaagagtttctttggtggaactctcaggtccagactagttctctgaagatgaggaaagttgtgatcagcctatgtaacatcattgcaagccgaggagctcgtttatctgctgcggggatctatggaatcctcaagaaaataggaagagacgcaacaaaagatggagaagctcagaaatctgtgatagcgatggacggtgggctattcgagcattacactcagttcagtgagtcgatgaagagttcattgaaagagttgcttggagatgaagtttcagagagtgttgaagtgatactgtcgaatgatggttcaggtgttggagctgcattacttgctgcttctcactctcagtatctcgaacttgaagatgactctgaaacaagttaattttaaaagccttttttttgtgtttaaccttcttctttgttttgccgttagggtttaaacaaataaaaaaaagtaagaaggtaaaaatgcccttttgggaaattttatttttgacaattttcaggaacaataaaacctggattcttcatcaaagctctgggaaattcaaacgaccagccaatgttgtagaactatacatatatattcgagttctttctatgaacgttcattttttcccaaaactagtaatcagaaattctatcaagtcttttctttcgtattcttaacttgaaacacaaatcaagcatttgaaacaatgtcttctctatatttccgagcaaaagaaatacttggtataaaaacgatattttttttctcgaatttaatttaatattatatttttaaaatattaattaaaaccatttagactaaaaataatgaattaatataatacatttgttttaagattttcgaatttactagcaaagaaactccgaaatttaggatttgaatagatgtaacatatggtacgaacaactagaacattttatttttgaacagacaacaatcaatttactgcatatcaaatttatttttatgtaaatctgatatgtaattagtctgctaccaattttgttttttcccatggttatcattacaaattacaatttataaacagtaaacaaaagggtctattcagtaaaacggttttgtccacctcatccattaacacttctttcttatcttctccacttctctcctttagaatttactcgaaaggttggaccaagaacaaaaacaagactaatttcaagtgtttatttctttggtttcaattttaatgtaatggtttaattttggttctttcctcttttaacagttttgaatatattaagttgtagttcaacgaaaagatcaaatacaaaatctcagatctctcattaaagatttaattttgtacataatcttcttttttttttttttctaaaatttttgtacataatcattccaacatttttgttcttcttaaaagaaacaaaatcgaaatgcttcaatattacacaaacaaaaatgttgggatgattacagactacggaccataatttcttgtttttgctcttggtccaagaggctagctcaagccttgaagaggtaacttgtattttccttgtgttagttccaagatcatgaatatctcattcccatcttagctataaattactaaaaatttttttccgtcaactatataaactactaattacaatttttaaatctggtatgtaatttgtccgcgacaaaattttgtttttcacatgtgcatatcggcctaatgttttcacgttcgacccgaattgcccggttcaactgattaacctgtgattcgaatacttttctagtttgggtttaatgttaaaatctgacaagttcaaaatttaaaaaacccacaaaaagtcaccattaacccgtgaccggtgaaccaattgaaccggccagatgtgggttttaaaaagcttccttgactttagaataaaatataagatttaaacatttattcaatcattgaaaaagttttttcacttcttaaactcatttgatgttgtagattttggtgaagacttcacaatgccgctttaaacaatgaatcgaatggtgagagagacaaccaagattagttgtttaaattcacgatcttttcttagtttatttccgtgattggtgatctcttactatatttgttatcgtgttagatatttagttgaatataaaaaaatgtaatcattttattataattatttgattttatatatttatatatttttagtgtaaatgattttatattttattaaatgtgatgtaattaatttgttattatatttataatttttttaaaatttttattaatattaattaattgatccgtggtccaatccggatgactgggtgacccaaagatagtccggtcactatctgggtcaggtttaaaaacatcggtggtagcattggtaattcaagtctatttgaggtgatttcgtgaaagagattatttttctcgcaacgacaccgttttctagtcatttctgttgtacttctattctttcttatcttctccttcctctggtctttcccttaaaccctagaaatctctggtagtcaattggtctatgaatgggagaatcttcaaccaccgttatccaattgcgcttcgtttgaaaaattcacctatccccaccggatttttttttattttttctcttctgtttactccgaatcatgtactgtaacttaacaagaagccaaggctttcca

SEQ ID NO: 12324 - DNA, 3000 bp, Unknown
  misc_feature (1)..( 3000): cDNA_ID_4359973_gDNA_ID_2214543_Annot_ID_185306 3000 nt of promoter + ATG
gccatacaaaaatctataggtggtgtccgtcattccactaagtaggattttttgtttgaatcatttctatatagtaaattacattccatatagttgtagaaaaccctttatttactttgtatttccagtattttaagtttctcttttatagagcatagtttcagagaaatttcgttttctttcgactatatttccagagacatttaggtcattcaccggtttatgtttttctttttgaattttggattttggggatatttaatttttccatctgtttatgtaattttaaaatatatttttctatgtttttatatataaaattagatgacaaaaaagaatataaaatcttcgaaaacgattgcatcgtcattttgattatctgtttcccattatataaattatggttatattatggtttaggctgttttgatttcttgcattctttaatattttcagaatttattcgaataggtttaattagttccgtacaaccaacatagaaagatattattagtttttgttctattcaattttgatggaatgtctactcctaccaacaggtttgaacaaggattttgcatagttatagtattaaaaagtgactaaaaagtagaaagttagagagtgggtagtgttgctaaacactttattctttctcgtaccaaactgatgtgatatctaaaatgactttgaactgaaaagagagcatagcactcgacaataaaaagggttttgatagatcccactgattatctctgaagcgaaaaacccctttttttctctcaacttgacgattagggtttcttcttctccttgccgccgttggtgtggcctctcgcccaccggcgagaatcttcctctttctccctcctctcccttttttctatggctttagtgatgcttgctcgggctcctgctccacctttgctcctcccttctccgaatccgccgccgtgtgctctaccgcaagatttgaccagtttggtctctccttctgaacctcccgaccctccagacccaccagactatctcgttggagcttccaactcctttctctcgattttgctgttgaggtcttcagatctaggatcagatcttgttcagactttgagccctctagatctgggttttgctttacgatctattactgctgtgtgcagttcgtggtaccaagtatttcctctcgcttgtttggagctttggttctctattccacacctctctcatcctctagtcactctatcaaaaggttttgtctctctgaaaggtagtaatttctttgaatttttaccttcctttggaacatgccttcgtttatacttcagttccctcaccatgaggatgtgatgatttctactagttttaggctggttttacctcaatatgaggctgttatgatcttgcttaagctcaagctgttcttacctcattatgaggattgttgttttcgattggacttcgaattcagcttcttttacctcagtatgaggttggtttgattctgtataagcttaggcttctcttacctcattatgaggatgttatttaaaaactttggttaagagcaattcatgttattgtttctttggtttggtttcttgaaatttcacgcaggataaaggaaaagacatatgacgtcttaacaagaaatgatcttgggtcttggactccagatttgttcatcaagaagtggtggttttcgcaaccccacacctctccgaagttgaggtttttctcacatctcgtaagctcaagaagttggtgctttgtcgcctatgctattgtagccgtatttcatgatgcgttttatccactagaggatgttgcatctccggacagcagatcaccaagtgtgctctcttatttccgaaagctcatctcatgttgcagcactattggtgtctcgaactttagttgcttaactgttatgtatgcttctatttttttctttcgtgctttctgtatgtcatttgtagcagtggtttttttggcctttgtagcctctttgatgtacttgttgaaccatttctccattgttggagagtagaatcatttataaaaagctagtttgaccaaaaaaaaaagatcccactgattttgccaataccaaattttactattcccaattaactgtaccaagcaatatctttttggtttgtaacataattttggcaaagtttcgacatgtatcaaactatcaatcaaatttgcgatactgatttctatatatagtttcaattttatttggatatcacaaataaaaactaaaagtgggttgaagaatttacgaaataattaacataattttggtcggcgctgaccataataattaataaattgcgtcttttagctcttaagtatagtcaaacgttaattttttttagtaaagcaaaagacgtgtcaaagtcaaactaactaaaattagatgttctcatatactgatatacaatcatatttttaattatgaaactatattgcgtcgttgacaaaaaaaaaaacttagattgcatcaataatggttattcttacaaaaaaaaacccgttaataaatgatataaaacaaatgaaaaattaaaaaattcgatatcataaattcatgatattctcttttactcttttagtaattagatctccgaataataaataatcgtttactaaaaacgtcctccacaaaattcggcaagtaaaagaccaaaaccaaatctcttcagggtcaatttcgtaacttcacactaattccataaccatacataaaaacaaacaaaaaaacaaatcctgcgagaaaaatcccaaaaaatcaataatttaaatcactttccatagtttacagacaacacagagcttgcttacgtgttctccaaattttgtatacattattttcacaaaaccagttcctcaacaactagatccatcatctctagcgttcttaaagtttccaacttttttttttattaatttgggccaactttttttggtttgagaattgggcgagggagaaag

SEQ ID NO: 12325 - DNA, 3000 bp, Unknown; identical to SEQ ID NO: 12319
  misc_feature (1)..( 3000): cDNA_ID_3434971_gDNA_ID_2214543_Annot_ID_185296 3000 nt of promoter + ATG

SEQ ID NO: 12326 - DNA, 3000 bp, Unknown; identical to SEQ ID NO: 12317
  misc_feature (1)..( 3000): cDNA_ID_4283538_gDNA_ID_2214543_Annot_ID_185294 3000 nt of promoter + ATG

SEQ ID NO: 12327 - DNA, 3000 bp, Unknown; identical to SEQ ID NO: 12316
  misc_feature (1)..( 3000): cDNA_ID_2708688_gDNA_ID_2214543_Annot_ID_185293 3000 nt of promoter + ATG

SEQ ID NO: 12328 - DNA, 3000 bp, Unknown; identical to SEQ ID NO: 12315
  misc_feature (1)..( 3000): cDNA_ID_1383333_gDNA_ID_2214543_Annot_ID_185291 3000 nt of promoter + ATG

SEQ ID NO: 12329 - DNA, 3000 bp, Unknown; identical to SEQ ID NO: 12314
  misc_feature (1)..( 3000): cDNA_ID_1807082_gDNA_ID_2214543_Annot_ID_185289 3000 nt of promoter + ATG

SEQ ID NO: 12330 - DNA, 3000 bp, Unknown; identical to SEQ ID NO: 12324
  misc_feature (1)..( 3000): cDNA_ID_4359973_gDNA_ID_2214543_Annot_ID_134519 3000 nt of promoter + ATG

SEQ ID NO: 12331 - DNA, 3000 bp, Unknown; identical to SEQ ID NO: 12322
  misc_feature (1)..( 3000): cDNA_ID_1808122_gDNA_ID_2214543_Annot_ID_134521 3000 nt of promoter + ATG

SEQ ID NO: 12332 - DNA, 3000 bp, Unknown; identical to SEQ ID NO: 12321
  misc_feature (1)..( 3000): cDNA_ID_2711799_gDNA_ID_2214543_Annot_ID_134524 3000 nt of promoter + ATG

SEQ ID NO: 12333 - DNA, 3000 bp, Unknown
  misc_feature (1)..( 3000): cDNA_ID_2711795_gDNA_ID_2214543_Annot_ID_134525 3000 nt of promoter + ATG
tattcttaattttctttccaatttggcagctttgtcctcggactgtccaggttcgaccttcgatgatcaaggtgtctaaagatccatccttgtccaattttagcacctttaacgccttggaagtagtaaccacaaggtattttgttcgctgactacttgttgttttaatactgaagttctctccctcaaatgttcttattgtggagtgaagttatcctagtaacatctagttgtttccatcatccagtaatccaccaaaaagaacaaagctatcaaaaaatttggttgcgctgcttagctatggaggaatccctaatgaattctttttggatatattgctcaacacgttggaagagtctaaaagcatattctacaacaaacgtgctgcacttaatggtgcttaaaattcctaacgtttctggttcttttgcattttgtttctggtgcctagagctatttatttttaagaagtcaaattttcggtgcagctgctcttaattatggggaaatggacgaccagaacgccgcacagatgatattggttggtatcccccttgatgaaccacacttgaagaattatctgtctatacttttaaagacagagaaaaatgatctcaaagcaggaaaacttcctgtgaccgaatcatactatcttatgggaacagtggatcccaccggagcgctaaaggaagatgaagtctgtgtaattctgtatgctactcaactcttcttttaccttttcattttgagttttaattgcatggaaaaaaaaaacagtggtttagttttttggaattgtgagttagttgttcatttcgccactgcttcttttcatggttttttagtgagtctgggcaaatttcgggagaagttttagtgtatagaaatcctggattacattttggagacatacatattcttaaggccacatatgtcaaggccttggaagagtatgttggaaattccaagtttgctgtgttcttccctcagaaaggtccaagatccttgggggacgagattgcaggtggtgactttgatggtgatatgtatttcatatcaagaaaccctgaggtaatccaccacattaatcagtaaaattaattattgttgtgacctgattttcttgggtttgctttctggtttagctacttgaaaacttcaaaccaagtgaaccgtgggtgagtttgactcctcccagtaaaagtaactctggtagagcgccaagccagctttccccagaagagttggaagaagaacttttcgaaatgttcctgactgcaggatttcatgccaggtactctcatctctgaaagatataaaagtgtcttggatttgcagaatcaatctttgaaattcatttcctttttcctcgggtttacagcaatgttatagggatagctgcagatagctggttaacaataatggaccgcttcctcatactaggagatgacagggctgaggaaaaagctgaaatgaagaagaagatgcttgagctgattgatatatactatgatgctcttgatgcaccaaagaaaggggataaagtctacctcccaaacaagctgaagcctgacatctttccacattacatggagcgggataaaaaattccagtccacttctattcttggattaatctttgactttgttaaatcacagacaacagaggaaccctcaccatcatctggtaaaggacctttattggttctactatatacatataatcagatcaccaaagaaatcattaatcatgatatgtgttttactgtggtttacaatttagagatcagtaaactcccgtgtttcgaagatgagccggtctccgagtttcatatgcagaaatgtagactgtggtatgataattacagaactgagatgacacaggcgatgaagactgataaggatgaatcagccaatgaagttattcagagatacaagcaggtaaggtcctcaattcgatgtcaccactctggagattcagttaagtctaagagcaaagatctgaccagtagacttcatgaatctccaatgttttgttgattggttccgtggaagtatgtaaccagcaggagacaatcatgcttatcaaagaaatggtttatttgtcgtgtgtcaggagttctatggcgctgcagggtttgaagacagcaagaaaagtctggaagaactctatccgcaagctctcgcactctacaagatcgtttacgattatgccattcatgcaggtgtttcgaaatgcaggtttgtctggaaggtagcaggaccggtactgtgcagattctatctaaataagaaaatgcaggagaaatgtttagtgtgtgcaccatctgtgcttaaagagctttggggttgaagaatacaagcctttgttgttgctacatgtctaataataagaagcgtatgaggcaagtaagttaactaataggtgccaagatgtgtgtgttgtagtgccttttggtttggttttaatgtagatttctcctctggtgaatattttttgtgaatcttttgcctatgaaatgaataaaaatatgttacataacgaagcttttctattaacgaagctcttacctctgcaccagtgttttttgtaagattgaaatttgtaaaataaatgttgagaattttaaacaaaattttgatcgcgagattgtttgtttacttggcgtttaaagcgacggcgacaaagctttggcaactttgtaattttggtgactcgtgttagggtattttggtaaattccaaaataaataacaaacggctatattgtgtagcctgtataaaaaatcttcttcaagtcaaatccataaaatcgattcacaggaaaaaagctttggactttatttttgtttttcccgtgtgttgtcagatcatcaacgtcgcatcaacagcgcaatgaagaaatttgaaaaattgagaacagttccttcttctcactgggtacttgcttatttgtatgagaaccctaaagagacaactgtttttctcgttgggaaaaatg

SEQ ID NO: 12334 - DNA, 3000 bp, Unknown; identical to SEQ ID NO: 12320
  misc_feature (1)..( 3000): cDNA_ID_2711791_gDNA_ID_2214543_Annot_ID_134526 3000 nt of promoter + ATG

SEQ ID NO: 12335 - DNA, 3000 bp, Unknown
  misc_feature (1)..( 3000): cDNA_ID_2708762_gDNA_ID_2214544_Annot_ID_134529 3000 nt of promoter + ATG
cttgaagacttggttcatttaggagaatgactttttaacttccacgcgcttttacgcgagtggtggatatttttggataatgacttgtacttatttaattatactttttatttagtttttttctcttgtgtatattttcttctatatttgatcttatcttatcatgattattaaataaatattcattatctatagattgaatataacttgcaatgaaataatttcataaaaaaaagtaagactgactaattttctcataatatatagtttatgaccataactggtttttagactaagttaagtaattatgagtttgcagctaattatataaaatttaatttcagtataactaaataattaataagaaaaaaaattatagcaatgtcttaacaaataaaagaagttttgtttaccacatttttattttgaaatttcttaacttttgtaatttttataaatcattaaaaaaacttttattttctttcctcagttgtgaccttctaaaaaattaaagacagattctgtttatggttataaacttacgatatataattttatttgtaaattgtaatacacaacaaacaatcttatttgcaatatgctgaaattatgattatttttttgtatctacagtttttttagttaaacaattgtttgaaaagcataccttagcctaatataaaaccattaaacctttgaaagatcaaatggctttcactttcatatgaatatcttatttctactatgtcaaataattgagtatttctttttccttttgtttttacttgcgtgagcaaaatgtaaaggcttccaaagtccaatttgtttttgtttactcgtaatatttgtcaacgtttctactcgtattttatttaatgaaattcaagtgactaatatatacatatgccactggaaaatttgcaatttgtttttatgcttttggaggctgcgttgatacctaacctacttattatagaaaatagacaatgggaagaatcaaatgacatgatcttttatttaaaaacatatgtagatcgtttgaatcaggctgcatgcattgctacctaagtacctaacctacttgcgttgttattgttgttgtgtacttgtgttgttttttatttttcttgttggattcctttgaagcactattttaaatttgtaatatacattattattggataacgatttttggtatttaaaacaatctatcatagatttaagtgaactagattgttttaaataccaaaaatcgttatccaataataatgcatattaattagattgttttatgataatttctcaaataattttttatattaataagatttgaaattttgacaaaaaaataaatagatttgaataacttgattaaattaaaaatgataaatagaagataatattgtaaatattaacatatgtaaattaggagaatggatttaatacattaagtgttacctaaaaatttaatccattctcctaatttacatatgaaatatttatattcttagcataaaaaaaaagtccgactatatttcaatttagatcattgtttgagaaaaatttcactttttaggtaaatgaccaatcacgttacaacatatcagtatcaaatccacataagacatccatgtgacacattgcatatgcaaagagaaaacgagacaccaaaattttgtacaaacaataatcagtcaatccgaggctactatattaaaaaattcaaaaaaaaaattgtgatttaatgatattttgaaagtttaagttttttcgtcctaaatttgaaaactgacacatttttgatatttttacctttgatacatccgtagaaaaaatatttacctactaaatattttcttatatgtagcttataagtataattatgtgaataacactaactaaaatagatattagtttatttaagtttgaaaaaaatgtgacggttagcttctcatagcttgagttttgtggaaactttactttattatattaaatatcatcatatcacataatatgatagtaacaaactaattagtaatgtaccatcaacttttctagtagtaagtactactttgaggaatcttgcactctgatgatatcaggaatatgatcataaacttcagagcatcaactcctagaagaaaccgagtgaggtggtccaaatcaacaaacctgaacacacaagaaccttgaataagactttccaaataaaagtagaaaaaaaaaacagagaattagaaattcaaaaaccatactcttattttctgggacaagggtttttttatacccgaacaatttacaaagtgtattttcataccaaaacaaatttgaaggatgaattcatacccaaactccaaaaacatttgaattttatagctaaactttacatttagtgcttaattcaaaatcgtaaataacgagtattagtcaactgttacagttgctgagtcaaatgacatgtatttgatgttatacttcaaaacgacatcgtgttaaatgttagaattaaagttatacaaaattttgtaaaaatcagatattgaagccacgacgtttcactcatttaggcagcttattaacatttgatcgacaactatcatgagttcgagacctaatttttttgtacaactctataaaattttaattctaacacttaaaacgatgttgttataaactcttgaccaaacctagatatgaaaatacgtttttcccctgatttgatgttagccccacgaaactcatgacccgaacctagatagtttgcttgtcttcaagcaaacgctgtccagatcaaccaagtgaagggacttattttcttttttccaatgattcggaattcaagacccactacactattgggtcttcatataataaaaggcccaataaaagtctccagaggaaacaaaactaatcgaaacgacgaaacagttaaggtaacaaagtaaacaaacacgattcccaaaacacgaagaaagataaagcaaagaaaaaaaaagaaag

SEQ ID NO: 12336 - DNA, 3000 bp, Unknown
  misc_feature (1)..( 3000): cDNA_ID_2708758_gDNA_ID_2214544_Annot_ID_134530 3000 nt of promoter + ATG
ctcgttccttctttcactcgttctcatatccgatttacttactccgccgccggtgcttcttctcctaatcgagctattcactgcatggcttccgattcccctcaatccggagatggttccgtctcttctcctcctaatgtcgcggctgttccctcttcttcttcttcttcgtccgcttcttccgccattgatttcctctctctctgtactcgtctcaaggtaagctttgattgatccgccttacattttcgctaagatccggtggttttgtgtgattatacaacgcaatgttggttagatgatgcgattgttcttgttgatggattgtgtggaaatctgatttcgttagggaaatgaaacgatttcaagctatgtagttacttttgatgttcttgttgatggattgtattggaatctgtaaattcgtttgtgcaatgaaacgatttcaagctttgttgttactgtgtagatgtgaagtttttatgtgaatctggttagttttcgcggtggtttctgtcaatgaactatttctactcgtaacttttgtctatggaacctagaatttgatacagatgttggtttgaaacctctaacgcattgtttagatttatgtggatgttttttaccaatgtaagattggatctgtgttaagaatggagattattctggtgatggattgtagaaactcaatgcattgtaactgtttatataagatcatttgttttttagatttgtgtggatgtttgttatcaatgttatgatggatctgtgtggagatagcttgaaacgtttcgtgcttaatggattgtattggaatgtatagtggattgttacggaaatgaaacattgtcaagcttggctgcatctgttgacggattgtagaattcgtttaggggaatgaaatgatttcaagtttatgtgattaatggtctgtgattactaaatccttgaagatgtgaagtttgtcatgtgttttacttttttgtgaatcaagtgagtttttgtttgctgatttaacgatagagtttgtgtgctgtatcgtttggtaaaccatctttttatatcaaatagacaactccaagagctggatggattaagagagatgtgaaagatccagaatctatagcggatcacatgtatcggatgggtcttatggctctaatttcttcagatatccccggtgttaacagagacaagtaagtttcttgcttgcttctctcttttcaagtttcaactgctgtgaaaaaactcttcttatatacatacttttctttctatagatgcatgaaaatggcgattgttcatgatattgcagaaggttagttctttcacttttagagatttttaatcatcgattttcttaatcacgagttatttagtcgagttgttgttgagcagccattgtaggagacattacaccttcttgtgggatatctaaagaagagaaaaaccgaagagaaagcgaagcacttgagcacatgtgcaaactcttgggtggaggcgaaagaggtctgtttctcttctattgttgaaataccttatgtatcttcgttcgaccttcttatgctcatttgtataacacttatcatcacttctaaaaatgtatatatcgtaattgcagcaaaagaaatcgctgagctttggagagaatacgaagagaactcttcacctgaagccaaagttgttaaagatttcgataaagttgagctgatactacaagctttggaatatgaacaaggtaatgaatgaccaataaaagaaactctctttcgataagagatttagcagaaactaatactcatattgttttttgtttgctatttaacgcagatcaagggaaagatctagaagagtttttccaatcaacagcaggtaatttttgttgtatgtcattatactctaaatagataatctgaatatggttgaaggctttaagcttgttactgtttgattcagggaagttccagactaatataggcaaggcttgggcgtcggagattgtttcaagaagacgaaagcaacattagttctcacttgactctttctttttgtttcttaacgtctagctcagtggagttcaaatactcgtacgtttcaaatttaatcatcttaaggtttttctaataatcttcgtagctgtctttacttgttttgttactatcactaataaaagatagctagctagtgactatcttatagatagctaatgaagatcaaaaaacttaatcaagctcttaaattttattttaagaaagtatcattggttcctcaatataaattttcggatcgttaatagaggtcaaatgatttttctttgttttgttttgtttcaagattttgcacgggttaaaagttgaataagaataacgaatagagtatagacacttcataaagtgtagtttccctgccacacttagatctcctactaacctcacttagattagatttctctctagtctaaaagtctttaaaccttttaccattgggtttcacaaaattaacattagtagttatgtcttttctttttaaaaacatattttagaataaaccatatctccaaccgaaaactccaaactctctccgacgcttatccgcatagttcttttgtcgattttgagcttcttttatcttaacctttaagattttgattttttccgatgttcatgttattaaccacaagtctacaattaaattattatatttttttaaaaatgattcttgcgcgagaagctacttagtggactcggaaggagaagggaaattggtagaggttttaatttgcaaaacttataataatataatagtagtagtcgtaacaaatggtttagctgattattcaacatggaacttttcaaagaatgtttcagttttagttgaacagacaatttttacccttgtcgtaacaagacaaataacgatttttccgactctcttcattcgatctctctccctctccctctctcgatcggaaaagtttgaatctccggcgatcttctcaag

SEQ ID NO: 12337 - DNA, 3000 bp, Unknown
  misc_feature (1)..( 3000): cDNA_ID_2708746_gDNA_ID_2214544_Annot_ID_185351 3000 nt of promoter + ATG
ttgcacccggacgcatcccaagatttctctctgcctcagaatggatttcattgattttcttcgctttcacctgccattgaataagtacaacaacacgtaagcacggataaagaactaaagactgttattaaaagatttgagatggaatgataaaatcttacctcctcacgccttggtacccatttattagctcgaagatcaacaacgttttggaccataaatctgagacgcagctctagctgagggtgccttgctagctccttcaaccgaccaaagtacgtgtcattaatacctcgagatcgtgggctgtcatcaagttgcttcccaatggttataaaaaattggcagagagcttcaacatctccctctgctgggcaagctttagtatcgtctcctaaaagctcctgaacaatatgatgaactatcttctcaggcaccatcttttgcttgagaagttcaccaatcagacggatatttccaagtgtccggagctttgccattttctccttatccattctttccatttcttggtctggattagtcatctgtctgatctcttccttcaatttgccagcaccttcaaatgcctcttggcaattattcaaaagcactcttttaaaggttatttctttcccaccgggttcctcagagggaaacgaaggtagctgtccgttaatatcaaaacacagaagagcatacatctcgcagaatgtgggctgcagtatagcattctcaaaaattagctgtatcacttcctgcaatcaaaggtaagagcaaatcaataccatgaaagagagaactacaacaatagagatcaggaattgaaacaaacctttaggatatctgcggaagtgatgccagcgtcaatcaattgacctttaagaagctcgtacttctccggagtaagcttgtttagaatactgcataaaattgtaaagaatcagtcagaatatacatcacatcaaccttcaaacacaaaagctgaaaagaatagtattagttgttgacaataccctttcacgctcttaacgactcgatctttatctgaaagagctcctcttttagctgaccacggaacctccgctttaatcagcacaggggtaggaccagactgtttcacaagatgatcatgttagcaagaagagaaaactagtaatgatatgccaacacataacaagtgacgaaaacttaccccttgccatgtacttttggcttcacgagggtcgtcccttaaccattctttaccagaggttggaatctgagaacgactatgccagtcacggttatcagtctcggtatgacgatgctgagtatgatttgttatctaataagaccaaaaccaagaatgaaagtttaaaagacagattccaaaacaggaggattacacacacacacacagacacacacttactttactctcggctgcatgattcccccaactctgctcttcgccaaaaagctcaactgcgatttccttacagcgtctaagaatttcatcagagacttgaacagactgcgatcaagaaaacacaaaggtgaatgatttggttcacaaagtcaaaaacagaatcagagaattaagttaaatacctctctgtgctgaagtatctcttctcgggaaaacctcacacgttcaccagaattttctctctacaaaaacataaaatgtcaagagcttaggattcaattacataacataaagtatcaatctttgtccatattcaaattcaacaaccctaaaaattcaaactttgtacaaaattcgattcaaaatcatggaaacgaatccaatcctcgtttaaactcgaattgcgaaaccaaattgaagagaaacagaggatttttcaatgtatttaccttgacgggaaaaggggtttcttcggagccgccattggtaagatcaaaagaggaagaggagctaaagcgagggacgaaaagcctgcttttgccgccgccaccgccgggtctcaaactcaaaaccgatggttcaccttgttgttgcattactcgattctcttgttttttcgcaattagaaggattcaataaaaaaaagttttgcagatagatagaggtatatagtgtatatatatgtgtctgtattgacggtggagaagataaaatcacttcgattccctttttttttttggctgaagctgtgttctgtggtttgccctaatttccttttcttcttctcacgtgtaaatgttattgttaattacgaaaatattctgtatatcaaaataattttatttattgaaaaagaattgatggaaaaatcttacgaaataaagacttaatattgtttttaatgcatcattatcaaaatacaagtctactttcacagaattaattaccaaagtatcctctgtctataatctccaacacaaaataattaatttttgggaaaaataattgatggaaaatcttatgaaatgaagacataattattttgtatttattgcatcactataaaaataaaaatctttgttgcatcattaaaagtgttgttggcatggctcttgcatgagttaagttagttaattcaaagattacctctatctataagttatttatttttgtttcctaaaattatgaatttttaagtaaatttgacaaatatacatatgtataataataaatatagttggtttattagattataatttcttaaaaaataaaaaaataactttatatgcatagattcctttgcaaattataactttattttactccctttaaaattaggaacatgatattcctcaaatttctcccatgttcaatgtgattatgctggttttagtttagatgttaaaataaaaatcctaaaaactaaaaagtaattgggccctttgttttaaagcccataagcccattaataaaaacattgacgtttagcttccaaacattggaaacgacgtagtttcattctccgttgcgttttattcttctggataagagcttcgtgatggtttgaaacctctgagtgaagaagaagcgcc

SEQ ID NO: 12338 - DNA, 3000 bp, Unknown
  misc_feature (1)..( 3000): cDNA_ID_2708721_gDNA_ID_2214544_Annot_ID_185350 3000 nt of promoter + ATG
gtagaaaagtaaatatacaaaactttactttagctctgaaaatcctaccacaagattttaaactcaagaatcgatctgtagaggctctggctcaggctcaggctcaggctcaggctcaggttcaggctcaggctcaggctcaggctcaggctcagctgttatttctgcagctgaagctgaagcttcgttttccgctgtttttttcttctttcttgtgggtggttcttgtggtttccgaatcatttctttgtttgggaccaagataatgaacatatttctgtccctgaagtttttgctctcttcagttgcaagctacagatccgggacaagtttcagtgatccattcatttcacagtcagtacacattgaaatctgatacatactttctatatataggaaagggtggagaacgaacttattacctcccctatttcggtttggaaacgtctgaggagttcaatagcgatatttctgaactcgttttctcgtcctttcatgctcacaatcaccttaacctgtgtacattacaagtagtaaacaaaaaattacattcagacgggacagaactctaacagctcgtgaagaatatgggaacaaccttgtcaccatcttgcaagaacttttgggcagcccttagacgaacggaataatcatgctgatcaatattataactgtcagacaaaaaaaaagcagtaacctttgagaggattcagttctaaagaagtcatttgcaacatcacagacaaacaaaaaaaacgaaagccgtaccccattttaagctcctttaaatccatgcgagttgctaatatgatataacacaaaaaaaaaatacataagctgataagcatatcatctccaactctaagactaagaggggcagaaacagtcaatacttttcttttgctgatcttttttcctcttttgctgttcgtatctgtatttactgataaacgcaaaagaaagaaagcatcattactggtaattacggcacagcttggcatatatcttcaatacatatttagatactcacctgtagtccatcattttaacaaccggaggatctgcatcaggcgatagtataacctgaaaaccaacacaatcaatcatttatagttggttggtttagttacactagagactcggtgtagctaaattaatttatgaagttctgatttgcttagtaaagagaattttatatataacaatgtacattctcttcttcttgaagaagagaataacataaatcattcacaactcttatccaaattctgttaatctaatacggtatcagagcatatcttctaatatttgctttgattctagttcaatcttccatctattagctcaatttcactgattcgagttctgactcatatcatacaaaaaccattgcatatatcaaatagctaatgtccacaagtaagagcatttcaatggaaacacataccagatcaagttcagcatcatcagccattcgaacggcttcgtctttagacactaaaccaagctatagagagcaaaacaaactggaaatttatgagtcctattatgcagaatcaaagctacaattcgaagaatttgagtcacatttaccatgttttgttgcccatcgataagcctaacagtagctgacctactcaaacatagacatcatcatcaacaaatcgaatcagaaagaaattttcaattcacgattaggcttaagaatcctcacctaattgaggagatatcaagagcttcatcaatttcagcttctttcggcctacctcttctattgtctccagagaatcgataacctccaccaccaccgccgaagcggcaagtgacggcgaaagcacggcgaggagaaggagtgagattagtgaaagacagttcggttttggagagacgaagactacagagtttggaatcaacagagaagagtgaatgtgatgatactgttttggttattccggtgaagacggcgttgaatccaacggtgctgctggtaatcccagccatggcgcttcttcttcactcagaggtttcaaaccatcacgaagctcttatccagaagaataaaacgcaacggagaatgaaactacgtcgtttccaatgtttggaagctaaacgtcaatgtttttattaatgggcttatgggctttaaaacaaagggcccaattactttttagtttttaggatttttattttaacatctaaactaaaaccagcataatcacattgaacatgggagaaatttgaggaatatcatgttcctaattttaaagggagtaaaataaagttataatttgcaaaggaatctatgcatataaagttatttttttattttttaagaaattataatctaataaaccaactatatttattattatacatatgtatatttgtcaaatttacttaaaaattcataattttaggaaacaaaaataaataacttatagatagaggtaatctttgaattaactaacttaactcatgcaagagccatgccaacaacacttttaatgatgcaacaaagatttttatttttatagtgatgcaataaatacaaaataattatgtcttcatttcataagattttccatcaattatttttcccaaaaattaattattttgtgttggagattatagacagaggatactttggtaattaattctgtgaaagtagacttgtattttgataatgatgcattaaaaacaatattaagtctttatttcgtaagatttttccatcaattctttttcaataaataaaattattttgatatacagaatattttcgtaattaacaataacatttacacgtgagaagaagaaaaggaaattagggcaaaccacagaacacagcttcagccaaaaaaaaaaagggaatcgaagtgattttatcttctccaccgtcaatacagacacatatatatacactatatacctctatctatctgcaaaacttttttttattgaatccttctaattgcgaaaaaacaagagaatcgagtaatg

SEQ ID NO: 12339 - DNA, 3000 bp, Unknown
  misc_feature (1)..( 3000): cDNA_ID_3024701_gDNA_ID_2214544_Annot_ID_185342 3000 nt of promoter + ATG
aaaaagatgagaggtagggaaaagaagacacgtgtcaattgtctaggtggcaaatgtcagattttggtgaaatgagctttgaggagaaccttaatttattgtattagatttactgagtacacttcaagtttaattgttctacatgtcaaaaattattttgtattgaaaacctgatttagttccaaaatacaagaatttactacaaagatatgatatatagatcaaccatataatcttcatttgctttcgaattaagaaaaagagtatattttttttttaataaaaagaagaatataatccaactgataatgaaactgacaattacttggctaattgggaagattacattacatttctacaagaccaaatttgaccccaaatctggttcggatcctcccaacctctttattaaaccttatataaaacccatttaagctccaaaccataacggccaaactttttcacgtctaaagagaaaaagaattctaggcaagtggttgcaagttttgtttgagtagagaaaaaaatggtgtctttgattagcattgtgtccgtagtgtttcttttatttacaacattctaccactttggtgaggctagaatcattaatgtgggaggatcattagacgcatggaaggttccagaatctcccaaccactctctcaaccattgggctgagtccgtccggttccaagtcggagacgctctttgttcgtatctaattctttcttctaaattatacttttgacgttttttaattggttttgaatattttgatctacatgctagctagttttatcaagtgacattattaccatggttttccacaaaattccattatgattaaatgggtcttaatcttttagcatgttaataaaatttaacataggttgacattttaaaaaaaaaattgatgctaccatagtttcgtcatgatggtcaagatccggatgttagttattgttggatacacttttagtctgcaaaggcttctggtttgaatatcagaagtcttgagttgggtttggttatttgatatgtcaataatccaaatcatttagatatattcaaggaacttaaaacacatttaagatatataattattttttcatatatacgaatgcataagatagtaagctaaggattgtttttgcatgtgacagtgtttaaatacgattcaaagatcgattcggtgttacaagtaacaaaagaaaactacgaaaaatgcaacacacagaagcctttggaagaacacaaagacggatacacaacagtgaaactcgacgtctcagggccttactacttcataagtggagctccgagtggtaactgtgctaaaggtgagaaagtgactgtcgtggttcagtcacctaaccacccaaagccaggaccagccgctgttacgcccactcttcctccaaagccatctactactccggctgctccagccccagctccacccactccttctccaaagtcatctacttctacgatggctccggcgccagctccggccaagagcagtgctgttgggttggttgctggaaatggcatcttttgggcctcgactcttgttgctgtcattgggcttgctttcgcttaaggcttttaacaaaagttcttgaagtttaaatttcatgttatgcatccaaaatctatgttttgcagaataattattatctgaatttacaatatgtcatatctgacattacttataatttaatttacaattcttttgtttctgtcaacaatttattctacaaatataaaaaaaaattagtttcctagcaatgtcaaatcttcttggtacctaaatattttatattgatgtctcattatttattcaattgggtgatgaatgttttgatttcaaggtgaaatccttcacttgtcttgactcttgcagaatacattaatcggagtacatttattgattcacgtagctttcttcattttcagaattcggattatatctacagattacagctcatgtaggttagagttattggaataaaacgaatgttaaatataataagagtatcagagcacctccagtggagagagcctctccaaggactctctccatttttttatgattaaatttccaaaaaattaacaagagagctttgtgttttactttttgttaaagttttcttaaaagagttctctgaaaaaaaaatgaatgatcttgttttcaataacttgtgtcttctccttcatcctcatcgcccttgtttccatcctcgactttactttcaccatcttcgatttcttcaatttccaaaaccaatacgagatggaatgctcagctccatgtccttggaccttgatcatctccattgtatcaaaaccgactattacttatgtaacttatcacatctttatctcttttcaaatgaatagagaaaacaacaatagcaactgtaaagactacaccatgcagcagaatcatttaaactaaagaaacacatagacatatacacaaggatatatatatatatatatataaagcagtggcaccaacctacatgactactattgaagcatgcttatgtacgctttagattcagaatattggaagattagccaaaaaaaaagaaaaagcaagagtaataagaaagcagctttagctaccgttccagaagaaagctaggcttaaaatgacttaatgcatccagtttttaatgaatgatctacaaaggttcatgatgtaataagataatatacctgaaaagacaacataccacataattattatccgaggcaacaacagtctgcattatgtcttcattttcctttacttgaaagtatatatctgcagagcataagcgtaattctattaaattattcacagttataagccaactgaataaatacaaagcaaaaaacaaaaactaagaattctggccaaagaatattctcatgaactccaataccaagtaaacctgagagcatctgggtaccttttttgttcacctgaacaagacactacgggaaatg

SEQ ID NO: 12340 - DNA, 3000 bp, Unknown
  misc_feature (1)..( 3000): cDNA_ID_2708735_gDNA_ID_2214544_Annot_ID_185336 3000 nt of promoter + ATG
aatcaggtacatatatatactacattcatgtaactaataatgtaattgttctggctatgtatgtgattgtaggagctgcacaaatgtatgagaacggtgtgttagcgtacgtagatgttgaatttgtagcggatgttcacattcgagcattcgaggatacttcggcttgtggtagatacttttgcttcaaccaaattgtgaacacggaagaagaagctctcaagcttgtacaaactctatctcctttaatacctatgccaccaaggtaattattattactattattgttattatcattactactatataatttattattttatagttataatatatgatttaggcatgagaaagaaatgcaaggaagtgaagtttatgaagagagattgagaaacaagaaactaaacaagctggtggaagctggatttgcttgttaattacatgaagagagatgttataaattaaagggcaagaaaataacaaagaaattttatagtaagagttgtttgtttacttatttttttaattattgtactctcaattcagtattttatatatctatattttattttattttgaaatgaaaggaaaatatgtgttactcatagaaaagtgagtattttttttttggttttaatgtgagaaaagtgagtatttattacttgtatgtcattatttatggaatatatgatgaggctaggtagcaacaaataataagaaaatgagaaaagcattatacagttttgtactaaactacacatttgcaagctaagaaggaaataaattttgacatgtgcttgatgtaatttatgagttgtcaactttaaagtatatagctaactgttgatgaatgatttatcattaacatttttaaaaaaaattagatacaatttgaaacgtgtaataaatgatgagcatatatccatacattttgtttgtaatgggtttctgatttatccacacttcagtttctgcaagctgtgatgttagacatgataaaatcacacaaacaattcagagacatacaaaatcaggattgtgaagcaggatttaaagtatatagcttagttttttttgtatttttttttaacagcaaaatcaatattcacgttttagacatcagaaaatgaagcaggatttgcaagtttgagagttaaaagtcagtcattaacaaaatcaaaatctcaaatgcatccacgatttattaatacaacataaataatgcaatacgatccaaaagaaactacaaaaataaaatttaaggttcggtcttctcaaaaaagatcaaggttttgtcttcttggtatgtccatcatgaagtttcttctatgggacgttctttaaatttgcatgatatagatcaagatgggttgttgccatatgcgaggatgatgttgaattgcctctgctggaccaacgtttcaaggacactaaaattttaatgtctttggcaggaccggctataaaattttggggtcaaaactcaaacaaaataatttaagattattaaaaaaaaaagtggagccaattatcgtaaaataaaagtattattaacagtatattgaaattttaaagtcttgaaccacacttttgatcatatgagataatatgttttggtggtgttttaagagcaaaactaaaggagatgggaaactcgatatttggtcgatgtgggatgagtgtagacaacttcaaggctgtgaagatcccaacaccggctcttactccatttcttttcaaaactagtcgatacattctcatacacaacttattattaataggtttcagtgttttacatcaaccaattttatattaatcgtttatttatatttattttgttgtcgatgaatcggtattagaaattgagagcttgtggcatggtatatctgtacattcaagtattacagtggagaaatttttattttggactgatatattgttgttatcccgagctaaatttgtaaataggaaacacaaattgaaacttataaagtaaatcgcgagaaaaatcaattgattattagagaaatactaaacaatctgaaatgcaaatcgttcgctcaaagtaagctcacgattacacaacgatcaacatagactgctattgctacatcaccagagtatttctttgtctctctctcaacaatctagaaaagcataaagcttatgagatgtaaaggtagaaaaatttagagaaatatttatcatttttcaattaaaaatataataagagaaaaatgataatgcattatgtttaaataatatatatatataaagaaaaaaatttaaccttgtgaaatttataattttgttagtctaaatatagtatatgtagataaaatataaaattagtgagtataatagatgtgtcaccacttaccacttattacctaaattaaattcattataatgcatattggtggcagaaaaattgtatatgtaatgctgaaaaacaaaatggtatatgtaatatcattcgatagaaacaattcgaacaattggccgcattagaactacaatgacataaaaatgtcttcgtcattttaatttttttcttatcatttttgatgttgtggtgaaattttagtgtaacttttaaaatttatcgattggtgaaatcaaaaatatttgatcaattggttagacgctaaatatttgatcaattggttagaccacaacaaaaatatttaattaattggttagacgattgtaagatattacatcagattaatagcgtctagagaatacacttcgacgaaaaaggaaaatcacttaaaaaaaaaaaaaaaaatacacttcgacgaaacatgtcaatagtcatatgagttgggccttatagtttattgggcctgagtagattattgggcttaaaggagtagtaaaaaacaagaagacgctaacactagacttccaaaaatcaaaactttagggtttcagagcaaactctgtcttcttcaagccgagagcgaaaaccctaagctcaattccgattttgcaact

SEQ ID NO: 12341 - DNA, 3000 bp, Unknown
  misc_feature (1)..( 3000): cDNA_ID_2708742_gDNA_ID_2214544_Annot_ID_185333 3000 nt of promoter + ATG
taccgtgatataatcatatgatctgatgatttggttgattgcaacatttcttttattaccatttttcaggcgtgtcttatagcagacatggtgcaatattttgttgacgccaaacttgagtttgatgcctctaacatctacaatgatgtcaatcgtgctattcaacatgtccatagaagtggattggttcatagaggaattcttgctgatcccaacagatatttgctaaaaaatgcaagtgaaagtccttcaaattatcttcacttgttatattacctttgattggtatattactgaaacagcaatttgcttctcagggtcagcttctacgtttcctgagaatgctaaaagataaaggaaagaagctttttttgctgaccaactctccgtataattttgttgatggcggaatgcgctttctaatggaggtaattcacattattgaatagatctaaaactcttttattttctcgttggaatatcactagggacaatcatttcaacactttttttattttaattagttgtccataatcttcttacggccagttccatatttttttttttttaagtggttcatgacctttattgggttgtgcttattgttcgttaggaatcttttggcttcggagattcctggcgagaactctttgatgttgtgattgctaaagcaaataaaccagaattttacacatctgagcaccctttccggttagttgtcattacgatataaccagaaacactatgttcttgtgtaaaacataatattttcttgtggaattgatcgcttaactcttttattgctattaatccttgtagttgttatgattcggagagggataatttggcatttacaaaagtggatgcatttgacccaaagaaagtttattatcatggttgtcttaaatccttccttgaaatcacaaagtggcatggccctgaggtactctttacaacaagctgatatattccattctgtaacttcatgcttttgaatgcatttaaagacagactaccacatgttttattcataggtgatttatttcggagatcacttatttagtgatctaagagggccttcaaaagctggttggcgaactgctgccataattcatgagctcgaggttagtttaccatacttgatgtctatatagctttttagttgattgtatcctcaaaagtgtttgtacatcatttaaagcccaaccttgtacactgagttctctttatgatgttatttttttggttcagcgagagatacagatacaaaatgatgatagctaccggtttgagcaggtatagtcacaccatcctcttttacttcccaagaatggctttttgcttatacgattttaacattcatgaccgtgatcgtagacatatagtagtttgagatactctaaataaagcaaagacgtatgtgttactaagtttgataagacaatttattgtgcttatattcaggccaagttccatattatccaagagttactcggtagatttcacgcgactgtatcaaacaatcagagaagtgaagcatgccaatcacttttggatgagctgaacaatgcgaggcagagagcaagagacacgatgaaacaaatgttcaacagatcgtttggagctacatttgtcacagacactggtcaagaatcagcattctcttatcacatccaccaatacgcagacgtttataccagtaaacctgagaactttctgttataccgacctgaagcctggcttcacgttccttacgatatcaagatcatgccacatcatgtcaaggtatataaacctgtgaccttaaaagagccggacattttgagttttattgattgatttgacttttgaattttggaattaaggagcttaacgaaaactcttttctacttttcttttcaggttgcttcaacccttttcaaaacctgagatagctttcattcccctaagaactgaacagatgatttcgctagacgagaaacttttcttgtatcgatgacgaatcagacgacaagaaggcttgcaattcaatctcagattcttgctgctgctgatgattcttttgcataacttaaagtggctaacacttgaaaacaaaggatgtaacaattagagattttttgttggttttagttagggattatggtgctactttgaagtttgatttctaaaaacatgaaatatctttgtagattatggtgcaagtttaataaaggcttaaaatgttttaagttgagccgtttattcataagttgcgaattcaattatgaaaaaaaaaaaaaaaaaaaaaacactacaattggagcaaagaagtagatgtatagggaatctagagcattagaatagtttagtcccaataagtaaaaaaattgctagtctcataaatattttacttataatataatatctcttaaaacggataaaatctcaatcccaaataataaatttaccccttcaacattacatgccaatttgaaaactaattaagagatttgtttttattataggtaactcaagatcttaatgatcttcttatagcccttataggaaggtccggatatttcattccaattgacatacaaattttcttcagtcaatttacctaatttaagatctataacttcagaagttggattattttctactaaaacgggaattgtttgtcttaacagaaataaataacaagattggtacataattgcaccttttttagctctacttatttttggtaaatcaattcaaggcttagatttagataaagtttaagcatgtttttctctattttgttcttctataaattactctgttttaagccaaataaaaaaacaaacacaaataccaaaaacaagtcataagaatcaaatggagttctctatcaatccttcaactctaaaggtaacgttattttaaacaatgtcatcctcctaaacatgttttgaaagtgagtttaatttgtgagaacattcaaaatatggtttaattttttcttctattcaacag

SEQ ID NO: 12342 - DNA, 3000 bp, Unknown
  misc_feature (1)..( 3000): cDNA_ID_3024730_gDNA_ID_2214544_Annot_ID_185330 3000 nt of promoter + ATG
tttaccaacaatcaataattccccatcaaaacaaggttttattatatcttagactggttagtaaaccaatagcaactatgagaaataatacctttgggaccttaagtaacttcatgtgtgcttcgtctgctgtcttctgtcctttccttgagttgcatcttgaacatgcagctacctatgtttcatgaaaccaattgaagaaaacaatttaacccatcttcaatattcttggctacaacatatatgctacttcgatatcaatcacatactaggttttgccaagtccattctccacctcgagaaaccggcataacatgatcaatggtcaaattttctcgcgaagaacaatatctatatcccaaataattaaagttctgtcagcaacaatagtttgattccgcaaaaacagagagatatgattgcgagtagagatagaaaaccactcactgacaagtataatcgtctcgtagtaaaatatttttacggctaagtgagtttttcactcttcttcttttaacaacctgaagcaaatgtggaacctgaagcaagacaatgaagtaagcttcaaactggcaacaagagataaaaactggctaactaaactcatattctacatacccttaatacagctggtatgtagaacgaacccgtaggagaactaacagtctgatcataatactccaaaacgtcggcctagacaatgcacaaaacctgaattaaagatcattatacaaataagcaactatatacctactttttacataatacaaatcctgcgtttttgttgattgggaaatttcttgcataatcgtattagaaaacgtcattatgtcattatgcgtgttaccaatcagaccctaagtatcaacatgagttaaaagtcttttggcctgaccttatccatgtactcgaggcagattgcgcgcttccagcaaaccacattgaccggcctacagtgacacaacatgcttgaacttgaataaagagagaactaatgcttcaatcaactatataactacatatattcgtaacacaaacgaagaatttccatatatctcttttaatatatcctgttctaagatcaatgaatacattgtaactaaaaataataaactaaaatgtaataatacaaaaaaaattgttgacctgtatgaaatatcaagaaccaagcctctgaagcaagaaagatgatcatcagtctctaaaccatcatcgtctccatcaaaatcccactcatcgttgtcttcgtcaatatcaagatttttctcggtgttatcgagatccctaattttctttctcttataaggaaaagagtaagatgagaagattctagcacaaaactttagtcggctcatgcgtattggaaccaaaggagatccaccaccggccatgtaaaggctctgccgaaattggtctctcgaatctacaccaaaagataatccatcgttgcttgagagaagcttaagtctagcagagaaatgtgccatttgattgaaacgaaacgaagaagttagggtgatccaaagtcttggaaaattattaggaagagaaattgtttacacaatttggacttgagcagagccgttaaccacaaactgatttctatagaaaaaatatcatgctctataaaatgacgaatatggcctcttatctttctaccaagaaattagaaaaaaaaaaaaaaaaaatcatattcgacgctgccgacaaatcacaaattttcgcgctaagctaagtatcgatttttagtttaaaatttggaataattgttactcgttatataaatttggaatttaataaaatgaaattaaaaatatgtatagtttgatagatcccaaaaagtattcaaatttacataaaaatagaatataattttgatactttttgttaaattttttctattaatataaaaatttgaattgtttaatagaaatttcagatatgttaattttcaatgataaaaataatatttcagatatgtgaagaaaaaaaattcagcatttcattacatttatataaaacacacaaagaatttttgtgtgtttgaaacagtacaaactatagttacaagttacaacgtatagcacctcatgaagaggcaaaagccaaaaagttgcagaacctgtgaaatagtgtttgatatttccatgtatgatgtattgtcttaagacctcatagtttcgaggttatgcggcttaaagttgcttctatagatccgtgaggttcattggtttggcaggtacacatcatctttaaactgcaaatgcaattcattggaaacgattcatatcctaaaattattggcttttatgcaagtttttttttgttgtctgattttaagtttataactatgtactactgctgctacttttctacttatcattttcgtttacgtttcgtggtttcatcataaagacaacatcaaatagaggttcttaccttcaccattgaagggttttgcttggttgaaagtgtatatttggcagttttaggtgaatcgatgatacatcaacgaacctgatcatgttaataagaacctttatcatggtaagaatcacataatcacacaaacagcaaaataaatatatactgatatgatgataccttttcagtacggcgcttcccatgaggaagagagtgcgttggacagaagagctgtacacaccagtttctggtggaccaaagaaagtatccattaggactttctttacgtctatgaacttctcgctgaaatagagtccctttgttgggatgcttgcaactgactcaaacgagtatgtcatcgtgaacgtgtatgtcggttctaagaatcaattacagataagaatgtagcattactaattaactcatacctacaagatattcgacagatacgttattgtctgccttaattaaaggcttaccttaaaggtaaaacaaagttttgggaatcattaaatagttgtgattagctcgtgtttctaaggcttctcgtgttttttttttgttttttttgaggtt

SEQ ID NO: 12343 - DNA, 3000 bp, Unknown
  misc_feature (1)..( 3000): cDNA_ID_3024738_gDNA_ID_2214544_Annot_ID_185328 3000 nt of promoter + ATG
attaaaagttaacggtgacttaaacccgttaactaaattggtcccttagttgatttagcgatatgtcttatttagcaaagtcaatgaaaattaacaatttaattggaaaattgattaaagttggtaaattaattaaccacaagaaaagttcacactttcgattttttttttctttaaagttttatgtgtatgtttttttttcatacattgacatcaaatattctcacaagaacatgtcgatcctcgattcctagtctgtgcagttgcgtcagagtccaagttcacttgcgaccagccgttccgcagccgtggaactagttaacgacaagatttacatttttgggggagtgtcaaatgtgtgaagagggatacgaagagatccaagcgccagtctctgaactatagaaaaaaggttttaatgcaaacttggcaagtcgctaatacatgcatcaccaccatgttagcttttagtgcagtatttctgctggaatgacgcaatggctggatacaatggcaagctgtcgtttttgtggcatgaaacgaacaaaatgcagatttacttttcaaacgaataagtctagatctcgaaccaccctcatatatatctaactggtacgatactctaataaaatcatagtaagtgtaaataaaatatttataatgtttaattaggttaagaaataagtctctaaatatgtacagtccaagctcaaacctttgaacatcatcccttatatgtaaaggatatgattatctagatggtcattgatatttcatataagattttagtgcaatatgtatatacaaaataggtctgataatattttacaaacatattattgtacagattcaatcgagttttgctctggcaatcagctccaacgccatagcaagacaaattggtaagagtgttactggtaatgaatatctacaatgaagtaaagagaaaatgtctaacaaaaacattgaaatataaaccatttctggtccttggtggactggtgatgttggtcgtggtggagcaaacataagtaactctcagtttagtctcctcaactagatgccccgattctttgttaaactgaatatatagttgatctttagaggaaaatgaaacaaatgctttaaggaatcaaaaaccaaagtgtgaattattcatcaaatcaacaatgtgaatgatcagtgccgtctcaagagtaacttctttggctgtgactgcaggactagcttttactctttgaatcataaacttttcattgctctgcatatcagatgggccgggcttccttttgagcttgcatggttactagataaacaccaaacaaagattcatcaaattcctagtccaagaacaagtttggcagttgaagggaaaaaaaaagtttccacaagaaaaagatttgagaacggactttacaagtcgactttggaagaataagtccataattaggcctaacgcaatagtttttcggatttgtcgtcataacctcaaaaaaaacaaaaaaaaaacacgagaagccttagaaacacgagctaatcacaactatttaatgattcccaaaactttgttttacctttaaggtaagcctttaattaaggcagacaataacgtatctgtcgaatatcttgtaggtatgagttaattagtaatgctacattcttatctgtaattgattcttagaaccgacatacacgttcacgatgacatactcgtttgagtcagttgcaagcatcccaacaaagggactctatttcagcgagaagttcatagacgtaaagaaagtcctaatggatactttctttggtccaccagaaactggtgtgtacagctcttctgtccaacgcactctcttcctcatgggaagcgccgtactgaaaaggtatcatcatatcagtatatatttattttgctgtttgtgtgattatgtgattcttaccatgataaaggttcttattaacatgatcaggttcgttgatgtatcatcgattcacctaaaactgccaaatatacactttcaaccaagcaaaacccttcaatggtgaaggtaagaacctctatttgatgttgtctttatgatgaaaccacgaaacgtaaacgaaaatgataagtagaaaagtagcagcagtagtacatagttataaacttaaaatcagacaacaaaaaaaaacttgcataaaagccaataattttaggatatgaatcgtttccaatgaattgcatttgcagtttaaagatgatgtgtacctgccaaaccaatgaacctcacggatctatagaagcaactttaagccgcataacctcgaaactatgaggtcttaagacaatacatcatacatggaaatatcaaacactatttcacaggttctgcaactttttggcttttgcctcttcatgaggtgctatacgttgtaacttgtaactatagtttgtactgtttcaaacacacaaaaattctttgtgtgttttatataaatgtaatgaaatgctgaattttttttcttcacatatctgaaatattatttttatcattgaaaattaacatatctgaaatttctattaaacaattcaaatttttatattaatagaaaaaatttaacaaaaagtatcaaaattatattctatttttatgtaaatttgaatactttttgggatctatcaaactatacatatttttaatttcattttattaaattccaaatttatataacgagtaacaattattccaaattttaaactaaaaatcgatacttagcttagcgcgaaaatttgtgatttgtcggcagcgtcgaatatgattttttttttttttttttctaatttcttggtagaaagataagaggccatattcgtcattttatagagcatgatattttttctatagaaatcagtttgtggttaacggctctgctcaagtccaaattgtgtaaacaatttctcttcctaataattttccaagactttggatcaccctaacttcttcgtttcgtttcaatcaaatg

SEQ ID NO: 12344 - DNA, 3000 bp, Unknown; identical to SEQ ID NO: 12336
  misc_feature (1)..( 3000): cDNA_ID_3024743_gDNA_ID_2214544_Annot_ID_185326 3000 nt of promoter + ATG

SEQ ID NO: 12345 - DNA, 3000 bp, Unknown
  misc_feature (1)..( 3000): cDNA_ID_3024675_gDNA_ID_2214544_Annot_ID_185354 3000 nt of promoter + ATG
gtcccgtaaaaaaaaaccgcagtacaccgctaatttaaatatataatgaaaataaatgttttacgggcttgcaattgtattttagtttgtcaaacaatattttgttttaaatagttgtcgaaatctagttcaaattttggagaaataagtttagtgaattgataagaaatgtatttaggtgtgttttgcttattttaagggattgcaattgtattttggtctgtcaaatattttttgttttaaatagttaccgaaatctagttcaaattttggagaaatttgcatgatatatgagattgaaatatatttggaatgttttttatttgttaattaatttattgcaaaaaaaaaatcaataattaaaagccaatagcagccattgtaaataagttccaactccaggatttatttcacaaaatggaagcaaaaatgtatatatagattttgaacgggtcagcttcatcgttgctgatttttttatgggccgatcactattttagtggaccgtctttgcattgggctgattatctcttaatgggctgtcttcgtcttgaaacgagtcaaaaggaagggtgttaattccatctccaacatttcattcatctatcttacacacacacaaaaaaaaaactgtgatttgttcaattttttatattttaataggataaagatctatttaggagtttggaggttagttcctattgcatacttcatcttcggtaaaactaaaccgcctagaggtatcgatctctggcttgaagagagagttctcgaggaacattaatagtgtgtagaatggtttatgtaaactgagaatcaattgtgactacccttggttaaaccggaaccttcttctataaaaagaggttttcattgtaacaaacacttaaaagaataacagaataaacacaatcttaaatcatcgtttgtatcataaacgtcattaatctcaactaggtcgtctctataaatttgcatctatctgtcctatcgtatttcatatctcaaattagttttttcttggatttataattattttcaatatttaactataaatctatattattggattattattattattattagattttgtttgttattgttcaagaacatgatgatctgagcacgagtttagatatagaagctcttagaaaaaaataagctgagctgagctaacttatgaaatatccgaactcattatgagctgactaatatattgaagctaactcacagaaaaagctatcaagaaattttaatatgaaaaaactaaaaaaataaatgaaagtaatatttttttctgaacacaaaaatgaaagtatttactatatatatactcttgaccaaaaagagaaatgatatttttactcacgacattacgtcgattagagaaagtgtggcgtaaatcacgtgagatcaaaataggaaactcagcaagaaacctattattcacttatattgatatgacctgcagtgaggttacttatttgatttaaaaaaaaaactgatttatttggtgtgcataatgttttttgttgttcactgcgggccggtcgatgttttttaactaagaaaattaaattttaagttcttgctaaaacaattttgaattttatattttatttattttgttacagtatttaatattatataaatgtattttgagtggtaattttaggattttacatgcgctataccattccaaattaatatcgacccaaacttatctcacagtataaccccattatgtgaaattaaatatcactttattatttttcattccaattatacttttatttaaaacacatattcatgagtcacccatagtatgtttgcttatattgtgaccataatattcctttcgttgtgatccatgttgccaaaacagacatcaattaatgaaattgtgtgtatttcgtccatgtttactcaaaaaaggtcaatatctttaatgtgatcagcaatgtgacttacgaattccccgaattccaccaaaacacctgattgcatcacttttttaatgtttctgaagcttacaaatatcatgggcaaaactccagcaaagccataaatggttggagaagaaaatctagttacatctaagggatggtccgataggtacacaaatgcctctatcatagaacttatttcatctctttcactacttttaaataaacatctaagaacaccttctacgtcgaaaacctacaatgtggcttaaattattgtacgtaggcaatatatcttctgaatttgcattctccgaccaatctatcatctgctggaaatgaataacaagctccactgaaatctcattgaaattagaaaatactctatccactttcatcattgagctgccgcaaccttgactaaaagcaaagaaatcgttttccaaatctcgagcttaccatatattcgatacattcatgagataaagcttcattgaagccaacatccttcaagcctaatcaataaaggccacacaagttgtagttttgtcctccattgataaaacaaattttatgataataggaataaggtacaaaaatatattttttgatgcaatacatgttgccaaaacgtatatcaaccaacgaaatcttatgtactttgtccattaatcagtatgattcacaacttccttaaattccaccaaaatttcggactttggcctattcaaacccattaatgactgtttaaaagctttggcctaaagattaatgttaagatgttgtcatctttggtttccattgatttaatcatttctttctttattatgcacacttggccaagtgttatcattttgagcaaaaccaactataccggttttctcctaaccggaataaaccgaagtaaaccggatatcacatcatccgttcactctctttagctcttaaggcgaaaaaagcttatcttcttcatcatctctttcctcaatcggagtgagcgcaaaaaatcaaaaattcgccgagagcacaaaccctaatggcttctctctca

SEQ ID NO: 12346 - DNA, 3000 bp, Unknown; identical to SEQ ID NO: 12335
  misc_feature (1)..( 3000): cDNA_ID_3024747_gDNA_ID_2214544_Annot_ID_185325 3000 nt of promoter + ATG

SEQ ID NO: 12347 - DNA, 3000 bp, Unknown; identical to SEQ ID NO: 12343
  misc_feature (1)..( 3000): cDNA_ID_2708754_gDNA_ID_2214544_Annot_ID_134531 3000 nt of promoter + ATG

SEQ ID NO: 12348 - DNA, 3000 bp, Unknown; identical to SEQ ID NO: 12342
  misc_feature (1)..( 3000): cDNA_ID_2708750_gDNA_ID_2214544_Annot_ID_134532 3000 nt of promoter + ATG

SEQ ID NO: 12349 - DNA, 3000 bp, Unknown
  misc_feature (1)..( 3000): cDNA_ID_2711861_gDNA_ID_2214544_Annot_ID_134534 3000 nt of
gaaagacgattccgaattgcgagccaagcacaaaaggagaattttggcgttgcgtgagcgaaccaaactcctttatgccacgccctctgatttgatgaagttcggatatggttccatgtgtcttttgtggagaatctagccttaaagacgtcctctttccccctccagaggatggcatcctctagctctatgttccgatgctggtatttctgaagcagaatctcctcaaactcatttagaatctcaactcgatgtctcttccgtcttcttcgactccatgcttcagctagtgtcatatggcgagaaattcccatgtcaatcgctcctcgggctccagtcaggtttattaagggacctttctccgaccagttatcaaaccaaaaagatgtgttgactccattgttcacttctatcttgcagaaactttttgcaacttctctgtgttttagcaaccttctccaaatccaagaccctaacgttgagtgcgtaccaatggaccagaatgattctttcttgagtaggttcatcctagtccatttcacccacaaagaatcttgacaagatagcaaacgccaaatcagtttcagactactaaccttattcgcttctcgcaatgattgtaacccaaggcctccttccttctttggtttacaaatctcatcccaagagactttcgctttctttggatttagctccggtccagaccacaaaagagctgagctgattctattaatttcattaatacactctctgggcagcctaaaagcattcatccaaaagtttgtgatactccacaaaacagaatttattaaactcaaacgacctgcaaaagaaaggtaacgtgaagtccacattcctatccgccgacgaatttggtctattaagggagaataatctgatgttgtaagccgttttgtaactagaggtaggccaagatatcggaccgggagctttcctaccccaaaagagtacctacttgacatcaactgacgtgaatgatcggagacaccagccaaatacaatgttgtcttttccatgcaaatttttaaccctaattttgctgcaaactggttcagcaccttgactataccatcaaccgagcgaattttaccatcggtaagaatcatgagatcatctgcaaaacataaatgagttaatccaagagttttgcaccgggggtggtatccaaattctctcgcccctgctgccttatcaagcattctcgacaggacatccatacttataacaaacaaatatggagagagggagcatccttgtcgaagacctcgagcgcttcggaaatatcctgctaactccccattaacttgaatggagaaggatgccgtggacatacagagagagatccaatgaataaattccccggggaagttcattgcagccaaaacgtgagtaagaaaagaccattggagagaatcaaatgcttttgatatgtcaatcttcatagcgcatcgtgtagagatgctatctttgtggtagtcttttactagctctgttgctaataacacattttctatgagtaatctatctttaacaaaagctgattggttccccacaatgaacttaggaagaatcctcttgagtctgttcgccaaaatctttgaaatcgccttgtataagacattgcaacaggatatgggtctataatcctttatttcccgtgcttccttcttcttggggattagagctaagatagttgagtttacaccctttggcaaaaaaccctttgcaaaaaaagactgaattgctatgataacctcatcaccaataatctcccatgaagctttatagaactcacttgtataaccgtccggtcccggggatttgtcctttggcattgagaatatgacttttttaatttcttcccctgttaccacccttgtaagcaacctatgatcatcctctgaacaacgaaaaggtagcaaattttctagctcctctacacacatcccttcataatctgcagggattgtttgtaaaaaatcctgaaaatagttcactgcctccgtttggatatcttgttgactagttacaaccaacccgtcacgtgtaactatttctcttatggaattcactgcctctcgagtagttattgctcgatgaaatgttttattgtttctgtccccaacatctaaccagtgtagtttagacctctgcttcaaaaatttctcctcgattttcaaattttaattcaactagtgttctgctcatgaaattttcgattagcatgtaactatgttgacacaaattgatagacaaatccattttacatatccactgttttacacgatgtgacgcaacacctgtttgacacttgagtgagaatttcttgttgggagaatctccttgcaaagccaatactctatccacgaaatccatgaatctctgtcgatttcctttccttttcggtttattcgcagagtcatcaatctcgatacaagagacaaaagcaatgagatatcgccacctcttggagagaatcgaagtcagagcagcctcctttgtgttaaggaaggacaatatttgataaagaagctcgtctggtagactgctaacaagatccatcgtctctgaacgaaagaatagaaacaggtattaaaggttgggacttgggagggaagcaaagaaggcgaaaagtagatttagggtttgccaaagtgaagagaggaggaagtcacagagaaaaggttttagttttcctttacgtgccctacataacaaatgaaacgcagcgttttataaagtgatgcgttaaaacaaaacttgtttcattgggcccagaattaagattacaaagctacatagcccataaggcccaatactaaaaaagtcatccgaaatattttgtttcccggatttatctccgtcgacgataaaccctaaccgccattatctatttcaatgacgtcatcatcttcttcatcaaaatccaaattctcaagtccactctcagaaaaaagctgactttctccaccaatcact

SEQ ID NO: 12350 - DNA, 3000 bp, Unknown; identical to SEQ ID NO: 12341
  misc_feature (1)..( 3000): cDNA_ID_2708742_gDNA_ID_2214544_Annot_ID_134535 3000 nt of promoter + ATG

SEQ ID NO: 12351 - DNA, 3000 bp, Unknown; identical to SEQ ID NO: 12340
  misc_feature (1)..( 3000): cDNA_ID_2708735_gDNA_ID_2214544_Annot_ID_134538 3000 nt of promoter + ATG

SEQ ID NO: 12352 - DNA, 3000 bp, Unknown
  misc_feature (1)..( 3000): cDNA_ID_2711853_gDNA_ID_2214544_Annot_ID_134540 3000 nt of promoter + ATG
taaagtattgtttcccattaacttcgaatgtgctagattcgatttttcttttcatcgaatttttgcagaagaagagtatttattcaatttaaagcagaaggaacaagttcggggaacgaacacaataagctacaaatgtgtagcacaagagtttgaagcatatattattggtgtaatttgtgtttatgagaatattggcccacgagaaatgtattataacaatctttttaaaacgattcaaaaagtaatatcaacatgctttacaacaaaaaaatgagaggcaaacatcaacttttttcgtaaaggcaaatatcaacgttttaatttggccactttaatttttttgtgcgcaaattattgagaaaagtgatgctgcttcttaaataatggttgtaaattacagcaattagaatccgatgattctatgataggttactattgatgataattgatattattttcttgtaacttttaattaaaaataatggtaaaaaataaatcaatcttgatacaaagaaaaaataaatatcaaggactttcttttagatgttctaaacttttttttctcttttctaatgtaaacttttcctgacccaaactaaagaacaacaagtattggctaatgtgtaccaggtagtaagtttcgtatatttgtgttaccaaattcttagtgttttttactcaagaatattttggaaatatatagggaaaaagacaaagaagcattgcgtaaatgatcacagaacctgcatgagaaggaaaatagggagattggttgcatatcatctcgctgctgacgttattttgatctcctcaaatcggactttggtccaactactgtagttcaattttaatttccatttctagcttagcaatatcaaactaaattttttatacatttggtcggaatatccatttaaaatacttaaaaaacatatactagatattatcaaaaacaagtagagtaaaagtctcttaagtccgcaaatgtgttaaacatgtactaattttttttaatgaaaattgtatttatgtcaggtaaaatatttacaaaaacatgagtgtgaaataatccctcaacacaaaataaaaatgacaaatcttaaacaaaaatggtttcttcactatgagtatgagaattatctttataggtgcaaatgcatcaaagcctaattttttaaaaaagtcaaaagtcaaatgtgacaagaaaagatgactagaataagaaaaatgtaatactagttcatttgttacaacggaaaagaatggggccattagtgggaacgagaaaactaaatagacgaaaaaggaaagaaaacaaaagtagagggacttgtcagaaaaaatgtaacatcacaaatcaaaccacatcaggcaaggcaaaagcaagcctctttccgtattccagcctttttttcttactattttctcatcctatctcagttttcatatgttgtattataaaatatcttttctaaaaaagaagtatcgttatcgaattagatggcacaaaaattaacgttttttaacctctggaggtaacattttcaatcacgagattttacagtggaaaaatacggaagaaaataagaagaaaaaaaaaagacaaaaagaagagagaagaggtgcacgttagcgtagatcagtctcgtacccactgcggactggttacaagtggtgatactggtacagtctacacacgtcaaatctatgcattcttttttatttttacttttttactggtgcagttgtgctataaattttatcttgcaatttttgttattgtgatggtaagaatacctttatcagtgagtcatatttgtgggtgataaatcagactaggggaattttcagcttatatactcgagctttgcaaagttcaaagtaatctgcccatagaaattagaattatgagataaatgcattcttttcattggttactttaatcaatcataccacagttttatacggtaaagtattggcatgagttcattttttaggcatagttatttttttttgttatattctttgcatgttgttatatatgtgtctttgctatattcataatcataactagcatcatcgaagtaacatgttcgcaactcgcaagtcgcagtcgataatctgtttttttttttgtttttgttttccattatatcgttattaggtatcagtgtttgtaggtgaaatttccttcaacacgcctcaaatattttgttaccaatactattcgtatcttgcctcctcccattttatacttttcagaatttcttagaaaatagttttgaaaattctgaaaatattgtaaacaaaaagaatatgctctgtttaaacttcctttttcttttttttacggaacataaataaataattttgattgagacacttctcactaatttatacaaaaaccaaaaaaagaaatgaatataaaattttgttattcttttttgaatacaaggacttattcatttatacttttattttgtttccgttatggtctctccattgccaccattatttatgtataaaacaaactttcacaaatttagcatatacaaaaaaaaaaaaaaaaaaaaactcgaaaagagaaagtatcatcatccaccaccatacgggtccgtatcagctttcctacctgattctccctccccacaaaccacaacactacctacactctctcttgctttctctcctctctgttttttctagctttctctctcacaaaatcaaaactttttttctgtgttcattatcatctccttaaattcataacaatacactctcataattcttctctgcgtaggagagacattgcagaaataaaagagtttttaatagacccaagaaaaagagaaaaaaagcattcatttttttcttgctttgttgctttgcttttgcttttctgtttctcttcttttgtgggcacaacaaaacatcaacaaagtaatgattttgtgttcttccttctccttctggtaatctaatctaaagcttttcatg

SEQ ID NO: 12353 - DNA, 3000 bp, Unknown
  misc_feature (1)..( 3000): cDNA_ID_2711846_gDNA_ID_2214544_Annot_ID_134542 3000 nt of promoter + ATG
aatgatttttttcattttatgaatattgtttatatatatatatatacatatatacatattgtatcgtgattggattatttttaatgcatacgtaggaatataatcttgtatatagttgtgagtaaaaaaaattagatagcttctttgaatggttcttgtatggatttttcttcgaacgtgtacacaaatgatcacgtaagaattatttttctttatataaattttataaaattagatacagctacttggaaggttatttattcaatctaacagtacagttgacaatttgatatggaacctcacatttcgtataagtattaactaaagttaacttattctaatttaagaacacaattattggataatatatgtccagctaatagctagagcgaagggaggcaaagtagcgagagcaaggaaaggaccagagctttgccttggaaacataaccatcgtgaaagaggcagtgatgccggaaaattacttcggcgaagaagttccagcgaatctgaggatcataaaatgtcatcaggatgaagttttggagcttccggaaaatgcaaaactgttagcatattcaagcatgtacgaggtagagatgtattcaatcaaagataacttcctttgcattcagggacatcctgagtataaccgtgacatcttgttcgatatcattgatcgtgttcttgccggaggccacattaaggtttttttctaactctccctttgtagaatatccatttatttataatttgtatcctaaaacaattgctacttacctaattaacttaatgtgcagcaaaactttgccgaaacgtcaaaggcaacaatggaaaagaatgaagcagacaggaagttttggcagaaaatttgcaaaaacttcctcaaacgtcaaccctccttattagtttgactcacaaatcttcatcacacttgtttaatatatattccaactccatgtatcaacgttacaatattatttgtaatgtatgacatattgatgtgttgtatccataatataattaaataaaagctttaccctcactaacccagaagcttctttatgctccaataagttttactaatgccttgatagaaatgagcctcctttgcgccattaattagtgggagtaatcgtatgttcggattctggtattttgttatgtttcatgggcttttaactcaaaattagtaatttgttccatttccattaattatattcaagtcctttttcatcttactcaaaattaattggtcattagtcaaatgctccattcccattatattcaagtcctttctcatttttccaatgtaaaatatttcttcacattcaattgtcttagttatttggagtaagttattaagttttcatataaactaaatgtgaatatatatatatatatataaacaagtttgaatgtgtaccgttttcaacattccatattttataaacaatatttattataaaattatgaaaatattagaaaacaagtaagtaatgcactaacaccttatgctccgattaatcgacataggcgttaaacccttatcatatgcctagttacggcctaagagcacgtccaacgtgggtctctttatacaggctcattcacttaaaaataacaaaaatatttaaaaagtaaaagagggatgaaagagagtctctgaaagtcctcatttaagggacgttcccacaaacatatttgcacgtgtaatcttatcaatggtcaatttatattaaaaaactaaaatataattaaaataataaaatattattactttttacttttttagggattttgatagtcccaaccatggtacatgctctaagagcatccttatcaatgagttcttaagaacatgaaattttttcttaaaatattatataaaacaaaataagaattaaagatataagaaagggttcttaagagaggaaaatggtttttagataagagatatttggtacactttttcttcttgttaagagcctactaatatttagttattattttatatatcaaaatgttaagaattttgtctaagaacccaccaataaggatggtctaacgatttttttcttcaaacaattgatttaaaacagtgtattaaaacccaatccaggatcactacgagtctacaagtcaattgaataatagattttcaattaaataaaaaataatccatattagttattttttttgagcgacataatgaaatatttattaaaaaattacaacaaacataatttatacaatatattatataaatttaaagaaaattttaaatttcaattcatattttaaacacgaatagtttaaccaataatattatatcatatattttgatattgaatccgaacttgattagtaggattatgaggcttatcgtatcagctgtgatttgcggtcggatctgaatacattgatttaaaaaggtgggaccgtaatttttatagtcagtttatttttatttatcttatgtgaattttgtgtgaaactgtattttaatttatgctgatatttgtttttccttttttgcgaaatttaaatacattagctgtattattatttttgtttctaattctgcaactatccctatgtggctagcttgcctataaaacttttgttgatttctataaaaactttgactggaatttatcattaagccataaaattatttgtgctctttatgtcattaaattctcatagtcaaatctattgtggtcaaatagtaaaaactctaaaaatacaagtaaataataaaatataggaaaaatctgtcttttctttatctattatcttatcaaaatatccaataatattagagaatataataatcgaattaaaacaagaaaaaaatccacctagttaatttgttacttacaaatcacaacagatacgcaacaaagactctccagttggcttctgttacgatctctggccgtctttaaaacacacaaaaccttttcatgtaaaaacaacaacaacaacaacaacaaaa

SEQ ID NO: 12354 - DNA, 3000 bp, Unknown
  misc_feature (1)..( 3000): cDNA_ID_2711842_gDNA_ID_2214544_Annot_ID_134543 3000 nt of promoter + ATG
cttgctttcgcttaaggcttttaacaaaagttcttgaagtttaaatttcatgttatgcatccaaaatctatgttttgcagaataattattatctgaatttacaatatgtcatatctgacattacttataatttaatttacaattcttttgtttctgtcaacaatttattctacaaatataaaaaaaaattagtttcctagcaatgtcaaatcttcttggtacctaaatattttatattgatgtctcattatttattcaattgggtgatgaatgttttgatttcaaggtgaaatccttcacttgtcttgactcttgcagaatacattaatcggagtacatttattgattcacgtagctttcttcattttcagaattcggattatatctacagattacagctcatgtaggttagagttattggaataaaacgaatgttaaatataataagagtatcagagcacctccagtggagagagcctctccaaggactctctccatttttttatgattaaatttccaaaaaattaacaagagagctttgtgttttactttttgttaaagttttcttaaaagagttctctgaaaaaaaaatgaatgatcttgttttcaataacttgtgtcttctccttcatcctcatcgcccttgtttccatcctcgactttactttcaccatcttcgatttcttcaatttccaaaaccaatacgagatggaatgctcagctccatgtccttggaccttgatcatctccattgtatcaaaaccgactattacttatgtaacttatcacatctttatctcttttcaaatgaatagagaaaacaacaatagcaactgtaaagactacaccatgcagcagaatcatttaaactaaagaaacacatagacatatacacaaggatatatatatatatatatataaagcagtggcaccaacctacatgactactattgaagcatgcttatgtacgctttagattcagaatattggaagattagccaaaaaaaaagaaaaagcaagagtaataagaaagcagctttagctaccgttccagaagaaagctaggcttaaaatgacttaatgcatccagtttttaatgaatgatctacaaaggttcatgatgtaataagataatatacctgaaaagacaacataccacataattattatccgaggcaacaacagtctgcattatgtcttcattttcctttacttgaaagtatatatctgcagagcataagcgtaattctattaaattattcacagttataagccaactgaataaatacaaagcaaaaaacaaaaactaagaattctggccaaagaatattctcatgaactccaataccaagtaaacctgagagcatctgggtaccttttttgttcacctgaacaagacactacgggaaatgtcagatccgcaaaaccaagttcggaaaaaacaaacaggtagagtcaaaaccagtattcatcaatcttaaattcaatattcaacattggttttacaattgttttacctgaatttttatcttatgttgaattgaaagattaaaccaccaaatacaacatgtaatcacgatatacaagcaagaatggcttgattcatacctaatttggagacttcggcaacgattactctccaaatcagatttgctattctccgattgggtttctcttccgccgatggtcttcaccgtctttcgttttgatgaatccggcgtctagaagcctcagataacacaattacacacaatcacggcgtcaactaatcggaaatcaagagttcaccgccggtttcattatcacgagagagagagacagagaaagaaagtgattatctctttcgaacaaaaaaatgaaacgctactttttttttgttttgttaaaacttcacaacaaatcaattagcgacacctgtcgcctctctcgttccctcaaaaactctcttcagagaaacgcctctctcagtttaattcaattttgatttatttgtaattcaaattatcaagagagcccaacaaatattgcattaaaaccctgcgttggagatgctctcttatagcatctattatcaaccatagtatcacattttttttgtggacaaagaaccataatataacattttgatacgtaaacaaattatttaattccatgcatggcgtgggacaacctaattatacatataatttatttttttaagtagtagatattgaatcaaagtaaaatatagaagcagtgaaaattatagtttgtagtatatccctatatttcttacatgtaatgatttaaaaggagacagcacaggaagcgggtgggacccgactcggacagcaagaagaagaaagtcaattttttggacacaagacagaagaagacaccttcactttcttctctgcccgttttttaacaatttgtgctcttcttcttccgtttcttcttcgccgtcagattcgactgtaactgtaagttcttcttcttcttcatgttcctcctgatctcagtcgctgagcttgattagagtttgcaattgtttgactttggattcgatttaggctatcttagaaatgagtttggttcgttttgtgtagctaaagtttcgatttttgtttctgggttttaaatttatcatcttttatgaatctggtgaaatgataaattagctcaagtaacctaatttcagaacccaatcgctttgatttgcaaaaaaagaaaaactcctccttagttccaattaggtaactcctaaaattatagctgaaaagggttcgctagtgattctcttcttgatgataatttgtctcaaaagcagtttttttaggattcatgagttaaaagagtatgttcgatacttgtggcccaaaaggagtcaaatctcaagtcatcagtggccaacgcgagaactttgtgaggtatatataacaatttttgaatctcatgaaattgtatgaatagtattaagctttttgagtattcctgaattcaaataggttagatagtatg

SEQ ID NO: 12355 - DNA, 3000 bp, Unknown
  misc_feature (1)..( 3000): cDNA_ID_2711838_gDNA_ID_2214544_Annot_ID_134545 3000 nt of promoter + ATG
aattctgaaaatgaagaaagctacgtgaatcaataaatgtactccgattaatgtattctgcaagagtcaagacaagtgaaggatttcaccttgaaatcaaaacattcatcacccaattgaataaataatgagacatcaatataaaatatttaggtaccaagaagatttgacattgctaggaaactaatttttttttatatttgtagaataaattgttgacagaaacaaaagaattgtaaattaaattataagtaatgtcagatatgacatattgtaaattcagataataattattctgcaaaacatagattttggatgcataacatgaaatttaaacttcaagaacttttgttaaaagccttaagcgaaagcaagcccaatgacagcaacaagagtcgaggcccaaaagatgccatttccagcaaccaacccaacagcactgctcttggccggagctggcgccggagccatcgtagaagtagatgactttggagaaggagtgggtggagctggggctggagcagccggagtagtagatggctttggaggaagagtgggcgtaacagcggctggtcctggctttgggtggttaggtgactgaaccacgacagtcactttctcacctttagcacagttaccactcggagctccacttatgaagtagtaaggccctgagacgtcgagtttcactgttgtgtatccgtctttgtgttcttccaaaggcttctgtgtgttgcatttttcgtagttttcttttgttacttgtaacaccgaatcgatctttgaatcgtatttaaacactgtcacatgcaaaaacaatccttagcttactatcttatgcattcgtatatatgaaaaaataattatatatcttaaatgtgttttaagttccttgaatatatctaaatgatttggattattgacatatcaaataaccaaacccaactcaagacttctgatattcaaaccagaagcctttgcagactaaaagtgtatccaacaataactaacatccggatcttgaccatcatgacgaaactatggtagcatcaattttttttttaaaatgtcaacctatgttaaattttattaacatgctaaaagattaagacccatttaatcataatggaattttgtggaaaaccatggtaataatgtcacttgataaaactagctagcatgtagatcaaaatattcaaaaccaattaaaaaacgtcaaaagtataatttagaagaaagaattagatacgaacaaagagcgtctccgacttggaaccggacggactcagcccaatggttgagagagtggttgggagattctggaaccttccatgcgtctaatgatcctcccacattaatgattctagcctcaccaaagtggtagaatgttgtaaataaaagaaacactacggacacaatgctaatcaaagacaccatttttttctctactcaaacaaaacttgcaaccacttgcctagaattctttttctctttagacgtgaaaaagtttggccgttatggtttggagcttaaatgggttttatataaggtttaataaagaggttgggaggatccgaaccagatttggggtcaaatttggtcttgtagaaatgtaatgtaatcttcccaattagccaagtaattgtcagtttcattatcagttggattatattcttctttttattaaaaaaaaaatatactctttttcttaattcgaaagcaaatgaagattatatggttgatctatatatcatatctttgtagtaaattcttgtattttggaactaaatcaggttttcaatacaaaataatttttgacatgtagaacaattaaacttgaagtgtactcagtaaatctaatacaataaattaaggttctcctcaaagctcatttcaccaaaatctgacatttgccacctagacaattgacacgtgtcttcttttccctacctctcatctttttttttccttccttacctttctaagaaactaaattttaatattaaaaactaagatataccatgatcattttaaattagataaaattatttaattatttatctaatatagaaaaccattttccaatactttttctaagatttatttctatcagttgaagtaagatataaacaccaaattactaaaatatttttttccaaaaacaactcagtgatttatttctaatttatacagttttccttgttactactaatagcaaaaaaaaaattcttttgtcaactaatagcaattaatagtatacaaagtttggacttcatgtaagaatcttacctaaggatatgaaaatcttgatttcgaatagtgaaactggatcatagtgtacaacacaattaaaccgggtggatccaataaaataatttcggttcatacgggataagcaaataatttttaatcatatatattcacacaatacaaaactaaagacactagatccaaatactattttagtaaatattagtgaggatgtcccaatagcaacaaattattaaaatgataattgcgaaagaaaaccactattgttattttaatatttcacattatttaaaattatcagttcaatggccattaagttcttgtgtttcttaatctacatttatcactgttttcattgaaagatatatatagttttccttgatgctaactaatggagtctataattgtaataatgatacgacacattattcatatctttggtacattagaaattacaaaaatctaaactggtcaaaacactaagaaaaaggtagagaggtcatcattaagtaatgaatatgactcaacgaaacacacattacatgatagcctccaaaaccccatccatccatccctatgtctctcccacacatgacacaaaatatatatacatatacatatatttgtataaaaatgagtggtcgtaacaagtcattcttcattctattggtctaacaaagcccattgacgaaaaagagagacaatattgaaagagagagaaaacgagaa

SEQ ID NO: 12356 - DNA, 3000 bp, Unknown; identical to SEQ ID NO: 12338
  misc_feature (1)..( 3000): cDNA_ID_2708721_gDNA_ID_2214544_Annot_ID_134550 3000 nt of promoter + ATG

SEQ ID NO: 12357 - DNA, 3000 bp, Unknown; identical to SEQ ID NO: 12337
  misc_feature (1)..( 3000): cDNA_ID_2708746_gDNA_ID_2214544_Annot_ID_134551 3000 nt of promoter + ATG

SEQ ID NO: 12358 - DNA, 3000 bp, Unknown
  misc_feature (1)..( 3000): cDNA_ID_2711826_gDNA_ID_2214544_Annot_ID_134552 3000 nt of promoter + ATG
aatgaaattaccaaaaaaaacttagtgagtgtttagcattcctagttagtagaaattgatgatcacggtgctaagtggttatttaagctgggatttaatgctccttgatcatttgattgcgaacggaagtttttgatgattagatgatcagtgaagagtaccatggaaatgaattagtctagattagtgatctaaggccaaatgaaaatttccttacacagtattttacatgatagcgtatactacacgtttcatcacacgcaagaaaacacaccatgttttgcaattgtattttattgtctagttttgctagaaaattatatatgattatccatcagataatttttaatgaattggcattgaattgatcgtattgaagattcatgtctgaatcataaacaaaagtaaaattgggaatcatctatctactatttgtgtgtgttactgaatttcttctcactttaatataaatgaagattaaatatttgtataatctaattttgaaagttattatgaaattgcacaaactagatccaataacttaagagaaaagggatggaaacataggagaatcacggcatatgcaataaaaatggtggtcacaatataatcatttggttaagcacatgaatgctcatcatttggtctttctttgcttatatacttaacaacaccaaacgccaaaaacaatctagagtaatctaagttatctttcactttcggcattttaaatttgtgttggtttcaataatattagtaattattatcttacattcttttttacaacaatcattatattacattactctctttcttttattttttggctaaatacattactttgttttttagctaaatctatacattacttggttacattatatagcgtcattatcaatttatcactcatacaaatttgtgagtgcagttaggtaagctcgtgtaattagtcttttctctttcctttggtcgagttagatagattaatttgttatgtttagcacatatcaacatatattaatgaatgaattaataataaagttatgatctctattcatatacttctgtatatcttcttaaaacattatataactgtgagtctgatttggtgactggtagtgttaaaataatggaaacaaaagtaagagaacttaaccaaaatagaagtaagagacaataaaattagttaaaccgtaaaggagatgaattaatttctctccattttatagagtattaatcttttttttttggttttttttttcaattaatggttgtataaatcaacacttcaaaaagcaatcagttaaatattaacataaacattgtcaaaatgacaatcactatcatcatacgatgttttgtagggtcaatgatttaatatatataacgaataacatttttctgtttacggttacccaaaaaatactaataaaacataagttgaaaatttgaaaatagcaaagtcttgtcaaagagatctaaatacaatgtaacaaaataacaatcaaaacaaaaattcctctgttctctttttttgggtcaaaattcctctggtctcttgtggtgagcgtcttacgagcttcaaaaacaaaagttgtcgaagatatagcacaaattttagggtttgttacttggggatcaagcgttcttcatcagtccaggtgagattctccagtttcctacttaatctactttttttagtggtactttcttttaacactattttgataataattataaaccctaattaatttgctggattttgatctgagacaagacaaatacactaaaaaatcttgtttccatttctggagattttaatgaagaagccaagaacaagtttaagattttgcagaatttaattaacataataaattccaaaaatagttttaatcgataaaacttgtctgcttcttcacagacacaagtcgtgttcactttcagacactttttttttgttttttgaatcccaaatttcattgtttcacgagcttcattttcccaagaaaatcatactttttctttctttctcaaatggtcaaaacataaaaatataaattaatcaccagatttttttgctaattcatttgcattattgttagtttgttactatattaccgccaaatttttcaccatttttatcagagagtagagacactgattcttctaaacacgtggtcatctttgtctcttcccatataggaaacagatgaatctgcaaaatctccatttttgctaattctttaatcaaactcttagcattattataatcaaaaactgtttctaaaatgcattattaaaaattcttgagatgctaataaaggaaacttctttttgtttactttgaggtttttgattttttgataggaagagaggaagaagaaaggtgggtctgtgaaatctccattaaattttctccagcccatccgaccatggcacacccgtgacaatgacactgaaaaagattgttttttgctcagaagtttttaaagtctttgattgaaattaagaatatctctgaaactgtgaaagtgtaagcaattaaactctactacttgtagacctttgagagtttattttttatagtccttaggcacagctttcttatctctagcttttactctgctaggtctcagcttgttcttgttgtcactttttcttttgggacctaacttactttatgaaactagtcagcttgtcccatggaccaaggattgtctttttcaatctacatgtcttgatctgttttggcttcttgatcaaataagatcttaccttttttttttctctttaagtgattcttgatctgtgtttctgttgtaaagatttaatctttagctctcttttatcatttgggttgtctaaaaatattctctgcttttgctccatcttgctcatctggaaggtattttacttttggcagaataaaaagagtctacaatgagaaacattagttgctgaatcaaatcaatgcaagttggttccaagaaagcatcaatg

SEQ ID NO: 12359 - DNA, 3000 bp, Unknown
  misc_feature (1)..( 3000): cDNA_ID_1807032_gDNA_ID_2214544_Annot_ID_134554 3000 nt of promoter + ATG
cgttccgccaaacccgtcccgtaaaaaaaaaccgcagtacaccgctaatttaaatatataatgaaaataaatgttttacgggcttgcaattgtattttagtttgtcaaacaatattttgttttaaatagttgtcgaaatctagttcaaattttggagaaataagtttagtgaattgataagaaatgtatttaggtgtgttttgcttattttaagggattgcaattgtattttggtctgtcaaatattttttgttttaaatagttaccgaaatctagttcaaattttggagaaatttgcatgatatatgagattgaaatatatttggaatgttttttatttgttaattaatttattgcaaaaaaaaaatcaataattaaaagccaatagcagccattgtaaataagttccaactccaggatttatttcacaaaatggaagcaaaaatgtatatatagattttgaacgggtcagcttcatcgttgctgatttttttatgggccgatcactattttagtggaccgtctttgcattgggctgattatctcttaatgggctgtcttcgtcttgaaacgagtcaaaaggaagggtgttaattccatctccaacatttcattcatctatcttacacacacacaaaaaaaaaactgtgatttgttcaattttttatattttaataggataaagatctatttaggagtttggaggttagttcctattgcatacttcatcttcggtaaaactaaaccgcctagaggtatcgatctctggcttgaagagagagttctcgaggaacattaatagtgtgtagaatggtttatgtaaactgagaatcaattgtgactacccttggttaaaccggaaccttcttctataaaaagaggttttcattgtaacaaacacttaaaagaataacagaataaacacaatcttaaatcatcgtttgtatcataaacgtcattaatctcaactaggtcgtctctataaatttgcatctatctgtcctatcgtatttcatatctcaaattagttttttcttggatttataattattttcaatatttaactataaatctatattattggattattattattattattagattttgtttgttattgttcaagaacatgatgatctgagcacgagtttagatatagaagctcttagaaaaaaataagctgagctgagctaacttatgaaatatccgaactcattatgagctgactaatatattgaagctaactcacagaaaaagctatcaagaaattttaatatgaaaaaactaaaaaaataaatgaaagtaatatttttttctgaacacaaaaatgaaagtatttactatatatatactcttgaccaaaaagagaaatgatatttttactcacgacattacgtcgattagagaaagtgtggcgtaaatcacgtgagatcaaaataggaaactcagcaagaaacctattattcacttatattgatatgacctgcagtgaggttacttatttgatttaaaaaaaaaactgatttatttggtgtgcataatgttttttgttgttcactgcgggccggtcgatgttttttaactaagaaaattaaattttaagttcttgctaaaacaattttgaattttatattttatttattttgttacagtatttaatattatataaatgtattttgagtggtaattttaggattttacatgcgctataccattccaaattaatatcgacccaaacttatctcacagtataaccccattatgtgaaattaaatatcactttattatttttcattccaattatacttttatttaaaacacatattcatgagtcacccatagtatgtttgcttatattgtgaccataatattcctttcgttgtgatccatgttgccaaaacagacatcaattaatgaaattgtgtgtatttcgtccatgtttactcaaaaaaggtcaatatctttaatgtgatcagcaatgtgacttacgaattccccgaattccaccaaaacacctgattgcatcacttttttaatgtttctgaagcttacaaatatcatgggcaaaactccagcaaagccataaatggttggagaagaaaatctagttacatctaagggatggtccgataggtacacaaatgcctctatcatagaacttatttcatctctttcactacttttaaataaacatctaagaacaccttctacgtcgaaaacctacaatgtggcttaaattattgtacgtaggcaatatatcttctgaatttgcattctccgaccaatctatcatctgctggaaatgaataacaagctccactgaaatctcattgaaattagaaaatactctatccactttcatcattgagctgccgcaaccttgactaaaagcaaagaaatcgttttccaaatctcgagcttaccatatattcgatacattcatgagataaagcttcattgaagccaacatccttcaagcctaatcaataaaggccacacaagttgtagttttgtcctccattgataaaacaaattttatgataataggaataaggtacaaaaatatattttttgatgcaatacatgttgccaaaacgtatatcaaccaacgaaatcttatgtactttgtccattaatcagtatgattcacaacttccttaaattccaccaaaatttcggactttggcctattcaaacccattaatgactgtttaaaagctttggcctaaagattaatgttaagatgttgtcatctttggtttccattgatttaatcatttctttctttattatgcacacttggccaagtgttatcattttgagcaaaaccaactataccggttttctcctaaccggaataaaccgaagtaaaccggatatcacatcatccgttcactctctttagctcttaaggcgaaaaaagcttatcttcttcatcatctctttcctcaatcggagtgagcgcaaaaaatcaaaaattcgccgagagcacaaacccta

SEQ ID NO: 12360 - DNA, 3000 bp, Unknown
  misc_feature (1)..( 3000): cDNA_ID_2709205_gDNA_ID_2214545_Annot_ID_134555 3000 nt of promoter + ATG
tgtttgttcttttgatgattgtgcaggtaaaaggagtattccacccatacttgagtctcaccctgctgatgttccgcacttctttggtcaacctcacacaccaactgcctataagccacctcggatgatgagacgtctttcaaagaagcatttactgccaccttttgatccacctgatataaaaaatccaggaaagtcaagctattgagtctaaagaagcgtttagtgggaggcaacccacttgtatgattttctttttcttttctttttcgttttttttttctcgcttactccggatttgaatgccacttgggacagtgacgtttaagtctggtggaggcgcttactaactacgttttctttttgagtgttattcttatacatatttttctttttcagtcgttttattgagtcaaaattttgttaggaattatgatctctattctttagattatatcgtggttgattaatgctgcaggttcgactcaatccgactattgtaaaatttagatggcaaaccaacaaacttgaggatatcctagtttccaatacaaccactaaggttagagctaatctcactgctctttcttttacctcatcaatcggttagtattcatagatattgactccttatcatacctgatattgagaccaatgtgataaagaaaagtattcctctccccttataaaaataaaataaaatgaatgatgaataagagattgataggactttcagatagtgtataggggtaggaatgtttcctatgaccccattattatacattatttggaatgatcaattacaaaggttggaaaaatgcctagggtgtcgatccagtatgcgagttcccctttgtttactctctaaaaagaataattctggggagagaaagaacaccaaaaaaagaatataaagaacggtcgatttatcatggtatagtacaggattgaatctagacggatcttgaatgttagcttgtttgatgagacccagcgatgaaagcctaggggatatagttgtggaacttatgtatggaatctagaatgttgtgtaagcttgcagagaagtacatgttggttaggatttgattagaactgctagacatatggatttggttaggatgatcaaggcaataagctagagaatgttgggagttcctgtgttttcaaacctcttccatgggttcggcttttgtgttttgcttgagggcaagcaaaagctaagtctcggggagttgatataaccctatttttactgcttttagctatgatttaggtataggttttagagtccttttgtgatatgatcatggatagcattaacgatatggagcatgaaccggagcttgaacgtgagcttgtagccgaggaaggagctaagcttgtagctgaggatgagcttgtagctgaggagaacttgtagcggaggatattcttgtcacaccggccgtcccaatgacttgttctagagctaagctattcgaccaagccattgccgggatgcttaaccacatttgggaccgaccaaatgacttgagccaagtcactacctctttggttttgattcaagctcaaggacctcatcaagatggataagtgattcatgagtgctctttttccctgcctttggttttgtcccactgggttttccaaaggaaggtttttaatgaggcttatgttttcacttcatataatccattttgatgattcaaggcccaaacccactaaaataaagagacaatttcgtggccttagtagttgaagagtttattttgattttcaaaaattgtttttaatttctgttgttttctaggcagccttggagcatgttccaagacttgcctcttcatcttctcttctccttctctttatatactcttgtatttacttttgagaacttatctttcttttaatcaaaaaccttttctaagaagatcatcttgttggtgtgtatatccagcaaaatccttagtctcttttagtgcgcatatccaaaggatctaagtctcgatatcttgaagcccttccgcaagcttctgtgatatccatcgattcatttaaatctatccatcatcacggcatcacagccacctctatccatttctcaacctaagagtgccgagtccttgggaggatctcatcatgtggtatcagagcacactctgaaagttgagttttccatcgttatcattttgtatattttcatctttagatctgtgtccgtctgtcaccttgatttaattttcataattatttggtgcatgctaaaattgcgaaattaactgtcacgggtttgaaaaatactctagtattttttaaaattgtttctggaatttttgggaacgttatgataatatttagcatccgaacaagtgaaactgtcgtaattagggttctagggcatctgaagggttatttcgtgtttgtttaaaaagaactagttactggtgttgttttgttgtctctattgcagaaagaatggctgaatctgaggaggaagagactagccacaatcgaaacaacaaacttttggtggaagcctttgagaaaatgatggataccaaactgaatgcttttcgccaagagtttcatgagaaactagagttggggcagactcgtcctcgagaatgaaggagagttaatgagccgcttgagcaaagagatgaagctacagatcagtactatgggcataggagcacttcatctcacaatagtcaaaggagacaccatagacgtgctagagaaggtagagatcttttgcaagacaatcttggaggtcttaagcttaaaattccaccattccatggaaagaatgatccagatgcttatttggaatgagaaaagaagattgaattggttttcaaccttcaacactacaccgagatcaatagggtaagagttgctgctactgaattttatgactatgctttgagttggtgggatcagctagttacttcacggagacgtaatcaagagcttccattggaatcttggtccgaa

SEQ ID NO: 12361 - DNA, 3000 bp, Unknown
  misc_feature (1)..( 3000): cDNA_ID_2711880_gDNA_ID_2214545_Annot_ID_134560 3000 nt of promoter + ATG
aaaaaggtattacatgccaagttcggcctcacggtctaaaagctgtcaagtcatatagttttaaccaaaaaaaaaagagagatgcaacacgaggacttcccgggaggtcagccatcctagtactactctcgcccaaacacgcttaactgcggatatctgacgggatccggtgcattagtacctaaaggtcaatgtagaaaacacatccactataaatatgaaggttcttggtttatagttttctttgttttcatgttcatcgctttaaaccatgttaaaggtaacatattatcttttgattcagattttttatttgcaccaagaaaaaatatctattgattatttatatatgaaaagctggtgttaagtttttaatctcttgttctataaatgtttacataatactttatctacattttaaatctattttttggttaattaaacatcaaaccttttgggcgtaaacaagtctctagcttgatcaagaaacaaaattttcttattctgtttgccagacctaatgtaattcactactctcacacattttcttcaaaagaaatctttctatttctacaagatcatatatatctcatgcaatgcatataatttatatatatatttgaatatctggaagttcaagcccgaaaaccttacatctcctagtggcgggatcatattaaatttatttcctttggagaagagatctctcactcgaatgtcgaaactaggagatttaccactaggtcaaccccacattggtttaatatatatatttttttgtctacatcaatatagtagattaatgtcattttatggttaaatatttctaaaattattcgatcaggatttttgtttatgaatataaagatacaaaccaatgtttattaaatttttaacaatttattgtccagtagattttaataaacttggaggaagaggataaagaagactcacttcattaccacatgaagatgatcgggctacatcgtcgggttgataagcatgagtcgtggcaaagcaatacacattcttaagaacctacacatctgtgaggattttcattcgtccatcaaactcatctccaaagtttagaagagaaagtttagaccggaattattttcaccatttctaagatggctcatgcttttgcattgattattggtgaaagtaaaccggaagacggaagactctttccctgtgcatacacatgctctattttatttttattttggctcaacattgataaaaattgattttgtttttagttagtagtttttttttcttgtcgtattttagttagtagtttagaaactatcattcaagaaatcaaaatttgctttaaattgataaaattgacaataaagataaatggtgaactaagtctcaaaagtcaaaactatcattcaagaaaatatcaaaaaaattctttagattgataagaaacagcgtaggagaatgagaaaagtggatggaacaaatacttcaagtttacttaactgtttgaaccaaaatttctgtttaaaaagaaaaacaacatcgttttggaattttaacagaaactgttgacgactttactttgtttaattagtctgtcacttgacttaacaataccctaaatttggtaaagtcaaagaaacttcataattaataataaaattaattaaaattggtaatttaattcacccaaaacaaaattgacattttttttcaaactgatgttttttgtcgtcaaacttttcattaaaatccaaagaggattacaaggtgataaagagcccaattacacaaaagataaactcaattagcccaaaattacaagaagaaacaagagaacataggtctaaaagggacacgtgtgaagatacgtgtattgatgcatgctggaagtggaaaggcacagccaccaccatctccaccgagctgaaccaccgatcaatccttcgactttcaccatagaaaagctttttctgaccaaggattttaccgatcttcagcttcaaactccaatcaccttgctttgctaccttttgctaaactctccgattgtaaaaaacagagattagcaagccatcagatctatgaaacacgggaagacgcagcgggcgagagggcaaatcagtcgtaaacacactctcttgatatgttctgcaccagccaacgaaatcctctcaacacgatttgaaaccttgaggtgataccttcttccaattccgattacggccacgattaggatatgaaggatttattcttctcatgatcgaaatcgagcagccaatgatcttaaaaactctcaattaaacgttcggattttgattcttctttactggaagagaatttagattctgcaaaaggattgaggaaacaaaatcaaaatagccaaaacggctaaaagagaactcacgcttaggtgagaaggtacatatccggatttagccggcaaagaactgattttaattggaaaacaaaaaatacataaagcttcctctctctaaaggatatgagagagataagagagagaagcttttttaaaggttgcggtaatggaccgactttcaaactgatgttttaaataatatttttctgctaaataataaacaaaaacatataaataaaaaaaatacacaaccacgaacgatcgacaattgggctcaatcggatggaaaacccacatagcattcatttaattcatataaaaaccatttcagcgagaaaaaatgtaattgggcttttccttaccggatttgaaagtgagcccaatagatataaaccctaagaactcagtaattaaagcccaaaacgacaaaaccccgttttcttcgttttacttaaaagaaaacaaagctcccgccgccgccgttatcacgacgaccaccgtgcgataccctaaatttcaacgttgattccactttgtcaagtttgtatctttcccactttgattccgatttgttaaagatttgcagattaaaagttttctttttgaagaaatccatgagtgcccaa

SEQ ID NO: 12362 - DNA, 3000 bp, Unknown
  misc_feature (1)..( 3000): cDNA_ID_3024762_gDNA_ID_2214545_Annot_ID_185395 3000 nt of promoter + ATG
agaataccatgaatagacaaaggagaaagcttccaattcgaagagatggtgaagcccaaattcaacgtgagggaattgaagccaatcatgttgcacccgaaatagttggaggcgatggagttgcaaagcgtggagttgcagaagatggagatataggtgatggagttgtagaggagatagtaaatgaggagggagaaggatatgatctcatgattctagtgttgatgaagatgattgtccggttattgtcgaagataatagcgggtacagagaggcagaacaatgtttggctgaaaatttagaggaagaagaagatgaatttgttgatgttgaaatctgcaataacttagaagaccattttgggtttgatgcgtgttaagatgatgctgttaataaatctgatgaaagcggagatgatgtttgggacagcgagaagattccagatccattatcagatgatgatgacaaatatgaagctgagaggccattcactcatggagaccattccgatgaaccgctagccttgaataatacaatcaacaatgcagacgaattcaagtatgcactcctcaggtattctctaaagactgaatacgatatcaaaatgtttaagtcatcatcgaataggcttggggcaaagtgtacacaacacatcaaagaaaagtgtccttggatagtgtattgttcttttgagaagaggaaaaacaagcttttgataaggagattctataataagcatatttgtgtaagatccggttaaacaaagtttttgaaaagtggaactattgcacaactttgggaagaaaggcttcgattgaatcctaaaattaaatctcaggagatggtagttgaaattaagagggagtttaatatgattgtgactgtgcatcagtgtaggagagcaaaacaattgctaagaaataaaagaaaggctagtcatgaatcacattttgcttgcaatgattctataggttatatgtttgttttgatgcattgaaaacagcttggaagaagtcttgttggcctattattcgtttagatgatgcatttatgaaatgggatatcaaagggaaaatgttagttgcagttggtaaagatggggataacagaatatttccaattacttgggcagtggtagaggtggaggatattgataattagatgtgttttgtgcaactgttgaaaaaagacttgagtcttggagatggagctgacattacaatgatatttgataaacatcatgtaagatttttggttctcgtaagttaaatgcaagattttatgatttcttgtgttggatattgatattatttacttgtggtgacaagatttattaaatgcagttcgtgatgagcttccccaagctgaacacagaatgtgtgcaagacacattttggaaaattggaagaagacaaacaaggatattgaatttgagcgtctgttttggaaaatagcaaggtgttacacatcacaatcctttgcaatatagataaattttgatgactttaattttgactataaaaataatattataaatgacaaatttaattacaatttattatattcatatttcataaaaaaaattatattatttatttactatcttcaaaaaaataaacatttaagatagtacttatttagttattgaatgtagcagatttatagttggaatatgtaaactgcaatattttacatgcatgccatttcaatatgtgtaaaacattttgacagacgatgcatgacacatatctctctcacaaatttccaaagtccttttaaatttttccacaacttctatttatatatatttgattatttattctgaagaatacttttagaattttatttatcttcatatttatggataattttggtatatttaaaaaatgagaaatgaaaaaatatttaacaatgtggataaagatcttctagaggttctaggtttaacagaaaaaaaaacaaaatcgtggcagttagctcaaattgagttccatgttgataattaaggttttcttaaaccagataaaaaagtttgggttagaaagatctcacataataatatatttatttaggattttggtgctttgtggacggatcacagagagaaaacaataagttttcaggaacagtgtggttctatacatcatcaaatacagagttgccaactatatgacgcgaatctctgtagaagtctatctctactccatacctaagtcgaaggtctactctggacgataaagtgtatgatttgtcccgaaaactaagatttagcctttttacggacagttcaaacctggtgaatatggtgtctttcccaaccgaatggtcggcgtttcaacatatttggaggattttcaaagcgacaaagaagaattcataagcttctttttattattaatctctcacaatgcaaatgtaaaagttgataattcggtatgaaaagttcgaaccgtttcgtatcatttatgtaaacaatattcctcaaaattggatcttttgaactctaaataaaaagataattaaaaaaatgttcatctatgatgagctacatatattatattgtattagcaacaaacctcatgatacgttcaacgtcgaaaatacacattctaagtaatagaaaaataactattaatattcccatccatgttgaagaaaatataagaaaagctaagaaactcaaaaagaagaaataaaaacaccatagaaaccggaagtgtctaaaattccaccacaaatctctaagtgactttctcaaaaataaagacttcgtcaacacaaactttcttttgatagaccacaaaaatttcttatgttgtctattcttggtatgctttgatagagacctctcctcttcaacactcgctctctctctttctttcctttttttcctctatcatttcatccatctcagattatcttcgtttttcttcatctccagagactctccttccatctacccttagagggcgcgcctcccgtgcgccttcttaactggtt

SEQ ID NO: 12363 - DNA, 3000 bp, Unknown
  misc_feature (1)..( 3000): cDNA_ID_3024766_gDNA_ID_2214545_Annot_ID_185393 3000 nt of promoter + ATG
acctgaggagtgcatacttgaattcgtctgcattgttgattgtattattcaaggctagcggttcatcggaatggtctccatgagtgaatggcctctcagcttcatatttgtcatcatcatctgataatggatctggaatcttctcgctgtcccaaacatcatctccgctttcatcagatttattaacagcatcatcttaacacgcatcaaacccaaaatggtcttctaagttattgcagatttcaacatcaacaaattcatcttcttcttcctctaaattttcagccaaacattgttctgcctctctgtacccgctattatcttcgacaataaccggacaatcatcttcatcaacactagaatcatgagatcatatccttctccctcctcatttactatctcctctacaactccatcacctatatctccatcttctgcaactccacgctttgcaactccatcgcctccaactatttcgggtgcaacatgattggcttcaattccctcacgttgaatttgggcttcaccatctcttcgaattggaagctttctcctttgtctattcatggtattctctctgaaatcaatgaatttgatttcgatctctatgcctctcgattaattttgagttgaatcgcctaaggttcttatttggggaaaaatatgagaatttttaaggtttagtctaggtttattacgtttaattgaagggatttaacaccttctttagttactaaacgttgaatatattttggtccaaaagcatcaagtcaatgataagtttgtgatttaatttgttcccacaatagttcaggaataaatgagttaattgcacatagtttaggaattaaatgatcattttccccaccggtaaacacattcatgtctatggattatcgttttaatctatctatacatatttggtagactatttagccaaaaatccctatactatttactatttacatttaggttcttacaaattttatctcaaccaaatattttatttttaaaaacttacaaatcattaatttgcattaaatacttgaattaactctttcctaaatttttaaacttaactaaatctttctttattaaactctatccgattaagaataatttcctaaaacatctatatcgagactaaatataaattttttattttttttgtcactatatttgtttatatatatatatatatatatttactttatatataaaatacatatagttaataaaatattaaatttttttgcatctgatgtaattaaaattttgtaaaacagacatatgatactcaatcgatgaaaataaataaaagtacaaggtcccactttgcttaaagaattaggaaattgttaagagccatattataaaaaaggtcaaaccgattccgaatacgaatgagcaggaaccttaatatatcaaacatccaaaagtaaaagtgttattcgattactccatttctttattttaaaatcactacaactttcaaagttttaaaatattatatatatttaaactttattaaaagttaagtattaaaattttttaaacttttttaagagttaaaatttattaaaaattttaaatattaatgattttgaaaattttataaagtttaaattttgtaaatatttgaactttataagaaatttaaatattataaatattaatattggacgatatactacgggtgaaatgctagatttaacaatcaatatacaattgtaaagtttggatcgatattaaaacttttttgaaagtttccaatattataaatattcaaatttcataagaaaatgataaaatgatgtttaattgtacgggacgaggttggttatattgtgggattggtttggatcaatatgacaaaatgatatactatatacgaaatcctaaaattaacagtcaaaaatacaattatagaattttaaacattcaaacttttttatcaaagtaaatataacttaaattttcaaaaataaaatagttataaaaatcgtcatgaggtgtatcatagtatcatacataaaaaaaaaatagcatgtatctatagatcatcttcaaaacaaaattcaatttttatttaataaaagtataggtctatgatgtacctcttgaatatgttatttatatataaataatattaattaaagtaaaaatctttaattttctaacaaaaatatcaacccacggtgtaccgtggatcaatccctaaataatacaagttttagatctttattacctctaacaaacccaaaccacaaaacaatactgaattttaacattaatctaatatacaacaaatatgagaatataaacatgaattacccaagctttagatagataaaaattatatatcaacaatatattattcatatacaaataataattcttataagaaaatacctataacttttcaatgaacatatccacccacggtgtaccgcgggtcaatatctagttaatcattaaattttgaaaataaaaatcatgcatgcataatatataatgcttttacttaatatgaattttatactatgttgttcagaatactatgaccaacaaattgataaattttcttaatctatctaatgcttaaacattttatacaacctcaactggttacatataagaatactatttatagaaattttattatatacatgttggtttaagaactagataaaaaatagaaagcatataaatgctaaagatgtgtataattttattacaattataagttaccaccaaatacagatagagatatgcatgcaaaatattacttcagttataagataacaatatttcctaaaagaaaactcgagaagacacgatggaaggcaacaaaacataaccgaaaagagagttgaaaaccttgcatcttgcctatttgctaatattggcatatgttttcaacgcctttgtaacccacaattttgcatttataaacaaattgttaaaatcctgtttttttggcaagagtttttagaaatg

SEQ ID NO: 12364 - DNA, 3000 bp, Unknown; identical to SEQ ID NO: 12361
  misc_feature (1)..( 3000): cDNA_ID_3024770_gDNA_ID_2214545_Annot_ID_185392 3000 nt of promoter + ATG

SEQ ID NO: 12365 - DNA, 3000 bp, Unknown
  misc_feature (1)..( 3000): cDNA_ID_3024856_gDNA_ID_2214545_Annot_ID_185366 3000 nt of promoter + ATG
actctcttgcgtgcattgattaaaaagaaccttaaaacttgggaagaatgcttaccacatattgaatttgcatataatcatgccatgcattctgcttctaagtattctccttttcaaattgtttatgggttcaaccccatctcaccttttgatctaatccctttgcctttgagtgaaagagtaagtattgatggtaaaaagaaggctgagctagtgcaacagatccatgagaatgcgaggagaaacatagaagaaaagaccaaactctatgctaagcaagctaataaagggagacgagaacaaatcttcgaagttggagatatggtgtggattcacttaagaaaggagaggtttccagctcaaaggaagtccaaactcatgccaagaatagacggtccattcaagataatcaaacggatcaacgacaatgcctaccaactcgatctgcaaggtaagtataatgtgagttctagcttcaatgtttctgacttggtaccttttattgcagatgaaccagatttgaggtcaaatccttttcaagagggaggggatgatatgatcatggatagcattaatgatatggagcatgaaccggagcttgaacgtgagcttgtagccgaggaaggagctaagcttgtagctgaggatgagcttgtagctgaggagaagcttgtagtggaggatgttcttgtcacaccggccgtcccaatgactcgttctagagctaagctattcgaccaagccattgccgggatgcttaaccacattcgggaccgaccaaatgacttgagccaagtcactacctctttagttttgtttcaagctcaaggacctcatcaagatggataagtgattcatgagtgctctttttccctgcctttggttttgtcccactgggttttccaaaggaaggtttttaatgaggcttatgttttcacttcatataatccattttgatgattcaaggcccaaccccactaaaataaagagacaaattcgtggccttagtagttgaagagtttattttgaatttcaaaatttgtttttaatttctgttgttttctaggcagccttggagcatgttccaagacttgcctcttcatcttctcttctccttctctttatatactcttgtattctcttttgagaacttatctttcttttaatcaaaaaccttttctaagaagatcatcttgttggtgtgtatatccagcaaaatccttagtctcttttggtgcgcatatccaaaggatctaagtctcgatatcttgaagcccttccgcaagcttctgtgatatccatcgattcattcaaatctatccatcatcacgtttttaagacatatatatatatatatatatatatatatatatatatatatatatatagtttttaggttattgtttagacctaagcttggagaggctaatctcgtttttctcttttgtactttgggagcaaaaccatgtggagactccctttagagaagatctttacttactcttttcttttgttattttcttcattgatttcttattcagactatgatttgtgtttctttgatcatgtctgagtaatccacttgttaggtttagggtttctcatttgggatttagatgatttagtagattgcccccttgctaggttatctgtaggattcttcatcttgactggtcttaatgatagttctagagtagctaactggaacttgatattagataataggtatgtccaccataggtacttgttatttgaactatcatagatgagcctaggcatttaagaaagaacatgtaggctcatagaagggctctggtttagatactaggtgaactaatcaaacttgataataatgcatactttagtataggatttctcggcttctccggttatcttaactctaagtatagagagtttcgcggaacaccaccggttactctaaaatcatagtttgagctcaagaatggttcgataacaacctacctatttctagatatactatcatctatttcctgagaataccctaagcctgacgcttttaatatcttgtttcacaaccatccaatcgtctattgcttacttttgtttctctttagattcattactgttttacgtagcttaattcaaaactttagtctattgcgtgttccgagagctttgtgaattcgatccctaagtgctgcaactgacctctttatttgagagagtggtcttacgattaatttaacctatatctattcacatgggatcaaatgaatcacaaatacccatcatttgcaccagaagaaagcaatctgaggcttgaactttctactgatggatttaatccattcaagatgaagaatacaaggtatagttgttggcctattttgctagtaaactacaatctgccacctcacttatccatgaagaaggagaatatcatgcttaccatgttaattcttgggcctcaacagccaggcaatagtattgatgtctacttagagccactcatagaggttctatgctagctgtggaattgtggtgagttaacttatgacgatttcaataaaacgacttttactcttaaggcaatgatgctatggaccataagtgattttcctgcttatgggaatcttgttggctgcaaagtaatgggtaaaattggctgtcctttatgtgagaataatataaactcgaggtggttgaagttcaggagaaaatatgtgtatatatgccacagaaaaggtcttctaccaacacatacttataggggaaagaagtcatggtttgatggaaaagctgaacatgagagaaggggaaggatactaagtggtcgtgaaatttttcataacctgaaaattttcaaaaacaactttggaaatctgatacaagctgcaagaaagagaaaaaaagagggaaaatgctgaattagactctgatagtgaggatgaatctagtgagtcataagaagatgagggggaagaagtggacgaggaggagttatccatatggaagaaa

SEQ ID NO: 12366 - DNA, 3000 bp, Unknown
  misc_feature (1)..( 3000): cDNA_ID_3024860_gDNA_ID_2214545_Annot_ID_185365 3000 nt of promoter + ATG
cgcaacagcaagcgtccacatgaagcaagctccggattcgttgctgagaatcgatttgcagagatggtgtcgaccgacaccagtacctgtgtcgatcgacaccccaaacgggctgaaccagaactgtgtactaaagctgcttcgcaagttcagatcactgctgctattctaggacctgttgtcacgacaaccactgcatctctacaactgcatccacctccgaggaggcaacggtactcatatcttcctcttaaacctacagatatcatcaatttgactttaaaatttccaaagactgtttcacggtttagcaagccacgagtttctcgtcgagcgcttgtttgttcttttgatgattgtgcaggtaaaaggagtattccacccatacttgagtctcaccctgctgatgttccgcacttctttggtcaacctcacacaccaactgcctataagccacctcggatgatgagacgtctttcaaagaagcatttactgccaccttttgatccacctgatataaaaaatccaggaaagtcaagctattgagtctaaagaagcgtttagtgggaggcaacccacttgtatgattttctttttcttttctttttcgttttttttttctcgcttactccggatttgaatgccacttgggacagtgacgtttaagtctggtggaggcgcttactaactacgttttctttttgagtgttattcttatacatatttttctttttcagtcgttttattgagtcaaaattttgttaggaattatgatctctattctttagattatatcgtggttgattaatgctgcaggttcgactcaatccgactattgtaaaatttagatggcaaaccaacaaacttgaggatatcctagtttccaatacaaccactaaggttagagctaatctcactgctctttcttttacctcatcaatcggttagtattcatagatattgactccttatcatacctgatattgagaccaatgtgataaagaaaagtattcctctccccttataaaaataaaataaaatgaatgatgaataagagattgataggactttcagatagtgtataggggtaggaatgtttcctatgaccccattattatacattatttggaatgatcaattacaaaggttggaaaaatgcctagggtgtcgatccagtatgcgagttcccctttgtttactctctaaaaagaataattctggggagagaaagaacaccaaaaaaagaatataaagaacggtcgatttatcatggtatagtacaggattgaatctagacggatcttgaatgttagcttgtttgatgagacccagcgatgaaagcctaggggatatagttgtggaacttatgtatggaatctagaatgttgtgtaagcttgcagagaagtacatgttggttaggatttgattagaactgctagacatatggatttggttaggatgatcaaggcaataagctagagaatgttgggagttcctgtgttttcaaacctcttccatgggttcggcttttgtgttttgcttgagggcaagcaaaagctaagtctcggggagttgatataaccctatttttactgcttttagctatgatttaggtataggttttagagtccttttgtgatatgatcatggatagcattaacgatatggagcatgaaccggagcttgaacgtgagcttgtagccgaggaaggagctaagcttgtagctgaggatgagcttgtagctgaggagaacttgtagcggaggatattcttgtcacaccggccgtcccaatgacttgttctagagctaagctattcgaccaagccattgccgggatgcttaaccacatttgggaccgaccaaatgacttgagccaagtcactacctctttggttttgattcaagctcaaggacctcatcaagatggataagtgattcatgagtgctctttttccctgcctttggttttgtcccactgggttttccaaaggaaggtttttaatgaggcttatgttttcacttcatataatccattttgatgattcaaggcccaaacccactaaaataaagagacaatttcgtggccttagtagttgaagagtttattttgattttcaaaaattgtttttaatttctgttgttttctaggcagccttggagcatgttccaagacttgcctcttcatcttctcttctccttctctttatatactcttgtatttacttttgagaacttatctttcttttaatcaaaaaccttttctaagaagatcatcttgttggtgtgtatatccagcaaaatccttagtctcttttagtgcgcatatccaaaggatctaagtctcgatatcttgaagcccttccgcaagcttctgtgatatccatcgattcatttaaatctatccatcatcacggcatcacagccacctctatccatttctcaacctaagagtgccgagtccttgggaggatctcatcatgtggtatcagagcacactctgaaagttgagttttccatcgttatcattttgtatattttcatctttagatctgtgtccgtctgtcaccttgatttaattttcataattatttggtgcatgctaaaattgcgaaattaactgtcacgggtttgaaaaatactctagtattttttaaaattgtttctggaatttttgggaacgttatgataatatttagcatccgaacaagtgaaactgtcgtaattagggttctagggcatctgaagggttatttcgtgtttgtttaaaaagaactagttactggtgttgttttgttgtctctattgcagaaagaatggctgaatctgaggaggaagagactagccacaatcgaaacaacaaacttttggtggaagcctttgagaaaatgatggataccaaactgaatgcttttcgccaagagtttcatgagaaactagagttggggcagactcgtcctcgagaatgaaggagagttaatgagccgcttgagcaaagag

SEQ ID NO: 12367 - DNA, 3000 bp, Unknown
  misc_feature (1)..( 3000): cDNA_ID_2711873_gDNA_ID_2214545_Annot_ID_134563 3000 nt of promoter + ATG
gtgcatacttgaattcgtctgcattgttgattgtattattcaaggctagcggttcatcggaatggtctccatgagtgaatggcctctcagcttcatatttgtcatcatcatctgataatggatctggaatcttctcgctgtcccaaacatcatctccgctttcatcagatttattaacagcatcatcttaacacgcatcaaacccaaaatggtcttctaagttattgcagatttcaacatcaacaaattcatcttcttcttcctctaaattttcagccaaacattgttctgcctctctgtacccgctattatcttcgacaataaccggacaatcatcttcatcaacactagaatcatgagatcatatccttctccctcctcatttactatctcctctacaactccatcacctatatctccatcttctgcaactccacgctttgcaactccatcgcctccaactatttcgggtgcaacatgattggcttcaattccctcacgttgaatttgggcttcaccatctcttcgaattggaagctttctcctttgtctattcatggtattctctctgaaatcaatgaatttgatttcgatctctatgcctctcgattaattttgagttgaatcgcctaaggttcttatttggggaaaaatatgagaatttttaaggtttagtctaggtttattacgtttaattgaagggatttaacaccttctttagttactaaacgttgaatatattttggtccaaaagcatcaagtcaatgataagtttgtgatttaatttgttcccacaatagttcaggaataaatgagttaattgcacatagtttaggaattaaatgatcattttccccaccggtaaacacattcatgtctatggattatcgttttaatctatctatacatatttggtagactatttagccaaaaatccctatactatttactatttacatttaggttcttacaaattttatctcaaccaaatattttatttttaaaaacttacaaatcattaatttgcattaaatacttgaattaactctttcctaaatttttaaacttaactaaatctttctttattaaactctatccgattaagaataatttcctaaaacatctatatcgagactaaatataaattttttattttttttgtcactatatttgtttatatatatatatatatatatttactttatatataaaatacatatagttaataaaatattaaatttttttgcatctgatgtaattaaaattttgtaaaacagacatatgatactcaatcgatgaaaataaataaaagtacaaggtcccactttgcttaaagaattaggaaattgttaagagccatattataaaaaaggtcaaaccgattccgaatacgaatgagcaggaaccttaatatatcaaacatccaaaagtaaaagtgttattcgattactccatttctttattttaaaatcactacaactttcaaagttttaaaatattatatatatttaaactttattaaaagttaagtattaaaattttttaaacttttttaagagttaaaatttattaaaaattttaaatattaatgattttgaaaattttataaagtttaaattttgtaaatatttgaactttataagaaatttaaatattataaatattaatattggacgatatactacgggtgaaatgctagatttaacaatcaatatacaattgtaaagtttggatcgatattaaaacttttttgaaagtttccaatattataaatattcaaatttcataagaaaatgataaaatgatgtttaattgtacgggacgaggttggttatattgtgggattggtttggatcaatatgacaaaatgatatactatatacgaaatcctaaaattaacagtcaaaaatacaattatagaattttaaacattcaaacttttttatcaaagtaaatataacttaaattttcaaaaataaaatagttataaaaatcgtcatgaggtgtatcatagtatcatacataaaaaaaaaatagcatgtatctatagatcatcttcaaaacaaaattcaatttttatttaataaaagtataggtctatgatgtacctcttgaatatgttatttatatataaataatattaattaaagtaaaaatctttaattttctaacaaaaatatcaacccacggtgtaccgtggatcaatccctaaataatacaagttttagatctttattacctctaacaaacccaaaccacaaaacaatactgaattttaacattaatctaatatacaacaaatatgagaatataaacatgaattacccaagctttagatagataaaaattatatatcaacaatatattattcatatacaaataataattcttataagaaaatacctataacttttcaatgaacatatccacccacggtgtaccgcgggtcaatatctagttaatcattaaattttgaaaataaaaatcatgcatgcataatatataatgcttttacttaatatgaattttatactatgttgttcagaatactatgaccaacaaattgataaattttcttaatctatctaatgcttaaacattttatacaacctcaactggttacatataagaatactatttatagaaattttattatatacatgttggtttaagaactagataaaaaatagaaagcatataaatgctaaagatgtgtataattttattacaattataagttaccaccaaatacagatagagatatgcatgcaaaatattacttcagttataagataacaatatttcctaaaagaaaactcgagaagacacgatggaaggcaacaaaacataaccgaaaagagagttgaaaaccttgcatcttgcctatttgctaatattggcatatgttttcaacgcctttgtaacccacaattttgcatttataaacaaattgttaaaatcctgtttttttggcaagagtttttagaaatggtgaagatg

SEQ ID NO: 12368 - DNA, 3000 bp, Unknown
  misc_feature (1)..( 3000): cDNA_ID_2708773_gDNA_ID_2214545_Annot_ID_134565 3000 nt of promoter + ATG
gtgaagcccaaattcaacgtgagggaattgaagccaatcatgttgcacccgaaatagttggaggcgatggagttgcaaagcgtggagttgcagaagatggagatataggtgatggagttgtagaggagatagtaaatgaggagggagaaggatatgatctcatgattctagtgttgatgaagatgattgtccggttattgtcgaagataatagcgggtacagagaggcagaacaatgtttggctgaaaatttagaggaagaagaagatgaatttgttgatgttgaaatctgcaataacttagaagaccattttgggtttgatgcgtgttaagatgatgctgttaataaatctgatgaaagcggagatgatgtttgggacagcgagaagattccagatccattatcagatgatgatgacaaatatgaagctgagaggccattcactcatggagaccattccgatgaaccgctagccttgaataatacaatcaacaatgcagacgaattcaagtatgcactcctcaggtattctctaaagactgaatacgatatcaaaatgtttaagtcatcatcgaataggcttggggcaaagtgtacacaacacatcaaagaaaagtgtccttggatagtgtattgttcttttgagaagaggaaaaacaagcttttgataaggagattctataataagcatatttgtgtaagatccggttaaacaaagtttttgaaaagtggaactattgcacaactttgggaagaaaggcttcgattgaatcctaaaattaaatctcaggagatggtagttgaaattaagagggagtttaatatgattgtgactgtgcatcagtgtaggagagcaaaacaattgctaagaaataaaagaaaggctagtcatgaatcacattttgcttgcaatgattctataggttatatgtttgttttgatgcattgaaaacagcttggaagaagtcttgttggcctattattcgtttagatgatgcatttatgaaatgggatatcaaagggaaaatgttagttgcagttggtaaagatggggataacagaatatttccaattacttgggcagtggtagaggtggaggatattgataattagatgtgttttgtgcaactgttgaaaaaagacttgagtcttggagatggagctgacattacaatgatatttgataaacatcatgtaagatttttggttctcgtaagttaaatgcaagattttatgatttcttgtgttggatattgatattatttacttgtggtgacaagatttattaaatgcagttcgtgatgagcttccccaagctgaacacagaatgtgtgcaagacacattttggaaaattggaagaagacaaacaaggatattgaatttgagcgtctgttttggaaaatagcaaggtgttacacatcacaatcctttgcaatatagataaattttgatgactttaattttgactataaaaataatattataaatgacaaatttaattacaatttattatattcatatttcataaaaaaaattatattatttatttactatcttcaaaaaaataaacatttaagatagtacttatttagttattgaatgtagcagatttatagttggaatatgtaaactgcaatattttacatgcatgccatttcaatatgtgtaaaacattttgacagacgatgcatgacacatatctctctcacaaatttccaaagtccttttaaatttttccacaacttctatttatatatatttgattatttattctgaagaatacttttagaattttatttatcttcatatttatggataattttggtatatttaaaaaatgagaaatgaaaaaatatttaacaatgtggataaagatcttctagaggttctaggtttaacagaaaaaaaaacaaaatcgtggcagttagctcaaattgagttccatgttgataattaaggttttcttaaaccagataaaaaagtttgggttagaaagatctcacataataatatatttatttaggattttggtgctttgtggacggatcacagagagaaaacaataagttttcaggaacagtgtggttctatacatcatcaaatacagagttgccaactatatgacgcgaatctctgtagaagtctatctctactccatacctaagtcgaaggtctactctggacgataaagtgtatgatttgtcccgaaaactaagatttagcctttttacggacagttcaaacctggtgaatatggtgtctttcccaaccgaatggtcggcgtttcaacatatttggaggattttcaaagcgacaaagaagaattcataagcttctttttattattaatctctcacaatgcaaatgtaaaagttgataattcggtatgaaaagttcgaaccgtttcgtatcatttatgtaaacaatattcctcaaaattggatcttttgaactctaaataaaaagataattaaaaaaatgttcatctatgatgagctacatatattatattgtattagcaacaaacctcatgatacgttcaacgtcgaaaatacacattctaagtaatagaaaaataactattaatattcccatccatgttgaagaaaatataagaaaagctaagaaactcaaaaagaagaaataaaaacaccatagaaaccggaagtgtctaaaattccaccacaaatctctaagtgactttctcaaaaataaagacttcgtcaacacaaactttcttttgatagaccacaaaaatttcttatgttgtctattcttggtatgctttgatagagacctctcctcttcaacactcgctctctctctttctttcctttttttcctctatcatttcatccatctcagattatcttcgtttttcttcatctccagagactctccttccatctacccttagagggcgcgcctcccgtgcgccttcttaactggttatggaatccaaatgtctcatgttcgtttccattgtatctgtcttcttc

SEQ ID NO: 12369 - DNA, 293 bp, Unknown
  misc_feature (1)..( 293): cDNA_ID_2706598_gDNA_ID_2214546_Annot_ID_134566 3000 nt of promoter + ATG
agttatataagttcattaaaatttgtagctgaagaccaaaaagttaatagtaataagtgggcttgacgaaataaagttaacaacaagtgggctgataactagataacaaagtgggctgataaaataaagattgggcccagattttaaattgagttttattataattgacccagcttcgggcaagttttcgcttttgacccttaactaattattctccgtgtggtttggatttggcgattggcaatagattcatcagaggtttttgatattggagggaatcggtaacgggcatg

SEQ ID NO: 12370 - DNA, 3000 bp, Unknown
  misc_feature (1)..( 3000): cDNA_ID_2708814_gDNA_ID_2214546_Annot_ID_134569 3000 nt of promoter + ATG
ctcgccgttctgcggacactgaacgcggatgagttccagcggcagataagcgatctcgccacgtggctaagcgcagcactcacggatgatgacacgtgtctagatggatttgaagagacgtcgagtagaacacggacggtcaggatggtccggaggaaggccaccaagtgtatgcgactatgcagcaatgctctggctctcctcaagaagcttgcttttgatggcttgtaatctacgctatgatatttatttattacccatacaatcatgaatcatacatacattagaagaagaaaaaaactttattttactttcgaactattattgtaacactaattataaataatatgattgttgattgttgtcctggttattcttaactcacacaaattatcatgaatttatcattttcgtacttattacaaaatcagttggcctcggtttattatctattatatcttgcaaatatctcattttttcgtaacgttacaatgtttttggatcaatcgtatcgtgattgccatggaaccattttgtcattccgtaagtttggtgacaaaacattataaaagttgtttccaactacatttcagaaacattcatttaatggtacgttatttatttccacaagtatattcattacatgtggtttttttcactttattaaaatattggagaattgtaattgacaaaatttattgtggaataaaacaaaatattctacatatcaatttattgaggcgaataaacaaaaggggagcgagatggtcattggtcactatattagctaaagcccaaatttgaatctaacggggattggtagatgtttcagagatgggcctacatttagcccaaaatgcggattcagatttttccccgtgactactccaaaaggcccacaaacaaaggtttcttttgtttttgtttttgtttcacaaaaacgttacaacagcaatatcaattgttttgagtcatgtaattaaaccgtgagatagtttttttttttttttttgggtaaaaaccgtgagatagttctgaaaatactgctgtttaagttataatgctcggcaatgatttgctgcagacttgcagtagatgtacgtgagtcgtgacaaattactactcctactatttgttgttgatatttttaatagtagacgtattctgcacatacactattatatatgttcatctacttactctatactaaacaaataaaaaaaaaaaaaaaaaaaaagtgacgctgctggctcgaaaatggggagaatgaaagagtgcagaaaacgtgggaaataatagagatacacgtggcaatatatgaatcagtgtcgcttcacgaccaagtcccttctccgacgtgcgagcctcctcctcctcctcctcctcctctatcgttttcatcttcgtcattttttttttcaattttcattctaatttgggtttagtaaattaagttgtgttcacataatgtcaagcacacaacattaattactaattttacgaactaaatgtagttgattctaaataactttaacttttaactgagtttcacgtatcaatgaaatcagaatcaaatttgtattaatcgattttatattatgttggttatatttctttatatgcagaaaatttatcaaaataatgacaaggctcgaccaaaaaaattaaaaattaaaaatattgacaaggcattctcatgcatgtatgtgtatcgttgaattgtcaatattccgccaaccttggttaattttaaatatgatgtatatatattatagaaattaaatatataaaatttgtgcgtctctttgtccattatcgacaccaaatcaatctcttattgtttcttcctcttttctcttagcaaacttatattcgtttttgtttatgtatgttaggaagttaacgtcaaagtaaacctagataaatgttattaccacggtcacccatacaatataatctgacccataaaaaaagttatcatcgaaactcaaaacatgtttgtacctaaataataatatgccaaaatttgtgtcaaaaaacgttgttatgtcacgttttcttctcaacaaaaaagtgaaaacgttatgaatgcatgtgagtttataaatctgtcaataaacgtttcgtacgagaaaaatatatttcctaacgataaatgtatacataaatgatcatatatatatgttaggtatcactagtgggaaaaataattaaacagaagaaaataaacgagcgttgaaatcactcaaagttgccatcaaattggctttgcgtgacaaattaggcgcttattgactttcttaaggtacattactctactttgttaactctatgatacattttcgtcgtttttttatatatcgatcgagtatgaagttttctctaaataattccttacttacatagtcatattacatatactttatatgttgtcagcactttccaattcaaaaattcatttccccataatgacaatgaatacaaaagttataatttatacaaaatataaaaatgcaaagaaaatgtcagtagttgccaaataaaacatcaaagttatttaataagtcataaatagattgattcacaacaagtaataaatacaaaactgaaaataaatttatttctttataaaactagtcatttaattttgtaaagacaacattttataaaagagaaaattgtaattggtcaacaaatgaacgaagatagtaatcaatgtccgtccggttttgaagaatcgtttacttttcaaatctgaaaaacgcctaaaagagagagagaaacaaagtaaatataggggcatcatcgtaataaaagaagaagaacgaggctaaaacagtaacgcaccttcgtctacttaaatacaagcgaaaacccaaatcggttttcactccccgtcctacaggtcgactcagtctccggctagttcgactcggtaaaatcacgattactttctccttccatttatcacgatcgtggatccagaaactctgaaagatg

SEQ ID NO: 12371 - DNA, 3000 bp, Unknown
  misc_feature (1)..( 3000): cDNA_ID_2711904_gDNA_ID_2214546_Annot_ID_134572 3000 nt of promoter + ATG
cttgctagttctattatctggctgctgaatttgttgctattttcggctttccctttagcagcttgttttttggtttcttgcagattgcattggatcagcatttaacatgaaaggagccatgcaatgccctaactgtcgcaatgtcgaaaagggtcagtggttgtatgcaaacggttctactcgcccctttccagagttttccatggaagattggatccctgaagaagacttgtacggtttaagctatccggaaatggtaaaagctcactactttgtgcaacgatatgctttcttttcgtgtacatgagaactgtgcttttatcatataacctccttatgagagatcgcttatcctgacatttttacggggtttgcagcaatatcgggtccattggtgcccgtttggtgaactctctcaagcagcagcttctttcgagtaagcctacaacacctttaccatggtttttgctattatctctcttttctaaggcttttgatccttcaaacgcgaaagctagaattgacttttgctctgtgtttcagggaactggaacctgcaaccactacatgtaagttagacgctgattgttctgtatataatcatttcattttgtctagcaatccgtttataatgtcaaaacccatatttcttccttagatcatactgagttccatggacatcacgccgctgctgtgaatcattcgtatcttgcatatgttggacctggcccagccgctaccccgagaactagcgacaataacagcacagatgatcatccctggaacagccactctaacgatcactttcaccagcttcctgttgccccccagtatcatcaccattccccatcgttttcactacccgctgctcatgtggttgatggtgaagttgactcttcagcagcacgaggcctaccttatgcgcatccatttctttttagtcaccggttagcttctcaaactccctattgctctcaacttcttgcagagtgttttacaatattcttttggaattgggcattgtaggtctaatcaaaggtcctcaccagcaattaacagttaccaaggaagcagcacccaaatgcgtgaacagcatcatgcttataatcatcagaggcaacaacatcatgccaatggtcccactctcgcatcacctctcatctccatgacaagaaggggattaccgccgccgccacctcccccaccaatgccagatcagaacgttggattcttcatttatccaggtggacaccatgaaccagaaaccgatcaaattcatgcatgggagagagattggttcccacatttccctgtcccatcgaatcatcgcacgatccctagcttgtggcatagacacttctgagagaagttgtgtcagaactctacagtcgcctgggagaattctatcaggcttaatgatcaatgtataaaagaaaactggggacttgtttgatcgatcaaaacttgtttatgatgtaactataactggtttccaatgtacattgtgagctttccaagaacaattgttataattaattaaacacaagttatcgacaaaatgttgccattgttcctggttggatggagtaatagtgaagaagtaaatgatccacaatccacatgtccataattcaggtggaaaagtatacgtctcaaagagacgatttaacataaaaagaaagcagaacatgattggataaaattgaaaactgaaaaacaatcaaagcgtttagagattccaagatacaaaatcttccatgaaccttttattattcttctctggaatcggatgaagcttgaaggaggattgttgagactagtgatggttgtgagtcccatctccggcttcttcacctttcctcgaagctgctcttagtttacgctgctcctccttgtatatcctgttccttctttgaaactgcaacaacaggtacacaacacataaaaacttaaacttacagcatcttcattcaaagtaaagaaaccactggtgtcaatcgtaatgttctaagagagccgtgtaattgcagaagaaacagttgtaacatgtacagagatgatttagttccagaaacgcctaatcgatacatcctatcttaaacaagagaacatgatctttcaatggcatcttgattctgcagctgaggattccgaaaatggccaatcaacaaaggcatgggactcatttcccaattgctcgacctgatctaggatttttggaatttcgacaactaagtgatctagacatcacaatcacactgatctagccggaaacagtggcgaacatcagaaccatcaaatcaatgaaattcttcaaacaatatcaccggaaaaaagaagtgggtacctacctctttggaatggtggagacactcgaggtaatcttcacgaagaagggtacaatctttgggctctctgcagtgagacatacattcactgaaatccatccagaaatcgtagcatctccctttgtttcccgttattccccatcccgacgccatttcctctccaacccaaatcggaagaacgcaacaaaaccagacaggttcgtcaacttcatcgaaaatggttcgggttcgggtttttggatgacccgagatatccattaatggacttttttattactgggctatgagtgggccggttctatttgtaagtttttttcctgctttttttcaagtgttttgattggcggcacttttttgcccatgatatatatatgtcctttccttagtgggacctaggtaattcgcggcaagctctccagtgtgtgtatacacccgcacacattttgactagtcaaacctagtcaacttattagacttgagagatcaacgagcgagctaaacgtacgctcgtcgcacctgatcgacgctcccctaaaacccccctaaaagcgtagagaggaaggatgtgattggcagtattagaaataccagagactggactagactctgtgtgtagaggaagagagacagtgctccgcgtacgacaacaatg

SEQ ID NO: 12372 - DNA, 3000 bp, Unknown
  misc_feature (1)..( 3000): cDNA_ID_3024937_gDNA_ID_2214546_Annot_ID_134573 3000 nt of promoter + ATG
cattttggacactatcttatagattcgatctattgtatttctaaagcatatatgcacccaatttttaagaataatgaaagaatactcccaccataagcatttagcttcatctaaggatcttcgcaccaaacaggaactcatgtgataggtacttatgcagtagcagaagacctagcaaacccgactgtccttactatttcacaggtaacccaagtttgacatcttctattataaaagaagttaaacattctctacacaattataatattattaccatttgcgtcattaatggctctggattccgtgcagcaaatatggagaacttgttgtctcaatgacagcttaagtatagatgggggctcatgttcttcaagcttgttaaaaaatgcactcggcaccaggcgatacacctcaccatcacatgttcgacctgtcctccctctacgttgctcagcctataacccacataagaagctaaatttagaacatccagtcatccactattattccataaatggtaaattctagcaatacctgagatctagagacccaaacaagctgtactgcgtctctttttctggacggatcccagaacacttgcagagaccggcacgagtcaatgacatatgctactttgggtattgttaccgaagattccgcaatgtttgtagccaatattacctgagaacagtattttggaaaatttatataactatgacgtcacaaaatggtagttgcaactcattgcatcaatacgagtttgatgtccccccaataataatgctcatctctcaaggacaaagaaacatggaaaggtaaaagagaaaccttgcggcgggatctgcatatcttcatagccgccaaggcttgctcggtgtcaatgcttcggtgcaatatgtgaacctcaaaagatgcaaaaaagggttccaattgatgatactgctgctcaagggagtagtatgtcggaaggaaaaccaaaatactcttctcaatgtctggttctttttcatgaatatataagataagatcatgaataagattttgcagttcaggtttgatttcagtatcagctgaagaaggacttggaccaggacagtaagctgacaaatcagaactcacaccaagcaatcctgcaacctgcttcacaaacagtgtcatattaattagcttggaaatacttgccgtcagaaaagaagaaaatcaattggataataatatagtttcataaagagcaacaaatctaaaaaagtttaacctgctcaagatataatactcttcgctggaaaattgttctctggtcagggctaggaatagcaactacttctacgcgttcacccctgcctagttctttaaagtagtctctgtaccttgttatatcagcagttgcagacatcaagaccaccctgtaattaatcaaatcacctctttaataaccatgacctcaatacaaacgttatcgatgataacacggttgaagtaatgaatcggtatagtatagaactgacttatcttctatcagcaaacacaaccacgcgaaacaatttaagaaccttaaagtaattacatcatgttgtagaaaagggttataacctgaggtcattattcttcatgagaaactgcttaacacagacaagaacaagatctgactccacagatctttcatgcacttcatcaagaatgataaccttgtactttagtgcattcaaccccttgtctagcatttcatccaacagaactccagcagttttgaacagaattttcgacctgcatgcaacaggataattgcataaaagtcatcaataagggggaaaaagccaaatattgtcctgaaaactcggacacagtagaagaaactgaaaggagatattgttctataagtcaagaagatgaagataatgatagttacccttcggtcaaaatcttagaatgcccaatgtggtaaccaatttctccacctaaatcggagttgcgagatttagcaaccatcttagcaacagctacaaccgcaaatctcctaggctgtgtacacaaaatgggagccatgtttgcttccagaaggaactgtggaacttgtgaactcttccctgaagcaaagaaggacaagtaagtaaccacactacgtatgagatgagtcgaaaatccagctatccattacaatcacaacagttcaaaggcgcagggaagctaaatatggcccaacttgtactatttccgtttaacgcgttaagatagaaacgaatcaaatggactatccactcacagaaaacattcaaaatctggtgtcatacaggaagaaaccccaacggagcatttctgtaatcaaaatgacgaagacgacaaaacaaaaacaaaaaccccaacggaaatgcagattactaactagagtaagtcgtctcggaacgaaggaagaaaaatagaataagagaaagaagaaggcgagcgcaggtaccgcatccaggctcgccgacgatgagagtgacgcgattctcgaggattttgtcgatgattctccttttcatcgccataatcggaagcgaagcgaagttggaggagggtaaaggtaacgattcagaagagctggaagacgaagtcggcgaagaaaccgccattgttgtcgtacgcggagcactgtctctcttcctctacacacagagtctagtccagtctctggtatttctaatactgccaatcacatccttcctctctacgcttttaggggggttttaggggagcgtcgatcaggtgcgacgagcgtacgtttagctcgctcgttgatctctcaagtctaataagttgactaggtttgactagtcaaaatgtgtgcgggtgtatacacacactggagagcttgccgcgaattacctaggtcccactaaggaaaggacatatatatatcatgggcaaaaaagtgccgccaatcaaaacacttgaaaaaaagcaggaaaaaaacttacaaatagaaccggcccactcatagcccagtaataaaaaagtccatta

SEQ ID NO: 12373 - DNA, 3000 bp, Unknown
  misc_feature (1)..( 3000): cDNA_ID_2729568_gDNA_ID_2214546_Annot_ID_134575 3000 nt of promoter + ATG
ttagggtcaaactgttgaccttcaacttgaagccatacgttagtggttgccttgactttcttgcagtcttgggagataagcttttcacctttctcactgtattcctctgctaggtactgtgtgatggctcttgactctgcaaatatattaccaacaaaaactttcagcaacaaaaataatcatcacagtctgtcatttcagataaatcgttatccaatacaaagtgactaaggcgtaatgatgtttctgtaaatctaaaaaagtcaaatcattgatcaaagcaaaagtaaactgaccgaaaagcgtcaaatcaccgtcctcgagagcaggaatttgaccgaagggctgaaacaaaacaaagatcattgtcagataattggaaaaaccaaacataaagtgttttcagttttgtttgttcgtaaagagagagagggagaaaggggttacgttgagggcaaggtgggcctcttgcttgtgggcaccggctctcatatcgacggggatgagctcgaactggagatctttctcgtaaagagtagcgaggacgcgcattgtggcggtggacatgggaactccgtgaaccttgatactggccatgatgatcgaagaagaagaagaagaagaagatttgttggatctgattttgaaattggaattggatgaagaagaatgaaggaaggtatggtgttttatagaagggggagaaaggaacaagggaagacgagcttgaattgctcccatttttccagaatcttctcaccaccacccactacccacaggcacgtctctctttcctttttttttattgggtcccctttatttattgcattgttatccatctaacatatagaaatcacggatttattgactgaaacaaaattcccctcactaatttgttattttgcaaacaaaaaaatcagttagattcatgtcaatatagctaatctatgtacatgtaaagaaatttcattgaataaaaatagaaagacacaaacatcacataaactgttctaaggtaatccttccttcctttgtaaacatacaaatccaaaagtgtagaggaggtcgtcatcaatgacataagattctagagttataagtgtggattgaaaaagtcaacctctcctagaaacgaatctcatctttcctgagacgacgactcaaaagaaaagactttttacgtgtaaacgtatcattcgatattaaactactcccaaaacaaataatttaaggacatgtacagacaaagcccacctgtttttattaattttctaaaacccataacaccttttgaccaactaactctcaatccaattcaacaggagaagaaggatcaataacaataacaataatcaatccccttatgttataactaaatctagttgctggaaacagaaccatctccctcctcatcagatttttgcattaccatctacaatttggaaacagttatatggtgattatatacatgtcaagaattcagaaacaaacacttgaactttcattatcactctcttcatatgcaattttactcttgtaatgttgacctttctttttgttgtttttttcagaaaaatatatatgcaaaatagtattctcaatatgagatccaacgtaattaactaaataatcattaagtgattagtggttcaacatttacatatatacatactctctcttcttgcctcgagattgaccgacaattccataactaaccggaaaccacatatgttaccaaagacacaagcctaaaatccagaatctcaacaagattaatatatataaaggaagtaagagaatgctgacttgttgtttcaaaacacagaaggcggcttcagacagttatgatactcgagctgagacatctctcctccgtgtactggatcaaaactggcctttgtagaagctgcaaaacacccaaaaatcaaacaaagctgctgatccgacttgtaggacattattaaggttagggtatggttctcttacctcccatccatcccaagaatctgtgttcttctcatgtccaaatgccactatgtattaagatccttcgaccaaccggaactgagccactgacaactctgagctgaaatactttggtaacactcctatatggacaaagagcaaggtttgatgatagataagaatgatgacgtctcaaaatgctacggagaaactggtttggggtttaaggtatatgtacctctgagtaatgatagagatgatgacggtgataaagcagcatgaattgcatcaggtgcctttcgggatgtgtccttccctggagatccagaattgattttcagaccgacaacatgaacagtggccatgggaatctgaagattctggagaaatctgaaatcagataaaaaaaggtaaagagtagcgtcaagacgaagaagaatataactaaaagcaatttggttagagaggtttctgtcgcactcctgcttttgcttcacgtcgtcatattattctacagccggccgtctcatttttattttgtaattgttatcatctgagccggattttacccaactcaaatcattccactatttgaaattagatttttcttgtaatagttaatttccaagtaaaatcgaaagttatcaaaccaattcatatcagtttgttactaaaaagctaataactgttaacctgcaaaatccttttatgtactttgttttatgggtaatattcaaattagaataaattttgtgtaaaatctgtgggttcttcttatttaaaatctgtgggtaactttaaatattgggaaatttactaatggaaaggcataaagaaatgaggaccagccacgtcatcaaatcaaagtatcacattcctcttttctttttatttaaagaaattaaataatagaagaagaagataccaaaactctctttttctgtgcaaacactttggaggattcttctaggcttctttctaccacaaacacaagagcgcgttttcttcacgccggcgaacaacgtcagagtcatg

SEQ ID NO: 12374 - DNA, 3000 bp, Unknown
  misc_feature (1)..( 3000): cDNA_ID_1834169_gDNA_ID_2214546_Annot_ID_134577 3000 nt of promoter + ATG
atacctcttgatagctccatatccatggcttcccacaacaagaatagaagcatgatgcttatctacaacttcacataggatattccttgcatcaccttcgaaaacttcgatcaccgcgccatgaacctacacaacaaacctaggaatgatgattgaaaagaagaagatagttgctaaccaaagatagatagttactataagaaaaaccagtgctacttagcttgaagctcttaaatgtgctagagattcacattcacattaccaaactcatctaatagagtccaatacaacacatgatgacgattataaaatccaagaaacacataaaacgaatttgaatgtttgataatagcaagatcgtaccgatctgctctgacaaattgctttggctttctcgacaaccttagcagcggtatgcttcagatcagcatcaacataaggtacaacctccgcagttcctaaaacacacagattaacaaaacctaaatgatctctccccatcgctgcccaaaacagaacccctagaagagtagattcgagagtgaaagcaaagagcgtaccgggaccagcgagaccaacggcggagacggcgttaggtttggcgtggacgatgaagagcttaaaaggataattgggagcgtaaggagcgaagaaacgatcgagcgtccactccaaggcgtaagtgctctgctcgctgtcgtcaactccgacgaccatcaccgatttcccatctccggtggccatgactctgacgttgttcgccggcgtgaagaaaacgcgctcttgtgtttgtggtagaaagaagcctagaagaatcctccaaagtgtttgcacagaaaaagagagttttggtatcttcttcttctattatttaatttctttaaataaaaagaaaagaggaatgtgatactttgatttgatgacgtggctggtcctcatttctttatgcctttccattagtaaatttcccaatatttaaagttacccacagattttaaataagaagaacccacagattttacacaaaatttattctaatttgaatattacccataaaacaaagtacataaaaggattttgcaggttaacagttattagctttttagtaacaaactgatatgaattggtttgataactttcgattttacttggaaattaactattacaagaaaaatctaatttcaaatagtggaatgatttgagttgggtaaaatccggctcagatgataacaattacaaaataaaaatgagacggccggctgtagaataatatgacgacgtgaagcaaaagcaggagtgcgacagaaacctctctaaccaaattgcttttagttatattcttcttcgtcttgacgctactctttacctttttttatctgatttcagatttctccagaatcttcagattcccatggccactgttcatgttgtcggtctgaaaatcaattctggatctccagggaaggacacatcccgaaaggcacctgatgcaattcatgctgctttatcaccgtcatcatctctatcattactcagaggtacatataccttaaaccccaaaccagtttctccgtagcattttgagacgtcatcattcttatctatcatcaaaccttgctctttgtccatataggagtgttaccaaagtatttcagctcagagttgtcagtggctcagttccggttggtcgaaggatcttaatacatagtggcatttggacatgagaagaacacagattcttgggatggatgggaggtaagagaaccataccctaaccttaataatgtcctacaagtcggatcagcagctttgtttgatttttgggtgttttgcagcttctacaaaggccagttttgatccagtacacggaggagagatgtctcagctcgagtatcataactgtctgaagccgccttctgtgttttgaaacaacaagtcagcattctcttacttcctttatatatattaatcttgttgagattctggattttaggcttgtgtctttggtaacatatgtggtttccggttagttatggaattgtcggtcaatctcgaggcaagaagagagagtatgtatatatgtaaatgttgaaccactaatcacttaatgattatttagttaattacgttggatctcatattgagaatactattttgcatatatatttttctgaaaaaaacaacaaaaagaaaggtcaacattacaagagtaaaattgcatatgaagagagtgataatgaaagttcaagtgtttgtttctgaattcttgacatgtatataatcaccatataactgtttccaaattgtagatggtaatgcaaaaatctgatgaggagggagatggttctgtttccagcaactagatttagttataacataaggggattgattattgttattgttattgatccttcttctcctgttgaattggattgagagttagttggtcaaaaggtgttatgggttttagaaaattaataaaaacaggtgggctttgtctgtacatgtccttaaattatttgttttgggagtagtttaatatcgaatgatacgtttacacgtaaaaagtcttttcttttgagtcgtcgtctcaggaaagatgagattcgtttctaggagaggttgactttttcaatccacacttataactctagaatcttatgtcattgatgacgacctcctctacacttttggatttgtatgtttacaaaggaaggaaggattaccttagaacagtttatgtgatgtttgtgtctttctatttttattcaatgaaatttctttacatgtacatagattagctatattgacatgaatctaactgatttttttgtttgcaaaataacaaattagtgaggggaattttgtttcagtcaataaatccgtgatttctatatgttagatggataacaatgcaataaataaaggggacccaataaaaaaaaaggaaagagagacgtgcctgtgggtagtgggtggtggtgagaagattctggaaaa

SEQ ID NO: 12375 - DNA, 3000 bp, Unknown
  misc_feature (1)..( 3000): cDNA_ID_1807546_gDNA_ID_2214546_Annot_ID_134579 3000 nt of promoter + ATG
ctatgttgctggaagtcggatgaggatgctaccgagattaaccggtcttggacttcaagtgagttggttgttaagccgccaaggaaccgcaagaaaaacagacactctccttactagtaaacagatactactttttgggtcttgtgtcttttataaaagttgagactgaagaggacagtttcctttatgtctcttgttcttgttattattaaaaggcaaagttgtttaaatgaaatattgaagaaagattacatctcttgggatagcaaattgcagaaaggaaagaaaaacagagtacatacagtatatatactctatagaagaaggaatctttggcttcagaagagtaaatagtcaatcagctcgacactgatcttgttccaaaatatcagagatcttctcaataggaatcatgggtagatactctgccccaaagtagtctctgtcgccaacgtaacgaaccgcatcgttgtacttctctgaccagtaaaacgccgtggggatcactaaatgcgcaacttcagggaacaacggcagttgattcagtaaacgccacagcgtcgctgcgtaatactctgccgctggctcgtacttgtcccggacgcttcttgcaatgctcttggtagtgtccacaacgccggtgcgctgcacctccgtggccaccgtgagcgcttggctagaagcttgcttcaccaatgacggaacatatgtctcaacatcgaagaacacatcgtccacctgaaaaccaagcaaatcatttgcctctcactcatgaaaccgaagcgatattcaagttaagaattacattctgattgttaccttacgatcgacgaaaaggagaagcttgaaaggaacgtcgtggaatttttcgtataatggagcaagcacggttcgaacgcaatcttcaatgttctcgacgccgagtttgagtggaccagcgttgtctttagccaactcgtagagggtcgagaaacaggcggcgaagtaaaccgccgcgacttgaatgaattccaagtgcttgagcttcatctcatcgtcgtcttccaccactaacgaaggcgaagacgaagaagatggtggaactggagtaatctcctgtggctgtgattgctcttcttcgactactatttcatcttcagccattgtcaaagacttggtgccgttgcagacaaacgaaccgctctctctctctttaaaaagacttatatcacaccggacggctcagatttgaaactggtgagccacgtggcatgttgctgccatgctccattttagttttaatttaagcgaaagggattggattgtgagagacgagtgacctctaggacagctgtcctattgacagatgtcttactcttaatggaccgttttcaacacgtgtcgaggtatgggtcgagactgttgcacgaaagccacggccactccgtcggcacgagtctcgagggtaaatcaaaaaagcacaaggacctctcgttcgctatcattcatccactttttgtatattccctccaaaccttacatgatatcatcacgtgttaaaatggattgggccctaatcctcgagttcctatattaattttaggtttaccactgactgagaagcccacaaaacagtgtcaacggcccaacccaaaactgatcaaagtatagttggctttaccgtttgaatttgttccgtttcggcgacataaaagtaaaacgatcgccttttaagaatctcacagtttgatttcagaccaacgcttaaaacttctacaatatcacattatttctcaagtatatcatgttcatgtctattactccacaatgaccagaccattggatcgcaaagacatcttttatggtatatatcacaaaaaacaaaaacaacaagaaacactcatatgactcagactctacaaacatcatcgtatagcgtttacagatctcacgcgactgcaagctttacattaacagcggctacaaaggcagcccaagccaaacacggctttaccagattaccagcgaccggacttatctcattaaaggccttgtagcatccgaataacgcagccgattgacccaaccacaccgcaagccccgctactcccgacccgacgcggaacgtaaccggatcccaaaccaaacagagcaaaaactgagctaagtaaagatacagagcattgggcttcttgtggaagccaccgtcaacccatacaagccacgcagccaaacccatcagaccactagaagcgagacacgttgtgtgtaggagccacagaggtgggatccacgacgaggacttagctcgattcccgtatccgtcgcttgtgccgaggaaatacgtagcgaagagcgtcacgagcacaggagccgcaaccgctaccgtcagagacttgagaccacgtttcgccatcgccctcttttgatcgcgttttcctttgttgtcgtcagcgcttttcctctctgtctcggccatagccgtcgttgcagcgtctctgtcgtctccgccgcggtatctgatgtcctgagaatccattacaaacgtccaaaacagaatcgaaggaacaagattactgagatttgagatgttggatagatggagaagaagcagcttggtcaaaagagagtataatcaggagatgatattaatagacaagaagaagaagcaaaaaggccaaggctcttgtacacgtggcgagtgatatgtacacgtcgaatgctaattaattgttttttgtttttagataactttgtgaaaaagtgtggacacgtgcttactctatatgctcatgtctgatgcatacacacagttttgggacgattgcgatgcttatttatttatcgcttaatacttttgcattattaaaaaataaaacaacaattgggctctacaccgactaagacaagaagcccaataggctcatttaatttgggctaattagaagagtagtaatatggaagtagttgtctgttacgcggcgttggctagacgctgatgcgatttgctctgttttcatg

SEQ ID NO: 12376 - DNA, 3000 bp, Unknown
  misc_feature (1)..( 3000): cDNA_ID_2708799_gDNA_ID_2214546_Annot_ID_134583 3000 nt of promoter + ATG
agacatatcaatccatccacggaagcggaaagaagcttgttgggcttgttaggaacaaagtgtacctataattaagaacagagttgacatctataaactaacaacaaactagttcctttcccgcttgagcagaaagaatgagagagcaacaaacctgagtgacgtcgtccatgtgggattcctctaaacaagcaacttgctttgagtttctccagtcccacaaaagaacctgcaccatcgcttcagattgtaacaagctgaaacatagaaaatgctcaaaactagccttttttctttctcaaagtgtactcctttttaaacatttagagaaacaaaaaaaaaaacacgattccacaggattgagatgcctaacctgctctttgcatccaccagccagaagattatctgcagcacctccataggagaagctgaaaatctcctgatcattcccagtatcaatacgcgaaacctgaaacacccatgatcaacttaaattcaatgagttccgaaaatggaatcacatttacgacagaatttatataaaaaaaaaaaaactcacctgttggaaacttcgagtgtcccaagatctaatggtaccatcggaggaacaagagtgcaaaacgtgaggagacgccgccgagtcggaggaaaacgcaatctgattgacggtatcggagtggcctttacattcgccgtagtactgaccagtcaccggcgagtaaagcttgacggtgttggttgataaggaaaccgcgattgctgtccaatcgattctgtcacaaaaccagagttgggttcactttcagtaaactaattagtatggttatcgaaaagagagaacagaaagcttttactttgggacaatctggaagacgtagtcagagccgaagttggtctgaatagagttcttgagcccaaatttcttcacgttttgagccggagaagaatccgaaagctgacgattttgaacctccacttccatctccgacgacacttcttccatttgccgtttcagcgaaattgataagggttttaacggtctagggtttgttcgttgatcaaaacgaaacgaggattagcacttacctctctaagtcatagagaaggttataactctataggtcaaaatttaggcctgttttaaccttttcggcccatttaacgcacggtccaatacgattattagcccaaggaaacaacaaccaactcgctcgctcaccgtgcgcttcttctaaacatgtccatagaaacataaacatactaaaatgtgaaaagattaaattaaaaaacggatagaaacatatagaaagccacgtgatggtagcaaacagatttagtggttacaaccagatatcatttgatattgagatttatgaaaatgtcctttttcaatggctccgatcggtcagtgatcggatctaatattataaaggtgtgttgacccataacataatattattactaatacaagtaacatgcggtaattaactctatgtcgatcttttttctctgcatatatatcttttagtcggttttttcgttcttgctaatcgttatattcctctacacatggcaatggaaaagaaacgagtaacaacaacaagtagcctgcaaataattaagtgcgataagacaactctgctctgattggaaactgatattccggcccgtcccccttttattacgtaggagtaataaaattgggaacgtcaacttatattaatcatgacgacgttttctcaagggagcaaattgtacgttacgtctcatattatcaccacttttttgcagcaacacagttttatttcacacaatacaacaacactttatattatatatgagagtgatagaattttatcattccatatttccatgatataaagggttccaataattggtccaatttttctaataagacttttcttattctcatagactcttcttattcatctttcttaatcaattcgaccaactcagtggaagacaaatctcacacgaccctttccactttttggtaactttattattaatttattagtatggtgtagttcctttctttcttctgctgatcttgtcaacaaaatactaaatttttcctaagcggctgtttatatattattaacaaaggtttccgcgtgtctcttgtttaactagtagactaaaaacaaatcgtaaactcgattttctcaaccaaatttagaagatactacggcatgtaattagctaatgataaaagattcgaattttcgttccaatggatttgtcttttcttttgcccaaaaccaagaatttgtcttctcttggcagtatttagctagacaacgcatatagctatatattttgtgtacactggtcaaggtcgtggatacgtcattaataatattatttccaataagtcctattaaaacattaaacaactttgagttttaaaacaaacttagtgtaaagaaaataaaaatagcagacagtttacgggtaagactagatgaccatatatgattgagtgcataaaacatcttttttctttctttttttgaaaaagcgaaactaaaagattattagttgttggaaatcagcttagcgtaatcttcgagaaaatgactctaatgctaaaatactgatttaatcaattttctaatggtttgacccaacagacttttttttttttctatcctctaataatatataatcatatagtagtaattatttagtagataatatgattaacacgtgaatagcaaagtttctatcatttttattcaaaaaaagattcataagtaataaaatgatagtcaacttttctttttctttttgtgtttggccttttgttgcagcgtcattgttgtacaccaccagtcacactattgtgggatgtgataatcggtaccttttaatgtcaggagcttctttcttacattttccacttcaaacaaaccgataattcagaggaattttctcttcctctctctctctcttttttatattttttcactgggaaaa

SEQ ID NO: 12377 - DNA, 3000 bp, Unknown
  misc_feature (1)..( 3000): cDNA_ID_2708787_gDNA_ID_2214546_Annot_ID_134586 3000 nt of promoter + ATG
atagtaggagcattcgttatcaccctacaaagagtttataaaagatcatgcaaactcgagactagccttttatttgacatgagtggaaacaaagcttacctctcgtacagggtatccatatatatttagtggaacgtggctcatggatccacctgcattctttggatggtggaatttgcatgacgccccaaatttacaagttccagttttcaagtaaaactgccaggaaagcagagatcaataatatcacaaaaaaccttgtttcatcacttggaacatataaaatgactggtcggggtgggttacctggcatgggggttcaccaaaacgttcaggatactgcccggtagctctaacagttgcttcaacctatacatgaatcaacatgagaaaatagtaaactgtggccaagctaagatgacaaaatgataagcttttacaagagcatacaaaggtatcagtaaatacagggaaacaccgggtagagtcaatgcataagacaaaaaaaaacgtgacgtaaagcacaacaactgaaaccagtaaagcttaacaatttccccagtttagagagactctataaggccagtgatcacccacattgcggaaaaaacagagagaagcatttgattgtgtcctcctagtatggatggtttcagaacaataataagaaagaagaatgaatgagaggaagaaattaccgaggcacgatcgcgagggtgattgtaacgacatctattaccgtagccacagacaccagttcgcatgtagtaggcacagtcaggagcacctggtctctcagggtacgagtcgctacccaaccctaatcgccacatcgattctgcaaatcacaaaattgagcacagtcagggccatttagcggaaaccctaaagagaccgtacagttgctgagaatcaaagcgcatgcgagaccttggagtccggtatcggcatctgcaggggtccagtcgggagcttgagcagattgtgagccattgaggggaggattgcgagcatacatgtccttaaatttagggatttggtgtacagtaaaaaagatactagtaaaaactcctctcaccaaactagaagaaactaataagagagtaaatgtcaaaagctcatcggtggatcgacagagatttaccggagaagccgattagaaaagctctgagagagaagaaaaaaagaagaagaagaagaagagatgcttcgacagtgattgagaggagcttcttctttggtcggtctctctctctctctctctcttctttcgctcttcaggaataccgtacggtctgccctctgcactactgtttctttttttagctttcaatttctttttctcatattcttttttaaataataatagtatatagtagtagtttgtattaatttgttttgtgagatttatttttggttctctcttggtccttgggtcgccaagtaaaagcatcccagaaaagggaagatatttccaagaaatatactacttgacaaaacaacaaacaaaaaataaataaactaatttttactagtttccaaccaaaatgacggtaaggtccttgggcggggatagcgcgcgagtggccaacatgtgacacacagacagttttctcacttcacttgctaactcggggagtaaagtggtctggtccgaaagtggggacacatccgtcatttctacctgctactgtttcttaactgctctctcaactcgctctgaccgagtctgactcgactcgactcgccttcaatcaatgccatcacatttcttcgtttccgcttcccatttgtcggcgccacaaaaaccttctgttgttcacgaagccctctagtaccatatataggcccatttatatagctaagtcggcccaattatgttgttagtgtgcgcgggccaaattttagattcgaaaacggcagcgtttgagctgttacttttttttgctcttcttgtcaacaaatcgacactgccgactaaacagcgaaaatcccaaacaaaaaaataaaagaatggcgtctctgtgcctttctctccaccaaaccctaactaatcccctgtcggctcccagatgcagaccactcagcctctccttccccggatcctcaaccttctcgatccgcccctctagcagacgcgcaaccgccttgacgacccgcgcctcctacaccccgacgccggcgactgagcgcgtgatttcgatagcgtcgtacgcgctgccgttcttcaattctctgcagtacgggcggttcctgttcgcgcagtacccaaggctgggattgctgttcgagccaatcttcccaatcctgaacctgtacagatcggtgccgtacgcgagcttcgtggcattcttcgggctgtacctgggagtggtgaggaacacgagtttcagtaggtacgtgaggttcaacgcgatgcaggcggtgacgctggatgtgctcctggcggttccggtgctgctgacccgaatactggatccgggtcaaggaggcgggtttggaatgaaggcgatgatgtgggggcacacgggggttttcgtcttcagctttatgtgttttgtgtatggagtcgtcagctccttactcggcaaaactccatacattccatttgtcgctgatgccgccggtagacaactctaattccggccaatatctacctcactcagtgttcgggttttcgattctagaatcggttatttctggtttataagagagaccaaatcaatcagtgttgttaattaaccattaccgttttaaaaaaaatattttttgttatactcccaacatttgatttggcccaatatgaaagaacagtatggggggcctttaatgaagctatcattgactgagtataattttacaatcgtcggtgaaaaggtaactaagtaaacggtaaaaaaatgagcgccgtctatcttaccgcgcaatgaatgagaagtcaatttgggaaactgatcggagaaaagagggagagagggtttctcagctgaaatcaaaatg

SEQ ID NO: 12378 - DNA, 3000 bp, Unknown; identical to SEQ ID NO: 8349
  misc_feature (1)..( 3000): cDNA_ID_1836253_gDNA_ID_2214546_Annot_ID_134589 3000 nt of promoter + ATG

SEQ ID NO: 12379 - DNA, 3000 bp, Unknown; identical to SEQ ID NO: 8348
  misc_feature (1)..( 3000): cDNA_ID_3024907_gDNA_ID_2214546_Annot_ID_134592 3000 nt of promoter + ATG

SEQ ID NO: 12380 - DNA, 3000 bp, Unknown
  misc_feature (1)..( 3000): cDNA_ID_2708783_gDNA_ID_2214546_Annot_ID_134593 3000 nt of promoter + ATG
gctctctcttctcttcagatattcgagattttgaatttattttcccagattttacggctattaatacaacttatccaatgaatattcgccacgtgtgtatcaaatacccaaaaaaatcctcttaattaccatccccaggcctttttcattgtaagcccacaattaggcccacgtatgtaatttgaagatagaacacatcgtttttcattcattgtgatcgatcaagtcgaagagctcatcgccgataccgaatccgagcatcctggccatgtcgctcgtcttcaacctgggctttgggacgccgtgccgtttcagccacggataaaccacaaacactttgttcattacgaaaagctccaacgcctccggattgaaaacgacacccattctcaagctcatctggtgcggcactaacatggctgcgtatcgagcaagttctccagctcgccagtccagcagcagaggcagccaagggtacatcgcgtcgagcctcacgaaccatagtcttacgtccgggtactctgacagctcccgcggatccccggggtcttctctcttgtaattgatggtgaatccgatggttcgatccaaataccgttttggttcagctacaccaaaatcatcaggcgaggttatgccgatggctctctgaaacggggataggtcaagccgcccaattgagtcgttgtcgatcactacttcgtaccggccggtcgttggaggcatcggaggttccactttatctgaatctgctacgcctttcacataattaattagtagcagcctttttttatttatcattctgaatcaattgagcaagtacgaaccttggtcattctcgaaggcagagatgtcgaaattgccagaaggattgaaggcgacggagactgctacgtcttctgccctcctctttcttacacaccacccggcggtctccaacgccggcaattgaaccactgggaacagcgatacgtgtctcggcgatgggataagccacgggagaagaactgcctttgttgccattcacagacgctatctctctttgtgtcttagtcttctttttatcctcttcttttggccttttcttcatttctttccattttatccttttttccttcaccgcacaaatacatatattttgctgtctgtcgtaaaggtttcaaatgttaagcagaatgcatttcttcaatcgttcagaaaaatgaagagctctcttctttaatgtggaatgttttcaactcaagtcagcctcctcggtctcatgtagatgtaggcattgtcgaatctccttcactgttggtgaggtgtttcaggagcatctgcaagcttgaccgtctctgatcttcttcttcgccattgccccttgcaagcagtgaggccttctttgtcttccaaggtcgtaccgggtcaaaggagttgcacaatagaggctttgtaagtaagtagctcaaagactgagaattctgctcactttaaagtttaaatagctatgcaatggaacattccttggcaaagataagtccccaaggtctctaccatagcagtggcaaagataatatgatttgagagaaaaagctcacctatgcaatctagtaagatgaacataagcgtcaaaagatccacttcacagtgtcttagagtgcctgagaatgaatatctattataaggccaaatgatgattttgttgtagtgattaacttctttatgctgtgtaggcatagttaagatcgagacccatttagacttcaattcggcccatatagacgaaaaaaaggattcttacggcccaataatgttattttttataactcataacacctttttttttttttgacgttttcctttgtttgtttgtttttgtttacgttttgaccaaatcagtagttgtccaaatcattatttatatccaaagaaggaagatttcatcttaattatataaagtaaaacgttaaaacaccttttggcccattaaagcggcgaaagtgctgtgatcacggcaacaaaaagcttactctgcttagttttgttttgtcaaatacaattgcgtaaaaagaggaaaaacggaaagaaagtttccattaaaccaaagtattctatttgtaagtcttcttatcttcagatgtctattttatatgatgaattttgaacaagattttttagaatctagtcagttaccatgtttatttcggtgaagttccaacatttctagaaacattaccaaaacaaaagataacaacgagaaagagaaatacatagaaagcacactttaatttcgttatcatgtggcagcttaatttatttctataattgaaaagctttctttatatatatcccttaattaaaaaggcagaagataaatcggtaagaatacggtcaattagaatgaaatgtaaaactttgttaccaaatttagtttgaagaaaataatgataaaataataaaatgactgactgacaacaattaaaaatgagacaaggaaggaagcgattggataacacagagacagacatacatattcactcccccgtcaaaccctaaaatctatttcctctgaccgcttcttcttctgtgggttgtaaaaggcattcgctttcgagtgttggttgtcgatttcgatgccccaatctgggacctgggtactgttcccaagctccacctggattcttattgatgtgaagctcgtataacttgtgaatcgatgcggcctttttaatttcgcttgggatttcttaggtatttattctctgtatccggatctctatctataatcggatcttgtacctattgggttagtactcttgatctgaatgtaataagaagcgtgttttttttttttaataatttggaggagcttgtgttttagttcgttgagatctcgttcgttccgaatgtgggtttattagggttcttgaaaaagtctgcaactttgaattaggtgcattaccaagaaatatatagagactgcttctagttcgttattagttagaattcagagccatg

SEQ ID NO: 12381 - DNA, 3000 bp, Unknown; identical to SEQ ID NO: 8345
  misc_feature (1)..( 3000): cDNA_ID_1376179_gDNA_ID_2214546_Annot_ID_134594 3000 nt of promoter + ATG

SEQ ID NO: 12382 - DNA, 3000 bp, Unknown; identical to SEQ ID NO: 8348
  misc_feature (1)..( 3000): cDNA_ID_3024907_gDNA_ID_2214546_Annot_ID_185430 3000 nt of promoter + ATG

SEQ ID NO: 12383 - DNA, 3000 bp, Unknown; identical to SEQ ID NO: 8349
  misc_feature (1)..( 3000): cDNA_ID_1836253_gDNA_ID_2214546_Annot_ID_185427 3000 nt of promoter + ATG

SEQ ID NO: 12384 - DNA, 3000 bp, Unknown
  misc_feature (1)..( 3000): cDNA_ID_2038779_gDNA_ID_2214546_Annot_ID_185426 3000 nt of promoter + ATG
tggattgaaaagagtgataaataaagtgatgtttgtacccttctttgatagaaatggaagcaatagtaacagtcaaagcgagaatgggatgattcatatcaatgccgtgatgatgtccactatgaattacctcaggagctgcggacagtgcaatctgcaaatgagaaaggaagggagaagaactctgtaaattgaatttattatatcccaaataaaacaaacaatggaggatcgataaaagataaacatgaagtgcaatatattctcatacaatgaagcaaggttgtggaggtggagatgagtaattaaaaaagaaagagaaaggagagagtggtggtcatacagataaaaggtctaaagcatgccaggcaataccagagccagtagccaaaagcatggcagagatgccaagtgctccaagcgtttcaaatttaccatgacctgcccttgtatgcatggggaaattcagttcattgttattataatgtatttacatcaaaggaaagagaagagaaaaggtaaccataaggatgttctttgtccttgggaacatttgcagctctgtaagacactagagcaacaccacttagaacctgagatataatgatgatgatcatgtgagaaacaaaaccaaaggaaggatcatctctcgtcctcagcaaatgagaattttcattaccacatcggaaacggaatgagcagcatcggcgataatggcggtgctgccgcagagataaccggtgagagcttttgcgacagataaacctatatctgcggtgagacctagccggaatatcttctccccttcttctccaggcttttgatattgctggtgatgatcagggtgaccaaaatgccaccttctggagaaatcgaaactaggtttttgcgatgaagaagaagatactcggagtggtgatgatgatgatgatgatgatggcagataacggcaagacatataatatatagtagacctacaaatcctcgtcggattcaggatttgaaatctgataatacccattttgatttcagctgagaaaccctctctccctcttttctccgatcagtttcccaaattgacttctcattcattgcgcggtaagatagacggcgctcatttttttaccgtttacttagttaccttttcaccgacgattgtaaaattatactcagtcaatgatagcttcattaaaggccccccatactgttctttcatattgggccaaatcaaatgttgggagtataacaaaaaatattttttttaaaacggtaatggttaattaacaacactgattgatttggtctctcttataaaccagaaataaccgattctagaatcgaaaacccgaacactgagtgaggtagatattggccggaattagagttgtctaccggcggcatcagcgacaaatggaatgtatggagttttgccgagtaaggagctgacgactccatacacaaaacacataaagctgaagacgaaaacccccgtgtgcccccacatcatcgccttcattccaaacccgcctccttgacccggatccagtattcgggtcagcagcaccggaaccgccaggagcacatccagcgtcaccgcctgcatcgcgttgaacctcacgtacctactgaaactcgtgttcctcaccactcccaggtacagcccgaagaatgccacgaagctcgcgtacggcaccgatctgtacaggttcaggattgggaagattggctcgaacagcaatcccagccttgggtactgcgcgaacaggaaccgcccgtactgcagagaattgaagaacggcagcgcgtacgacgctatcgaaatcacgcgctcagtcgccggcgtcggggtgtaggaggcgcgggtcgtcaaggcggttgcgcgtctgctagaggggcggatcgagaaggttgaggatccggggaaggagaggctgagtggtctgcatctgggagccgacaggggattagttagggtttggtggagagaaaggcacagagacgccattcttttatttttttgtttgggattttcgctgtttagtcggcagtgtcgatttgttgacaagaagagcaaaaaaaagtaacagctcaaacgctgccgttttcgaatctaaaatttggcccgcgcacactaacaacataattgggccgacttagctatataaatgggcctatatatggtactagagggcttcgtgaacaacagaaggtttttgtggcgccgacaaatgggaagcggaaacgaagaaatgtgatggcattgattgaaggcgagtcgagtcgagtcagactcggtcagagcgagttgagagagcagttaagaaacagtagcaggtagaaatgacggatgtgtccccactttcggaccagaccactttactccccgagttagcaagtgaagtgagaaaactgtctgtgtgtcacatgttggccactcgcgcgctatccccgcccaaggaccttaccgtcattttggttggaaactagtaaaaattagtttatttattttttgtttgttgttttgtcaagtagtatatttcttggaaatatcttcccttttctgggatgcttttacttggcgacccaaggaccaagagagaaccaaaaataaatctcacaaaacaaattaatacaaactactactatatactattattatttaaaaaagaatatgagaaaaagaaattgaaagctaaaaaaagaaacagtagtgcagagggcagaccgtacggtattcctgaagagcgaaagaagagagagagagagagagagaccgaccaaagaagaagctcctctcaatcactgtcgaagcatctcttcttcttcttcttctttttttcttctctctcagagcttttctaatcggcttctccggtaaatctctgtcgatccaccgatgagcttttgacatttactctcttattagtttcttctagtttggtgagaggagtttttactagtatcttttttactgtacaccaaatccctaaatttaaggac

SEQ ID NO: 12385 - DNA, 3000 bp, Unknown; identical to SEQ ID NO: 12377
  misc_feature (1)..( 3000): cDNA_ID_2708787_gDNA_ID_2214546_Annot_ID_185423 3000 nt of promoter + ATG

SEQ ID NO: 12386 - DNA, 3000 bp, Unknown; identical to SEQ ID NO: 12374
  misc_feature (1)..( 3000): cDNA_ID_1834169_gDNA_ID_2214546_Annot_ID_185412 3000 nt of promoter + ATG

SEQ ID NO: 12387 - DNA, 3000 bp, Unknown; identical to SEQ ID NO: 12373
  misc_feature (1)..( 3000): cDNA_ID_2729568_gDNA_ID_2214546_Annot_ID_185410 3000 nt of promoter + ATG

SEQ ID NO: 12388 - DNA, 3000 bp, Unknown; identical to SEQ ID NO: 12372
  misc_feature (1)..( 3000): cDNA_ID_3024937_gDNA_ID_2214546_Annot_ID_185408 3000 nt of promoter + ATG

SEQ ID NO: 12389 - DNA, 3000 bp, Unknown; identical to SEQ ID NO: 12370
  misc_feature (1)..( 3000): cDNA_ID_3024947_gDNA_ID_2214546_Annot_ID_185404 3000 nt of promoter + ATG

SEQ ID NO: 12390 - DNA, 3000 bp, Unknown; identical to SEQ ID NO: 8344
  misc_feature (1)..( 3000): cDNA_ID_3024891_gDNA_ID_2214546_Annot_ID_185442 3000 nt of promoter + ATG

SEQ ID NO: 12391 - DNA, 3000 bp, Unknown
  misc_feature (1)..( 3000): cDNA_ID_3045094_gDNA_ID_2214546_Annot_ID_185440 3000 nt of promoter + ATG
tttaattcttttaatcaaagcatgatttaatgtaaaattatactactgtatgactacttttcttaaaaatataacctaggcaacttgttcatgtgggtctactcgttaggtgcttcattttgaatgatcatgtttaattgcgtaacgagataagtaaactggttaattgcttgtgtgacaaaagatacatatcaaatttaattaatcattaactttgattaaagaagtaggcggcatccccaaagtcaacaaataaaatcaaaggtttctggtttaatccacgcgttgccccatccatattccctttatttctaaacgaaagcgaccgccatttccgtattttgtctccctagcaccaaaattacatgaccatttatttacttacgtggttctttttttctttgcagcagaattatataaatatgcaacactggttagtctaacgctatagatatggatgatattttagatatctatatatacatttttgcagccattttgtaaaataaatcctagagttagaatttatttacagtggctgccactgacatttaataattgtttttgataattaaaaagaaaatctttgaattaaatatttgacaatcttcccaaaatctctccacattaattacacgattagttactaaaataaaacttcccaaaatatttaatcttatttaattactacaaaattatcatttttgatattgtttttctacatgactataataattcgattataatcatcaaaccgcagagatatttgatagcatttaattattacaaaattaaaaaatatttagacaatgattcataaacatatcataaataaaatcagtgagttttttttacaggacggattgacgggacgagtttgacaggacgttacttaataacaatcgtaaactataaaataaaaatattttatagataaatataatttgcaaacttttatatatagtaactttaaaaaataaattgtcttcgcggtataccgcgggttaaaatctagtaagacctaatagagtaccaaggctagaacaattaatacgagtatcgcgtatgaaaaagaatatacatgtattctgataactatataaagtagtagatgaaatgattttgattcatgaatctctatgttgagtgagaaaatgaatagcctgagacaacacaagtgtaatagctttcacgcttggacttgtgtctgaattttggaactgatgatgtttgctgctctttctagaagacctgttgaaaaaagcataaatacgctctgttttcaaatttggcaattgatatttgtttttgtacgtgtctatttaatttttggtaaagaacgcacgttgtttatacttacacaccgcccttctagaagaacaggctctcacgtcatttgcatacaacttccatcttctggaaccaatggatccctgttacaaaagttgctcttaaaacataaacaaaaacaaaagaaaagaaaacatttttatatttgtcgtcaataataatggccactttctgcttacatgtatatgaatgtatatattactataatacgtagctgctcgtgtttcttgtctaagttctctgttatagttaggagacaaataaagagaattagagaacagaagaccagaaaaataaagatgaacacaaccaacaacgtgtttgatgtgtcaccgttcttgcttttagaagcatctgcagattccgaagctggccacgacagcgttgacgatgataaatgcgttaaggattacgatcttggtcatgagtcttctagtgccagttcttgcgagacgtcttgcgtgagtcagagaacgagtttgttaggttttgacctgcaggacgatacggtgaatcatgaagaaagagacgccggagatgaagaagacgaagacggagaaggagaagtgaatagctacataagatgtgggagaagccaacgtgaaaatctggctgtggattctgctgcggtggtgagtgagatggatcaaaatcgaatgttctgggaagcttgtctcgcatcttgatctgtctttattaattaatgtcatctcatcatcaacagagaaaacaaaatagtatatatctagcttagcgtagtgttcttgtctgtgtttcccctttggcttttaatgcacaactaatcgatatgatatctacccattaaccttaattagtcccctttagcgtagtgtaaatttgttttgattcgtcaagagaaaaaaagtggtctaagggactgactagttggagaagaatccgtataaaatctgttaaaaggagaaacaatatactatactagtcttttctcgtagaggaggatgttatactaacattactaatttatgctcacccagtttaaataaaataaaatcaatacttttttggtttgtactaattaacatatatatatatatatattcccaaaattaaagattccatggctaacagacctaaagaagaagaagaacaaacacaataagagattggtgtagttttacttttactatattcatctttgtctttattgaccaataaagtaatttctcccctttatctatttgatagtggtatactttaagttgctttttaattgctggtgtacaattatattggactcaccaacaagaatctgtgtgcagtcagtgtgcttgttactattgttttatctcattaattgatgatcactttttcaccttcatacatgagagctgaattcatcactttgttagttatataagttgggctattctattattaacagtttgatttttgacagtaaatttgtctgccagaataacttatacacattaccacccaaaaaaaaaaaaaagaagaaccatttttggacattacgtggttttgggtttgtctagcgaccttttatgggccaatgatatgaggcccagtaaggaaacaaagaacggcccattataatgtaaacatatttagtacaaggaaaaggggtaaaaaaggaacaaggggaaagaa

SEQ ID NO: 12392 - DNA, 3000 bp, Unknown; identical to SEQ ID NO: 8345
  misc_feature (1)..( 3000): cDNA_ID_1376179_gDNA_ID_2214546_Annot_ID_185434 3000 nt of promoter + ATG

SEQ ID NO: 12393 - DNA, 3000 bp, Unknown; identical to SEQ ID NO: 12380
  misc_feature (1)..( 3000): cDNA_ID_2708783_gDNA_ID_2214546_Annot_ID_185432 3000 nt of promoter + ATG

SEQ ID NO: 12394 - DNA, 293 bp, Unknown; identical to SEQ ID NO: 12369
  misc_feature (1)..( 293): cDNA_ID_3024953_gDNA_ID_2214546_Annot_ID_185400 3000 nt of promoter + ATG

SEQ ID NO: 12395 - DNA, 3000 bp, Unknown
  misc_feature (1)..( 3000): cDNA_ID_2711892_gDNA_ID_2214546_Annot_ID_134597 3000 nt of promoter + ATG
acaaagatgaatatagtaaaagtaaaactacaccaatctcttattgtgtttgttcttcttcttctttaggtctgttagccatggaatctttaattttgggaatatatatatatatatatgttaattagtacaaaccaaaaaagtattgattttattttatttaaactgggtgagcataaattagtaatgttagtataacatcctcctctacgagaaaagactagtatagtatattgtttctccttttaacagattttatacggattcttctccaactagtcagtcccttagaccactttttttctcttgacgaatcaaaacaaatttacactacgctaaaggggactaattaaggttaatgggtagatatcatatcgattagttgtgcattaaaagccaaaggggaaacacagacaagaacactacgctaagctagatatatactattttgttttctctgttgatgatgagatgacattaattaataaagacagatcaagatgcgagacaagcttcccagaacattcgattttgatccatctcactcaccaccgcagcagaatccacagccagattttcacgttggcttctcccacatcttatgtagctattcacttctccttctccgtcttcgtcttcttcatctccggcgtctctttcttcatgattcaccgtatcgtcctgcaggtcaaaacctaacaaactcgttctctgactcacgcaagacgtctcgcaagaactggcactagaagactcatgaccaagatcgtaatccttaacgcatttatcatcgtcaacgctgtcgtggccagcttcggaatctgcagatgcttctaaaagcaagaacggtgacacatcaaacacgttgttggttgtgttcatctttatttttctggtcttctgttctctaattctctttatttgtctcctaactataacagagaacttagacaagaaacacgagcagctacgtattatagtaatatatacattcatatacatgtaagcagaaagtggccattattattgacgacaaatataaaaatgttttcttttcttttgtttttgtttatgttttaagagcaacttttgtaacagggatccattggttccagaagatggaagttgtatgcaaatgacgtgagagcctgttcttctagaagggcggtgtgtaagtataaacaacgtgcgttctttaccaaaaattaaatagacacgtacaaaaacaaatatcaattgccaaatttgaaaacagagcgtatttatgcttttttcaacaggtcttctagaaagagcagcaaacatcatcagttccaaaattcagacacaagtccaagcgtgaaagctattacacttgtgttgtctcaggctattcattttctcactcaacatagagattcatgaatcaaaatcatttcatctactactttatatagttatcagaatacatgtatattctttttcatacgcgatactcgtattaattgttctagccttggtactctattaggtcttactagattttaacccgcggtataccgcgaagacaatttattttttaaagttactatatataaaagtttgcaaattatatttatctataaaatatttttattttatagtttacgattgttattaagtaacgtcctgtcaaactcgtcccgtcaatccgtcctgtaaaaaaaactcactgattttatttatgatatgtttatgaatcattgtctaaatattttttaattttgtaataattaaatgctatcaaatatctctgcggtttgatgattataatcgaattattatagtcatgtagaaaaacaatatcaaaaatgataattttgtagtaattaaataagattaaatattttgggaagttttattttagtaactaatcgtgtaattaatgtggagagattttgggaagattgtcaaatatttaattcaaagattttctttttaattatcaaaaacaattattaaatgtcagtggcagccactgtaaataaattctaactctaggatttattttacaaaatggctgcaaaaatgtatatatagatatctaaaatatcatccatatctatagcgttagactaaccagtgttgcatatttatataattctgctgcaaagaaaaaaagaaccacgtaagtaaataaatggtcatgtaattttggtgctagggagacaaaatacggaaatggcggtcgctttcgtttagaaataaagggaatatggatggggcaacgcgtggattaaaccagaaacctttgattttatttgttgactttggggatgccgcctacttctttaatcaaagttaatgattaattaaatttgatatgtatcttttgtcacacaagcaattaaccagtttacttatctcgttacgcaattaaacatgatcattcaaaatgaagcacctaacgagtagacccacatgaacaagttgcctaggttatatttttaagaaaagtagtcatacagtagtataattttacattaaatcatgctttgattaaaagaattaaataacgggatataatcatttatccaaagaaacacaaagagagagagatataagtaatcattaaggtttttggaacgagaacgatcataagtgcagatacaaaaaggattacttatcagttatcatacctaatttgtttatacgtgaaaaagatttctaaaatgtatattcaaccttgtctaaaaatatttgaaagtaatagagatattggtgtacctcatctggtggccccaatggttgtgaaatgggcagctccatagaataaaaacaaaataggcccattaatgttaaaagggggcccattaggacccagtggtaattatgaaaatatggggaagaagcagggtcaagtgaagatggaggcgccaaagaagcgagagtggataagaaaatcaaaaaaaggattctctttttctctctttcttctcacttctctctgtagttagtgtgtctctctcgccggccgatatg

SEQ ID NO: 12396 - DNA, 3000 bp, Unknown; identical to SEQ ID NO: 12391
  misc_feature (1)..( 3000): cDNA_ID_2685819_gDNA_ID_2214546_Annot_ID_134599 3000 nt of promoter + ATG

SEQ ID NO: 12397 - DNA, 3000 bp, Unknown
  misc_feature (1)..( 3000): cDNA_ID_2708822_gDNA_ID_2214546_Annot_ID_134601 3000 nt of promoter + ATG
tttgtttcttagtagaaaataatttggctcctttgtagaagaagaaaaaaactaaacggctttaacatatggactacgccgtttgtatcttgttgttacaaaccattaaacgttactgtttgatcaatatgttaattcagaactgtttggtttaaagcataagtattgaagtcgtcaaatgaacaacttgcaatcttttgctttgtatgagatacaaataaaatcgtggtccgtttataaaatagctttctccaaacaatttcaattcccttttaactaacacaacaaacgacccggcccgtcaaaagaagaccaacagacgatgaaataaaaggaaaaactcaattttctaaactatttttgggggtcgtaaataagtgaaaagcctgccgacgaaaaaagaagaagtgaaaaaagaagtgaaaagcccttgtcttatttgtcttttactatttttctgatttaaaataaagaaacaaacatttacagtatttgtttataacgggggctaagtagagaatcatgagaagattaaaatccctaaaagttttgggggaaagaagaaagaaggaagacgatgatgatgctcagaatccgaagcagagatggactggagagagtcacagcggagggagctcatatcactgtttcccagctcaaaaccttgatcgcggatcagcttcagatccctctccataagcagaccttatccaccaatcgtgatctcctcctcgccaaaactcccgctgatctactcgccttcaccgacctcacggacccaaacctccccctctcctctctcaacctcggccatggctctatgctctacctcgcctacgatggcgagcgctccattcctggagctcctcccgttactcctgccggatccttcgggaggaagatgaccgtcgatgacttgatcgcccgccagatgcgcgtcactcgtcaggagacgtctcactgcgactccgtctccttcgatcgcgatgccgccaacgctttccagcactacgtcaatgagtctctagcttttgccgtcaagcgcggcggctttatgtacggcaccgtcaccgaggaaggacaggtggaagttgatttcatttacgagccgccccagcaaggcacggaggctaatcttattctgatgagagatgctgatgaagagaagcgcgtggacgcaatcgccatgggcttggggatgaggagggtcggtttcatttttaaccagaccgtggtgcaggacaagactgaatacactctgtccaacgccgaggtgctacaggcggcggagcttcacgccgagagcgagctgaaggagtgggtcacggcggtggtgaagcttgaggtgaatgaggatggtggcgccgatgtccatttcgaggcgtttcaaatgagtgatatgtgcatcaggctgttcaaggaagagtggttcgagacggagattatgccggacgatgatccaaagctctctaagatgaagaaggaggtggttgttggtgtgaaggatcttaaggaggtagataacgatttcttcctcgttctcgtcaggatcttggatcaccaggttcgtgtttttctctctacccttcctttgcatcaatcatcattgttctttgtactaatgctctgcttgggcaaataaagtaattgaatctggagcttttaagtcttaggttaatgaagcttgtcagtgtttgctttccatgagataattgaaaattagcatttcgtcaatggtccctgtgttttaacattaggctgctgtgatcaggggcctctgtcatcaacattcccaatagagaaccggagcagtcgagcaacgatgcgggctctaaaaacacatctggaccgggcaaagagcttgccgttggtgaagaagatgtcagattttcatctgcttctctttgtggctcagtttctggacgtgtcatcggacgtccctgctttagccgagtgtgtgcgtctgcagtcgcctgtcccagagggctatgcgttgctcatcgaatcaatggccaacacttgttaatttttgtgtcattgttttttggttcttgatacagtatatcatgttcgttttatggtccagaaaatcttttttactagttgacaaatgaaaaatctctagtgtactcgtgatgtatttgattcaagtttgggggttaatttaagttatcaacaacttgtagaaacaaagttaattcacagagtaataaatcattctaataggtatgctcaggggcaaattggcaaaacataaaaataaaaagagagctactaaagttttcgagcgaaagcgaaaatgaaaattttataattcgagcgaaatgttaaaaagctgaaaattgggggaagaagagagaagagtttcatcgtcactggaatcaatagagtcaattggcgggagaggttagtctcgaaaagaagtggaagccctagggggaaactttctcgctcactcgctcgtctgcaaacaccatggaagacagtcctcaaggccttgtgagtctctctttgcttgtttgattttgtttgggaattttggattactcttaagtttttctgctgggcgtgtagaaaaggagtagagatccggatcaggatcaggatgacgacagcggcgaggctggcaaggccgacggaagcggcggagagaatcaggagcgcagcagcgaccagattgagctcgatgacgacgatttccaggaaacccgtcccaagcccaagcgtagtcgcacccatcctcctcaacagaatctcattggtacaattcatattcctaaatcgctccaagctttgtgccaattgattgtttcctaaattgattgattgtttttcttagagagcttcatcttgtttgtttgggtagatctttcagctttcatattttttttgctaacagaggttgtcaaaggcaacggggatcttatttctaaagccgtcaagatttgggttgaaagatatgaagactctcccagccttgctaccactgagctcttgtca

SEQ ID NO: 12398 - DNA, 3000 bp, Unknown
  misc_feature (1)..( 3000): cDNA_ID_2711934_gDNA_ID_2214547_Annot_ID_134604 3000 nt of promoter + ATG
caccgtattggtgggggctgaccgttggtggtatgatgggaaccggtgctcacgggagctcattgtggggtaaaggaagtgcagtccatgattatgtgaccgagatcaggatggttagtcctggttcggtcaacgaagggtttgcaaagattagaattttaagcgagactacgactcctaacgagtttaacgcggctaaggtttctcttggcgtccttggcgttatctctcaggttagaaaacttaaaatttcagtttcagtttttactacaaagctatatcatatttctaggccattttctttagatgtttacattttgtttttgtttttttaaaggtaacttttgaattgcaaccgatgttcaagagatcgctgacatatactatgagaaacgattcggattttgaagatcaagccgttacttttggaaagaaacacgagtttgcggatttcatatggttaccaagccaaggaaaagtggtgtatcgaagagatgaccgagtagcggtcaacacatcgggcaatggtttgttcgatttcttgccattccgttcacaactctctgcggcaatagccatcatacgaacatcaggtacttctcgtctatcctttttctaagggtttgcgttgacttttaaaaactgaacgtaaaggtacaatcttgttcgtataaaaacaaagaaaaaagggtacaattttgtccataaagtttatctttaaatcaaagaaaaacattatccgatccagactcccattttgtatgaaattttttactcagtaggtttcattttcatttaagtcctattaaattttttaggtattaaatttaaaccattagttaaccaaaaacacaagataaattttcagtggccttattagaagtagttggtccataacccttaatagaaccattagttaaccaataacaaaataatcaggttatttttgaatttgtatataaaattataactcttggatccaactaggcaactaccgatatttaaataagagattatcaggaaaacaaaatgttgatatacagaattctacacgtaactttaatttgttttcgtttataataataatcaagaggagacgcaagagaggttcagagatgcgaatgggaagtgtgtgggagccacaataatttcatctacactgtttgctccctcatacggtttgaccaacaatggtaattatttcttttcattttacttacacgttttcattgattttacgtacagagaatattcttgcttacctacctttatgtttcaataggcattatattcactggttatcctgtcgttggaagccaaaaccgtatgatgtcgtcaggatcgtgtctagacagccttcaagatggattgatcacggcgtgtgcatgggactcacgtataaaaggcgaattttttcatcaaacaactttgagtgtccctctcacccaagttaaaagttttatcagcgacatcaaatcacttgtaaagatcgaacaaaaatctctgtgtggccttgagcttcactatggtattctaatgcgctatgtcacatcatctcccgcttatctagggaaagaaaccgaagccctagactttgacataacatattaccgagctaaagacccgttaacaccgcgactctacgaagatttcatcgaagaaatcgagcaaattgcattgttcaaatataacgcattgccacattggggtaagaacagaaacttggcgtttgatggagtgattagaaagtacaacaacgcacccgcattcttgaaagtaaaagatagttatgatccaaaaggtttattctcgagcgaatggacagatcagatcctaggaattaaaggaaacgcgtcaatagtaaaagatgggtgtgcattggagggtttgtgtatatgttcgaaggatgctcattgtgctccggcgaaaggctatttgtgtcgaccgggaaaagtgtacaaagaggctagggtttgtacacgtgttgatgggataataagtgttatttaaacagtaagttcttaattttcattgcttcttatatcagtaacagccatcgtctatatgcgtgggtcaatatttattgtgagcctaataatgttattgtgttgcaacaataatgttttattgattcgtgctatagtgttagtacgtaaatcatttcaatcggccgtgcggaggaggatcttttatttatttatattccacagatctattcttgttccttttactatgaaaattggaagagtagttatagtagatatctgttctggttctggctagctataggttttcctagtaaatgtgggggattttatcattttgtgcatacacagtttcttaagatgatacaattataatttttattttttatatcatatcgcatgaccacaccccaattattgttataattattaccgaatgaaaaacaaaaaccatcctccccaaaatgcgcaacgtctcgtgccttcccttgacgcccgtatagaatgggccatatatatagtcaaataagtattcccactaaactatgcaagtcgtcgtacgtctatccttttttattgaacatatatacacaatttgcaaaatattaaatatcgaaacattttttaatgataatattaaatcatggcagcgccgatgaggttatcactgacatacaaggatacggtttccataatatatgaaaccaagttaaaagaaaatatagaaaatctacatttacttgattttgcaagtctttaagaccatgtgatataaatgaaactaacattgacagctcaaaagtaatggatcgaatgttattagtcgttatatatcttacacgctagcatgatgcatctcatccagccttttatgaatttatcaaccaaacatattttatgtaaaatatcaacaagctagcatgatgcatcactgaaccggcctttaagccacaaccactatatataccaaacatttagaaacgcctccattagacaaaactcaataaaaaccatg

SEQ ID NO: 12399 - DNA, 3000 bp, Unknown
  misc_feature (1)..( 3000): cDNA_ID_2711930_gDNA_ID_2214547_Annot_ID_134605 3000 nt of promoter + ATG
atttgcatcattttacatcgatcgaatattaagtcactcctacctttattatggtttaaacattcaccggctttaggcatgatatttaccggttatccggttattggaagccagaaccgtatgatgtcgtcaggatcatgcctagacagtcttcatgatggattaatcacagcgtgtccatgggactcacgtataaaaagtgaattcttccaccaaacaactttcagtattccgctcacgcaagtcaaaagtttcatcaacgacatcaaatctcttgtcaagatagagtcgaaatctttgtgcgtgcttgagctatacgatggtattctaatgcgttatgtcacatcttctccggcgtatctcgggaaagaaacagaggctttggactttgacctcacgtattaccgagccaaagatccgttatcaccgcgactatacgaagattttatcgaagaaatcgagcaaattgcgttgttcaagtataacgccttgccgcattggggtaagaacaggaacttagcgtttgatggagtgattaaaaagtacaagaatgtgccggcattcttgaaagtaaaagaaagctatgatccaatgggtttattctcaagcgaatggactgatcagatcttaggaatcaaaggaaatgtgacgataataaaagatggatgcgcattagagggtttgtgcgtatgttcggaggatgctcattgtgctccgaccaaaggatatttttgtcgaccaggaaaagtctacaaagaagctagggtatgtacacgtgctgatgacataagtgtgattcaatcactaagttactaatcttcattgcttcttttttattttttcattactaatttttcattgcttgttttagatataagatacttatcttctttatatgtggtcgatatttatcatgacgagttattgttaatgttgtggtagcaataaaaatgtaagaggcagaaaaaaaaaaaaaaaaaaatcgtgaggcacgatgcctaataatttcgatgtcttggttagtttctacttttgactaatgaaaaggaattagaaagaaaaaaaatcaaagtcaaagtacattttaaggtgtcgtatcttgaaacttgttccactgaggagtgagggttatgggtttattatttattttaccaaatgcgcatgttcataaatcattaattaggtcattttctgccttgcgctacaaataagaccctttgttttttttttttttttttttaaataagaccctttgttgcgaaaacaataatgatgttaataattgaggacaaataaactacgtactttttttttagcaaacgacaaataaactacttaagagatataaaaccaaaaaaaaaaaaaaaaaaacttgtgagatatacatataccttaaataacaagataaaattttaggattgagtatcgtggacttcaaaatttgaaccgaatacgaaataaaattcgcaaagttcaagatactgacatgtgtgtgcaaggaagaatagtttaaaaccctttaacaaaaaaaaaaaaggaagactagtttttttcttcaatatctgatatttattttcttacaaacactatttctattaaaactttatttttgtattagaaattaaataggattttaaattcattagattatgtttcagattagtgctaccattatatgtatttgaagattacatatcattacacaatgcagtaatatatattctgtaggatttatcaaaaaatttggagaaaagtttgaactatgactagtactgactttcatttattaagattactcccatggactttcatttactaagattactcccatggactttcattgaatcatttactttgtgtgtgaaggcaacggcttgtgaaaggcgtgcgtaccttggcgatcttatcttctttcaaataaaattgattattcactgtatattggacaaaaccacaactaatgtttttttattataataaaactcaactagtgggtgtagtatataggccatgaatgtctataattttaaaatagttttctggcttttggtttttattttttagttttagattattttttttcttaaaaatttgaatggtagtttgttgggtgtcctactttatttagtttttgatttttatgttaatggattatattttcgttagaaaaaaagaaataaaaaatatgattgatgatttttgaggaaaaatcccaagtcctaaaaattacagattttagtttttctttgaaaaatagttaaacactgaaaaactagttttttatttcttagattaataaattgttttcaatttaaatcttgaatgactataaaataaattttggaaaaaaaactaaaactaaaaattagttcaaaaactacgtacaaacattcaaggccatatatagcttaatatatgaattcaagacattacagacttgagttattaatataatgctactacagtagttgaaattatcgtgtacatgtattagctcactaaaatatctaagtcatcgttggttttttcaattttcataaaatcaccgggtgaataatttgactaaacaagaatattttttttttgattaaagactaatgagattgccatagactatgatacttgataagaatatggtcaagtcttttaagacaacgtaatagaaatgaaattaagaagacagtccataaaaatgaatggaatattataaaataatcgaatatgattaattagtggttaatactctcttacgtacaagattgcatgaaccatctcatctcaacctcttttgatttaactaaacataatattttatttaaatactattgaacccgccttaacgccacacaatatctatatataccaaatatatttacaaagccgacattcacaaatcacaacaaattaagattcaacaaaactgaatcaaaccccatggcatttacttttcctccttcgtatcgcacgctagtcgggttatattatatatttacacttatg

SEQ ID NO: 12400 - DNA, 3000 bp, Unknown
  misc_feature (1)..( 3000): cDNA_ID_2711926_gDNA_ID_2214547_Annot_ID_134606 3000 nt of promoter + ATG
atgcatgtattatgtatatgcaaacacactagcatacttcagactataacacaccatctctttccgatcgtgactacacaaaagctaaaaccgcttcacaagggagataaagtccgacgagaacggatttgccgacaaaaattaacctaagtccatcatcgttttccctcactttattacttatttatcttacactaacgagtttcgaggatgattctctcaaggcatattaggatttttttttgatgctcctttaattcactgtcctttgatgtctatatcgctcaaccattttgctctttttacctttattaaatttctcaccattaatcatacacatatcttatctctaacaaacccacaaggattatggagaaaaaaaaactaaaatcataattagaaagagatagccaactcaatcacctataataacctcggaatgagttgctttcgcaatcaaaccatacaccttaataaccatgggagggttataaaccaaatcaagctaattaatttttgaaccatcaaccatgcagcgttgtcataaacaaatttaatggttattgagaaaatgcaccgaatgcgaatttattgccgacatcgatctacaattctacatgaagatgattattggactaacaattttcaacaacgagggtatatatatgaacaaaagatggtcgagataatatttatgtaagactctttataagaatataataaccaagaagatgattcagggtaggtgcgatgggatagtgcaagctcgtcccaacgaggtctaacatccatgtcggaaaaaatgtatatacaacagtctgattttacaaaaaaaaaaaaaaaacagtctgcttttgtgtttcaaatgtgaaaagttttttttttttcaataaatttgaaagaaattaatcaataaaaaggtgattggaatcttctgtttaatttttctcttttttgtatttaatttcccatcattttgatgtgattacaattgggtcagaatctattatgcttgaagcttcgcctttatggaaattgattcgaattatagttaacatgaatcatgtgtattcgtttacacatgacattgaatttctggggttatgacataagaaggttcgagtggtaataaacgtatatggttattttcattttcttaatgcattactcatatatatatatatatattaaaaatctagtcagtattcatatatatatatatatatatatatattaaaaatctagtcagtattcattatatataatgttttgtgataaaagtatatgttttaactgattttcaagtagaagctccactaataagtacttgagagatgaccgtttgttgaaagcttttgcatggtttttataataaaattatatatttgataaaaacatatttgtttaactgttatcacttaaacaatgaaaagtgtttgtataattacatttgatttctaatatagttgggttttagactggttgaaagttcattccttttgcattgcaacgggttatactactcccaagtaaaatgctgggcctgggctgaatgaccgaatgctatcttatatgtactacaattattattttttctaaaaatttaaaactagaatatcatttatcaaaaaagtaaaaaaatatgaaaacctatacaaagccaaaaccaaaaaaagaaacacacacacacacctacacgtttctttatattcgttcgtacatttgactagtcggaaaactacacgttcagtatgctgacttttctaataaattaaatcaagtggacggtaatattcaatacgtgcgtgtctcactgttttttttttttttttttttggctccactagtttgattaatacgtacgtacctaaagttaggcagactgagttgtttggtaaatcaactaataatatcttaacatacaataaacctaatatatttataacttgtagtatcatatttttgtgaagattctacggtagaggtttggaccgtgtggtgcaattcttcctagttactttgtgtgaaaaggaaaactacgaatagtgatggtaactgcacaaaacattaagcagcctgcataaagtatatttatttgtcgtaacgattacaattgtaattttgtaacagaaagaaacattataattggcgcaaaatttattaaaccaaaaaaaaaaaaaaaatggtgcaaaactttaaaaaagtaaagtatttctaatttgatgatatataagatatagtactctccagatctctccatttattgtcaattaagtaaaattttaagttgaaaacttatcttccgtaaataaacaaatgtgattggtacgaattaataaagcaagccaaaaaaatacatgcacaacttttaattgttaccaagtgacagtacgtacagtagttatgtggtcaactggtcattgctatgttgatgggggacatattacttttgatttctgctgaacacatttctgtggttattagaatgtttacatagcaatcatatataatctgtggacttaaaacttttatcaaatttatttatttatttaaattcatcggcttagttttggtttgattgaggtctctcatataccacaatcatatatatatatatatatatatattcaataatatagtattggatatatcataaaattaattaaagagattggctcaatacaaagttctctgaacattctttgtttgcataagtataaaaagatgtgataagttttggtatatagatttttattttttttagacaaaaatatttctcgttgaaatactaatgagagaagatgatcattaatcttatcttacaagcatctcatatctcagttcttttcctatcaaccagatataattaactaagtaacactaaaccgtccttttacgccacacaacctctacatacaccaaacgtatatatctatctactacacacacaaaaaaacaccaaatgcaatatacgtttgaaaagaggcccccccattaatg

SEQ ID NO: 12401 - DNA, 3000 bp, Unknown
  misc_feature (1)..( 3000): cDNA_ID_1808795_gDNA_ID_2214547_Annot_ID_134607 3000 nt of promoter + ATG
aattgacataggcatcaatgaaacctacaatacttcacgtgctcatggaaaaaacaccaacaatatataagtaatgccctcagaacttacttaaagatacgcatatattagaaatttaaataattctaccaacaaaaatttttgtaaagaactatttgtttgtagagttggatcagcatccagatttaaacccttatttttgtttttgccaagcatccagacttaatcctatattagatactgtatatgcatcttgatggaatatagactatatagaaagaccaaaaatggaagagtacgaataaaaatgcataatataccttggaaattattcttggttattgtgaaacttaaaacatttcaacgaagtcatatactattatttaatcattgatttaaaattgctaatcaaatcacgtgttgttgttatatatggataaagagttaaactataacacaactgagaaaaaaataaagttatcaattttgttaagaatcaatgaaggtttcacaagactgggaagaaaaaaaaatagatatatggagtacataaaacattaaaattttgctaaattttacttttgaactctattgattcgggttgacatgatgataatgttacattcgtacaatttcacaatgaaaaaaacgagtactaaatattgtcaatcaaacatatgaatgtacaaaaatccataaactctaccaaaatagaatgaagattctgaaatcaaacctactttttctttttaattataaattcaactatattataaatttatttatcacaaataatagaggagtgagaatattttagacaacgcaaatttcttttatttagttcttatactttattttttaccaaacgttaattaaaaaaatcacacatacataatttctaaaaaaaatgtattcttcaagtaatatatctttctgagtactagtttatctatttatctccgtatttaataatcaaaagttacgtttaaaatagaaacaacttttatcaaacaaaatatattagaaaacgcatggtactggctactggaaagaatcatgacctgtaaatttctacagttttcccgttttatatagtacttagaaactttggattttcatagcgcaaccaataaacacatggacttaagacacaaaaaaagttgggtgcaatgtcattaatcaaactaaaaaaataatgattaaaagcatggaattccgaaaacgcaacaaaatgattctgtgtttagacaaatgcagaaaggcctcttaactaatcttaaataaagtcttagttccaaccacataaacactccttagctccattaattttggttttcttaattacgtttctacacaagtacacgtacttacacatacaattccacagtctaaatgataaaactatgtggtttttgacgtcatcgttacctttctgtcgtctcacctttatatagtgtctctaacagaacgtaacaaccaaatgtttaaaaaaataaaaacagcaccccttaattaggctcattcgttttgcactaaccatactacaaatcatctcgaacgatcgagcaaagatttgaaaaataaataaacgtataactctagagattttcattagctaagaaaagtgaaatcgattgttaatcctatttcagacgggacaggaacactcattacccaactctatcatctctcgaacaccaaactatatctaccgtttggggcattatttcccactttctttcgaagacaatttcccatatataacatatacacattattactaatatatttttataaattttcgtcacatcccaaaaaaaaacactctttgtcacatcaactagtttttttgtaacgatcaaaccttttcgtttaaaaaaaaaaaacttttgtagtgtaaacgtttatttatcgatgaaaaaagccacatcttccggagggaaactttttaagacaccctatttcgactttattttgtaaatacagtgtgcatgtgcatataaagagagatatcatttgtataaatatcaagaattagaagagaaaaagagagaagaagacaatctattactattacgatgtgtgggttgttaatttgtttaaagggagcttttctatagagatttttaaggtcaagggtcatcgttcgatgtgggcttgcttcctacaatctagttgccttacggggcctactctttttcttttgataactacatcaccttttttttctccgacaactatatatcactttttttatgttttcctttttttcttcacaataattctttactcgttgcaaatgtaaagatacacaaagttacttattttgtttacgatggttcttagtagtttaaagaattaatgaataagataaacctaaactttgaaaagactaaaaaaaatgtataacaacatacattatacgtatttgaaatagtccaagtgatattatgtcattgatattagcacaaataattacgatgcctgatattgtcacatttgatgattttaagttcttgtaaaagataagtgtaactaaatcactatagtgaggcccacgttttaatttctaaactaattacaatgacaataaaatagcaaaactatttaaaactagacgccaaaaaaaattgaaactaataattgtgaaaaaagaacaagagaataataatcattaataattgacaagtgaaattaatatattgctcttggagggttatattttaattttcaaactaaataatgaatacaaatggaaaagctaatgataagagttgaattttaataattaagaaaaacaaaaaaaggtgtacaaggagacacatgcgttttcctcatgcatcttgtttttatacaacaatatatatatatatattgagtcattctctgctagctctctcatctccaactttcagtatgatatatagttacaattaaataaacctcacatgctctattcttgcttgatttttgagttaatcttgaatctctttgatgatg

SEQ ID NO: 12402 - DNA, 3000 bp, Unknown
  misc_feature (1)..( 3000): cDNA_ID_2708847_gDNA_ID_2214547_Annot_ID_185470 3000 nt of promoter + ATG
catcattgttttagagagggagaaagaaaaagagctcagctttctgatggagaggagtattcaaggacaaaacaagctctgtgtaatgtatcttatctcaatttggaacgttactagtttttatctttcttgtaatcttttctttcaactattgattcaaagatgtggacttgcatttactccttccaaaagagtccacaatggttgcattcaatgctatatgtgtttgttataccaaaaacaccaacaaatctgctctcaactgtttccctctctttgaaacattccatttttcattctaattttgtttcgctagactgacccactaaccaaaacccacactagtctacccaaatttaatatctctcttctcaatctcactttctcttcttactcacttggtaggtaactccttcccctgttttttcttttgttgcagtgtttggaccaaaaagtgaatgtgagaagaagcctacaagttcaagaaactgtagaggatcatcaaagctttgcccttgaagaggaagaacaacaactctcaactccgagcttgctgcaagacacaacaataccatttctacaaatgctgcaacaaagtgaagacccttcaccgtttttgtcattcaaagacccaagctttctagcactactatctctccagacacttgaaaagccttgggaactcgaaaactacctcccacatgaagttccagagtttcattcaccgatccattctgaaaccaaccactactatcataatccatctttggaaggagtcaatgaagccatctcaaaccaagaacttccattcaacccactagagaatgcgcgttcaagacgcaagcggaaaaacaacaacttggcatcattgatgacaagagaaaagcgaaagagaagaagaactaaaccaacaaagaacatagaagagatagagagtcaaagaatgacacacattgcggttgaacgaaaccgcagacgccaaatgaacgttcatctgaactcactccgctccatcattccatcttcatacatccagagggtataataaacaaaacccacaaatcaaagttccaacctttatcaaatgtcgaattttcttaactaatatctctcgtagggagaccaagcgtcaatagtaggaggagcaatagacttcgtaaagatcctagagcaacagttgcaatcccttgaagcacaaaagagaagtcaacagagtgatgataacaaagagcaaattccagaagataacagtctcaggaacatttcgtcgaacaagttgcgtgcgagtaataaagaagaacaaagtagcaaactcaaaatcgaagccacagtgatagagagtcacgtcaacctaaaaattcaatgtacgaggaaacaaggacaacttctcagatcaatcatattgctggagaaacttcgattcactgttcttcatctcaacatcacatctccgaccaatacatctgtctcttattccttcaacctcaaggtacttacttatataacaaaaaacccattattcaaaatcatcgacaatggtgaaaaaattcaatcttttttgtttgttgctcagatggaagatgaatgtaatttgggatcagcggatgagataacggcggcgattcgtcagattttcgacagctgattgactaatccaagtaaaaagtaaaataaaaaaagaaacgtttactttggtaacttcgttttcatgattaaattctttatttggtcgtatgtgattggagtcttctcggcatggaacttgactttggttttagggtactagtctctacagaagctgtggtccttctttggatagatttataatgaaagtttgacccctctctctttttttattgtctttttgttttgcttttgcctctctctcggggttttgacttttgtatcataaaactagaatataaaagtttacaaattatatttatctataaaatatttttattttatactttacgattgttattaagtaacgtcctcttaaattcgtcccgccaatctgtcccgtaaaaaaaactcactgattttatttatgatatgtttatgaatcattgtctaaatattttttaattttgtagtaattaaatgctatctaatatctctgcgatttgatgattataatcgaattattatagtcatgtagaaaaacaatatcaaaaatgataattttgtagtaattaaatgatattaaatatttcagaagttttattttagtaactaatcgtgtagttaatgtggagagattttgggaagattatcaaatatttaattcaaagattttctttctaattatcaaaaacaattattaaatgccagtggcagccactgtaaataaatctcaactctaggatttatttcacaaagtggctgcaaaaatgtatatataaatatctaatctttacttagatggcatgggtttgaaaagttctgagtaactgataggcccaatgactaaaagcccatatgtgtttctcatcataatggaaggcctacaagtagaagaattcgctcgtgtttatgaattatgatcttgattgtaatcttattatcaaaaaccaaccgtaaaagtatatgaattgcgtatttgtaaattgtaattattatatagtattgagattgtgattaaaagtaataatgaatttgttgaattattattatagactatagtatagtagcaagagtgaaattttgttttcaagaattgagtcctaattttataaaaggagccaaaaaacccaattctatctaatccaatgaaaactccaagatcgtctctacgtccgccacgtcagcactatcctgatcgggaaacccaaaacgagtggtcgaatagtttccgactggtaacagagaaagcatctccacaatccccaaaattctttcaacacttgctctccattaatcttttagataataaacctaattgtttctgttttgtttttgtttctgtgagattcttccgaggcttgaagctcaatagct

SEQ ID NO: 12403 - DNA, 3000 bp, Unknown
  misc_feature (1)..( 3000): cDNA_ID_3024970_gDNA_ID_2214547_Annot_ID_185468 3000 nt of promoter + ATG
cacaacgagcagcaaccaggagaatatcggatcatcaagcgtaagcttccgtaaccaagttcttcagtccacagtaacgaatcagaagcaagattcacccataccggtagaatcaaatcgcgagaaagcagctagcaaggaagtagaagctggttctcaaagcaccaatgaggggattgctggacaaagcagtagcacagagaaaccaaaggaagaagaaagtgcgaaacaacgttggagtagaagccagagagaagctgcattgatgaagttccggttgaagaggaaagatcgatgctttgacaaaaaggtaagagacacacaagcttcatcataaaaacagcatctgaaacaaatacaagatcaaactgattcaatggagatgtataaaaatggattacaggttcggtaccagagcaggaagaagctagcagaacaacgtcctcgagtgaaaggccagttcgtgcgaaccgtgaattcagacgcgtctacaaaatcatgaagagctctttcagtttttcctctgatttcttttgttgattttataacagaaacttatttagcttttgcaatctttagtgtgctttttttttttatgtatttgattggcttcttcttctcagctaatatgagatactggggcaacttttgtatatatgtctgcaaatgatcaggctaagctaaaacagtaattccaatttcgttaagttgagaaatatttcttgttgtgatcatatccaggccgcttctctctcgatacataccaacaagaaacagattctataaaacttgatttatataccattgctatagtctatgtattaaaactcatcacattaattctctcacagtcagagaaacaaaaaaaggaaacaaaagctatcgaaagaaaaatcaacaaagaaatctttttttgtgaccgttaaactaagattttgtgaccgttaattgtgattatcagtttccttttctttgcttataaataaataattagtgagagtctcaacgcttcttctaaaacattcgacaaatcaaaactctctatctctcgcttcttcttattcttcaaccctagttctcttctcaagacaattttgtcttcaaagaggagactacaaagaggaggatatagccaagagaggggagagctttatggtggtggatgatgtcacgagagggctaccaaagaccgacgggctcaaatctgactttggaatgggctttgctctatgggccctttttgctactaaatccaacaaggtattacttttttcattctttttttttttgttttatttaccttcaaaattatttttaagtaaaactaattagtttcaccataacatttatataactaaaatgtttatatattttcattagtttaagtgtaaaatgtttttacacctatattttattataactttagattttttttatatagataagtgttaaatttttaaattttgtgtaaactaattggatacatcatccaaacccctaggaggtgtgccaggttcaatatatggtttacacattatttaactttttaacacttgttttgcttttattaaaaatgtttttaaacttacatattttcatattactattaaatctttaaggtatttttatttggataagtgttaaatttttaaattttgtgtaatctaattggatacatcatccaaacccctaagaggtgttctaggtttaatatatagtttacacattattcaactttttaacacttgttttgctttcgttaaaaatatttttaaacttatatattttcatattactattaaatctttaggtttttttttatttggataagtgttaaatttttaatttttgtgtaaactaattggatacatcatccaaacccctaaaaactgttctagattcaatatatggtttacacattatttaactttttaacacttgttttgcttttattaaaaatgcttttaaacttatatttttatactactattagatctttaaggttttaaggtttcatttataggtttaatatatggtttacatattatttaagtttttaacacttgtttttcatttattaaaaaatgtttttagacttatatttttacattactattaaacctttaatgtttttttgggataattttttttttttaattttgtgtaatctaattgaatacaagattcaaacatgtaggtggtgttttaggtttaatatggtttacaaattatttaggtattgaacacttgtttaaaaaaataaaattaaatcttagtttaagtggtaaattttaaacacgttgaaaactaattgcgcctaagcatctcgtacttagttggtccgtaagttttggtgttcgaagtttggaaagttttcacgtaatttaacacttaaactttaaaaaatcagttcatttaaaactttttgaaaattagtttaaatggtaaattttaatcacgttgaaactaaccgcacatagatatctcatatttagttgatccgtaagctttggtgtttgtaatacttataattagtttttgaaaaatgttgattgtttttactaaatttaagaaattaattcactaaaactttttaagaactagtttaagtgataaagtttaaatatgtcaaaactaaccgtacataaacatcatatccttagttaatctataaagtttggtattcgaagttttcacataactaaattttaaattatgttttggaatttttcttcttagtcaattcaataaaccctcaaaagtgaaaacccaatcattttgctaaaccgcttctgcgaaccaatatatgaaaccgattaaaaaagccactagattgattggtttaaattaaaaatttcaccggtttgacaagatacccaatcattatacacaggtaaaaaaaaagcaaaaaaaaaaaagacagcaaaaattacggaccataaaaaacggccacgtgttcatcatgttcaccgtcaacgaaagagattccgattaagagag

SEQ ID NO: 12404 - DNA, 3000 bp, Unknown
  misc_feature (1)..( 3000): cDNA_ID_3024977_gDNA_ID_2214547_Annot_ID_185466 3000 nt of promoter + ATG
gacttcttacattatgcaaaccatatatgtgttcaaatattgatatttgaaaggatagagtatgatgtatatgacgcatttcgttttatttacatgatcacccaatcgatggttacataattaagatttgtcccttcgtaatgattgtgtccctataagctggcaatatatatatagcaatcttttgtataactaggtgtcctaaactagagcatagcggtctgctaatttcggctaaggcctgaatcgttaatgatggaatcagaatgtacatctcatggaagtcgatatcgttcaacttatagagataggcacatgttaggtatctgaatgctttagtatcaaaattagaagctctcttccattgactaatttcgtaaaacatatatacgaagctatcagaatcaatgtttcattgtacggattactatgttatgtattaacagtcagttactatatttaagcagatcataagaaatgaataaattttccaaatatatatatttaatcagctaaactggttaaaaagaaactgattcaatacataatagatttgaagtcagttcaaattacgttaacggaagagtgtgctttatgttgctggtctactatatgtatacattccaaagaaatgaaatttcgcacagttcaaaactttatgaatcaagccataaaatgtgacactccgtaaactccattatattacatatgagatagtgtgaattctgtatacatagatttactgggctttagaaatggattttaagcccacaaatagtcttgcttcatttcaagaggtggccagtagtaaaaaataataatattaattttcctttttgataaaaatgatttactcttttcaattaaagtcccatctgccaacgaagattccaccacgtggcaaaggaaacgttgacggtcaaaataacgggaatccgtatcattcgctgtcacgttcatacgccacgaccaatcaacagcgtttataacggattttcagactttaaggaaacaaaatcgctggacacgtcacgcgtcaatttttgtactgtaataaaaacatcactcagatcaatgatcccatgcacgcgggaccacgtacgcgtgataaagtcttgtgatacacaccgttggatgataaagtgcaatccatctaacggtgattttgttcaagttgagaataaaataaatattttagttagaatactttttaatactatataataatattgggaaagtggctgagcataaacatgtgcatgcctgcctgtatcttgcagccttcatgtggatttatcagtgcgacactatccatcatcaaataactcatatctacactttctttcttatatatgtgaaatttatacattacattttgtaaaataaatatttatattccaaaaacaacgtagtagacgtgcctcaaaatcaaagagatgtggaacggctttagaagcaaaatccaaaattggaaaataatgataattattgccacaaaatattgattacgaaggtgatatatatattaatcactgattgatgttgttaaggaaaagaataaagttttgggctaccaaattttcgaatgttgaaattgacttttacatcgtgatctgacaaacgcatgtgttgattcaattgttcataaatcacaatacttcaaaatttcaatacgtatattttttcatttcactaatcactaatacattggtacgtttctatagattttgccactagcaagttttagcaaaatctgttatcagaatgctttaagttgagaaaactgctaatgctattaaaagaaacggctaatgattggtagacgcatcgatcgatcattcgttgagagttttcaacaaggtctaaataaactatttaaataaaatatcatagactataaaatggaaacgaaaaaaaagagcatatatttccacaattaccgttagtacttaatagtagtagtagtaaacagtgacacatgatacattttgacggctctgatcgaataaaaaagaaagttgtactaacagactttattaaaagacaagctacaatgattttttttttttgtaaggataatattttttttttataagaaaactgagaataggcaatttctgcaaatgttttgaggaagacaacctgtcttctgtgttaaaaaccaggtctgccctacatttataattatttcattgtttttttataataaagggtttacagttaaaattcaaaaatacaaaacatccaaaaaattcgaaaaaaggaaagatagaatttagaagattgtgccacaaagtcaagacccacaaaaacatttttgttttgggttatgtactgcacaaaaaaaagtgtaaataatttaaaataaacccaaaataaaataaaatagagaaaaattcagcagattattctcttcgatatgtattaaaaaattctcacagttatttttattaatgcttggagacgaatggtcaaagtttggttttatttttttgataataatgaaagtttaattatcaagaattttgcagaaatcaagagagaaggttgaagacagcgaagcaaatgtttatgtacacaagagacgcataaatatataaaatacagcgaaaaaggtaaaattgggtctctggcttttcctcatattttcaattgcttctctcttctctcttctatagccccattgtcgtgggttcccactagcagctttcttgtcttcctccattttcttttccttcattctactaaaacagaggtttttgcctcttcctctcttgtttcactctttagggtacacacaaattcactcttttttcttctttgtttgggaggggaaaagttacagttttttcctctgttttggatcaaaatttcgtttttttggttgtgttaagaaagcaacagagagagagagaaagattgaaactttggatgtgaatttagggttttgtgaattggggaaaaagcaatccagagatggctcaacagagacaatttcag

SEQ ID NO: 12405 - DNA, 3000 bp, Unknown; identical to SEQ ID NO: 12401
  misc_feature (1)..( 3000): cDNA_ID_1808795_gDNA_ID_2214547_Annot_ID_185465 3000 nt of promoter + ATG

SEQ ID NO: 12406 - DNA, 3000 bp, Unknown; identical to SEQ ID NO: 12398
  misc_feature (1)..( 3000): cDNA_ID_2711934_gDNA_ID_2214547_Annot_ID_185463 3000 nt of promoter + ATG

SEQ ID NO: 12407 - DNA, 3000 bp, Unknown
  misc_feature (1)..( 3000): cDNA_ID_2711918_gDNA_ID_2214547_Annot_ID_134609 3000 nt of promoter + ATG
agaagagctaattgcaatcttgcttgtcttggtgctcaaaaacctcgtcctcctacttctcctcgacatggtttgaatctctctctctctctcctctcttaattccaatgggaactagctttagggtgattggaaaaatctgatctttttacttgatcaacacgtgaagaagtcaagagtgttgttttacgattcttggtggaaacttgatttccaggaacaggtagattcagatcaccaggatcaggagttggattagttgctccttctcctcagtttcgaggctcttcttcttcctctgcttttgttcatcaacaacaacaacaacacactgctcaattcccatttccttactctacttacgggtaagaatacataatcatcacattaaataacaatccattctgattagtgtgcgtgtgtgtgtgtaagcaaaacttaaaatgcttgtgttttcttcttctgcaggttttctggttattctcaagagggaatgtacccaatggtaagttcattttataaatttgtagagtcgtttccatttcactgataaatctttgaagttcttatgtttgtgttttttgtttgtttgcagaactactacaatcatcatctctatggagacaacagttttcaccatatatgggacatccatcagcaggatcaacaggaatgttccatggtttttatccctactatcctcaatacaatgcagcacaaagtagcaatcaagctcaagctcaagttcaagctcaacatcaccaaggtttcagctttcaatacactgctcctcctgctcctcctctgctgcaatatccttacttgcctcaccagccacacttcagttctcagcagcaatttagctctcagcaacctcctcctccaatcctctccctcccaacctctctggctctatctttaccttcatcatcatcaccgtcctcttcaacttccacctcaggtttgatttcacaacacaatctacattgaaaaccatttgtcacattgttttgaatcatgcttgattctttgttttgttttgtattagctgcaacaacagcaacaaaaacagtagttataactacagcaacaaagaaagcagaaactgaagctagcagcaaagatggtaatgaagcaatgacaacatcaaccatcaagatagagggttgattcagaactactacaatagccagaagaagggacaaacttcattgtacactaactcatcatcaaatctctccaacaacgttctagaaacattcattcatccatcgtttttaggattctagaatcttaattagtacttaggaggaggaagaagaagaagaaaccatcatcacattctttctttttttttgttgttgtttcaaattgcattttaggtaaaagaatcaagagaaagcattggtggctttcttttagattcttaagaaaacttggattggtgcagaaagcatcatcagattattacattcatttggggaattttatttttcaggttcaaaagaaatgttttatgtcttcttttgaacctaaacaggatttttaagcttcggataagcttaaaatcatttcttttacatttgtaattcttgaaattgttataattcaatcacattgcttcttcttactatatttgttcgtttattatgattataaaatgtttgatcaaccaagaatccgttcatcgatcactttcacctggagttttctcgtgttttataatcataaaaagattgaacctttttgataattattttgaattcgtatgatcattttctgagagtaaaatgattattgtctttggattccaaaggggatcttatgaagacaaaagtaccggtcaaaagaccgttggaatcaaacggatctttttcttcgtcaatggataatatttcacttctactattcttttaacaattttataataaaaaccaaacaaacaaaacatagagaatacataagttatgggcttttgaaaatctaaggcttaaattcttataaagcccattaatttttatatgtgtaagtaagttggccatagaaagcttaaagccttagatatgtaaacacgcaagaatatggtaagttgtttattacgcactgtccacatcatagatcgatagatattctttccacgcaaagcaaagttttattaagatggttctagaattccttcttatccacagaaaatttttatattcaagaaaatccaatttttcatttggagtcgaaatttacgcggccactaacgaaatttgatttaattaaaactagtgggcatttaatatttgaaaataatactatttgttaaatcccaattgaaaatttaataacatttaatataattaacttttttgaaaaaaggaacaaaaaaagccatccaatttgaatgatacatagagcagctgaaaaaaaaaaatctaccttttagaatttattaaatccaaccaaaaatcaaacttagccacacaattacaatagaaacccacgtgtcatccacatgaccactagatattcagacgaatatctccacttccgtagagcgattaggttaatgacacgtgttaaggtggacctgcgaagcagaggaccacctccaccgaatcagccgcgatacagagaaaatcaaaacaatggctcatattaagccacgtcagctcagtgaaggcccgctttgttacacaccgttaattagatttctcaaattgtttatttgctctgagcttatacaacaaagtcttcttctttctctgagaagatattttcgtggttgtgatcgaaagataccaaactaaagagtttaactttcttcttccttcttctttacttcaacatctgatattttctctctctcttttattcagtctgaaacaatatttctcggtagattaagatctaaagctcgttgatctagattcttgtttctatttttgtgtgttttaggctttgttggttttaccaagtgttgtgattcagtttgttttgaggtctgagtct

SEQ ID NO: 12408 - DNA, 3000 bp, Unknown; identical to SEQ ID NO: 12402
  misc_feature (1)..( 3000): cDNA_ID_2708847_gDNA_ID_2214547_Annot_ID_134612 3000 nt of promoter + ATG

SEQ ID NO: 12409 - DNA, 3000 bp, Unknown
  misc_feature (1)..( 3000): cDNA_ID_2711949_gDNA_ID_2214548_Annot_ID_134620 3000 nt of promoter + ATG
acagtaatttaaattcctttaaccggattttttttttctaactatgaattgattgttcaaattgtttaagtaaccaagttggttaacaattatattggtagtgtttatagtaaaaaatatcaacttgttgctagttaaaatttaaaactctatactacattctaaggagtataatattattcttattcaattgtggtggggaaaaaataagccctaaaaatttatataactaaaataaaaataaaaatatgaaatataaataatacttcagttttctgacccaaaacaaaacaaatataaaataagataagaaattaaccaaataatttttagattaataacttattattttttcctaaacataatttttcgactgttttgtttttatgtccacccctaatacttttcatttttgtgttatatacatttctatatggtaatctacactagttaatatgtttcaaatgatattttatgtttgtaatagttatatatatatatatatatatatgtgggtgtgggtgtgaaatagtttttgtttactataatataaataattttcattagtatattggtagttaaactattgaagttagttaacaattatttgggaaaatataaaaatcatttctatgatatatctatcagagaatctttggttcatatacttttgaatacacaaagttaaaaacgttatcatgtagaaaaaggttgagctagatagattttagaaatacatatagcatactgtattttctatacaacttaattactcacaaaaataattttaagaaagatgattgtgaattatcaactagtaagctaagtctacgaaaatggttgatgtgagaaatgaaaaagctaaggagcctaagtagaaattattaagttaggttccctgatgcccaacactttaattattatacatttgtattacattatgctcgacgcttcctagttcttcctatctagatacagcctactttccagttggaaaaaggactcaaattatcaattttcagttaatgccttcaataatttttttctgttttttttcttttatttagagtttgaacagatgaaaactctagataaaacagtaaacgaaaacatgtcgcaagggtctctctttaagatcaaataggtttaatttattttttgttaaatagtaatgcatgtgagaagaatacttacaaggaaggttcgagccacttaattcgccaaacttattcataggccaagatcaatagtcaactacagaagtatttttagtaagcatgaattaaaattggaaatggtttattgaaaaagtggatatgttggataagatatagaaggtgtagggtttacttaagtttcacgactttgggaagtataatgtggaatcttttgatatgaaggcagattgcatgcgcgtatgctttttctaaagacattaatctaaatatcatgcattgtttttctttaacttttgggagtattcaagttgacgacattttcacactttttctttcatttctgtttttgttctaattatatttcaattgtgatctttgataaacacaaacaaagacaaccaaatttgtatcaagccaaataattttttattgtttgcatctacacggacatatgttaaatgaataatttataggtatgattctaatttgatgaaaattttagagtaaataaactagcttcgaatatattgattgttaagtaaaaaaaagtttggatgtaatgtcgtattttgagttgtaatgttatatttaatttttatagattgtttttttgtaagccttgtaattctgtcaaacttttaaaataacaaaaatttaatcttttaccaaaaagaaaaagttcggatgtggaacaccaattggaaaaagtttcacacaaatttttatcaagattatttagttgataaaaaaaactaaattacacacatggattttaacatacaaagttggcatatacaacattaaatacaagtgacaacattaattatgcaaagggattattgttgattttgtcatttttcatagagatcttttgaaattgccatttttattaaaatcttacggatatgccattttctaagacttaaaaatgtatggatttcagattttttttggtaaaaatacatagtttacacaaaatactaaaccctaagaacaaccacaaccaactaaacccaaacataatgaataaaacgcatgttaaatcatatttccgtaacctgaaaaatggcaaaatctacaaactattcaaaaaggggcaaaatccacaaatgtcatcccaaaaaatggcattttcataattgattcttatgcaaatatgggatttatttttatttttctattaatttgggaacaaaacgattactatatacatatcttcatatatatagcttcaattttaaaaccaacgaatatgcacaaaaatatctagacattattccaaaactccaaactaatattcaaatgtataacgtatggttgtggtaagaagggaaaacagagtctgaaacgtaagtctatttcattgccctctctttttagtggaacgagaaaaagctgttgtgtatcattatcaacggcttaaatataaaaattaatcataaaatgaataaagtttttttcttcttctttataggtggtagaattgtaattaaaaggaaaggtagatttctcagacgatgaccttaatcataagttcctaacacattttgctcctcgaaatgcgaatctcattcaacattaggccttaatcatagttatccacatgaatgaaacacatacaatctcttctctctccctgtatatatagtatccataaaaataaaagtgactttaacaaaataaaacataaaataattgggactctacatcaatcatactagagttgtggttgttgtggaagtcgggtgtgggggaagtggatattgtggtggcaaccaatcagtttattcatgcgaaggtggtgagtaatggggatcatatg

SEQ ID NO: 12410 - DNA, 3000 bp, Unknown
  misc_feature (1)..( 3000): cDNA_ID_2711945_gDNA_ID_2214548_Annot_ID_134622 3000 nt of promoter + ATG
ctcactttccaggttttgatttttctttataatatctgattttattatctcttttgtttctattttcatatatcaataacttcacttaaaagtaagcatttcatagagctactcttgattctttgatatttttttgtttatcattctttcttgattttatataaaagatcctagctttatcaagtgaacaccgaacaccagtactagaaagtagaagcctacttaaattattaatctgtacaaaagtaatcattgacgattgtacagtactcatcgccaaatcttttgtcttactagtaactgatttatcttcaatctagttaaaaataaccgaaaatagcacattttctaagttaataaattttaaaatggcgtaacttcattaaaaattactcactaacaacccactttgtctcagtgagcgaacatctatgtaggtctgtgaaattctgaaaattttgtgaaacctaattttactttggacaaatttgacagtaagtgccattttaaacttatgaaaaaatgtgttttttttttttttttttctctggtaaaaccgtgtttatgttttttaacttttaatgcgacgagtcatcgcttctggcaattgaacccctttttttaatttttagtgttaatggtatctccccttttaatgcttttaggttctattgtttggttttgggtatttaattttacatcagaaaaaaaaaaaagaacgagtcttgctaattaagtgcctgcatgataatgatatgtcaaatgaggatcagatacgtagttatgttaattttctttaggtttggcgttttgatagatcaaacagttgtcatataataataaatgtaaaacaaaaacaaaaatgatattaatgtagatgagatcatgagaataagatatgactacgaattattccacattgatgttgaaaaaagaggttcctacaacgtcaccacctaatttatcttctgaagtatgattatctttgttttaaaaattgggctggttaagataatcctatatagtttcactaaaacttataagactttagcaacttgtaaggatattgaatttgtggccaagacaattgtaagatttatgtatacggactatttgacgtaagtcgtagttagtaattaattaagtttctaaaagagttttcaataataggaccaaacataaacgacatactagattattaagactacatgtacaatataaccacttacttaggtcaatgtcttattcttcattgtcgttttctaatcacaaagtgtattattaacaagtggacattcagaaatttaactaattatttattcaatattacttgtttttggggatcttcatatataattacatatagacagtgactaaacagtgacaagagtctgcctccattggagctgactttgattgctagttagctagcttctttgttaatggtttatgtgcttctctttcttttggtttgtaaaattaccgaaagcatgattatagaatatatgaatatactatattatatacatgtttaaaatgtaatatttaatgtattataaaaagagaagtaatatttctatttttatatatttttgacattttatttcctcaatattaatgttgaatcacgtaggaatgagatacacacaaagtcacaaatatcaacttttttttttcttttctatgaaatgcctcgttcaaatattatatgactgtaaaaccaaaagaaaaggtactaattgactgatcatgccatgttcttgttactgattttggggtttccttcgtatttgtcaaatgtcactagttaatgtaacatatctttaaacaaataaaaatgggcaggattatggagtgacgataaatttgtatagaacacagtttctagtagatgtggttcaagaaaaggcaggacgagtgcttgtgcttgactccatcaaacaagccgatgcttggcttggcatggatgttcttatcttcaactcgtggcactggtggactcacacctccggacttcagccgtacgatctctataaattaaactctctcttttgataagtttcattaattatatatgcttcttaattaaacgtttaataatggtttgtttaattaccagctgggattatatgagggaaggaaaccaattgtacaaagacatgaacaggcttgtggcttattacaaaggacttaacacatgggctcgttggattaacaataacattgtcccttcacgtactcaagtcttctttcaaggtgtttctcctgtccactatgagtaagttttcttttactctccctcttttttcccactttacctaaaataacgttttcaaaacattgattttcttgaaacagcggaagagagtggaacgaaccattgaagtcgtgcaatggtcaaactcagccgttcatgggacaaagatatccaggaggattgcccttaggttgggttgtggttaacaaagtgttgagccgaattagaaaaccggtccatcttctcgatctcactactctctcggagtatcgcaaagacgcacatccaagtctctacaatggtatctcaaaggatctagactgtagccattggtgcctccctggactccctgatacttggaacttacttctctactcatctcttacttcctagtccttgttttacatatttgtttgtttctaccattttataaatagtttgtgatgatcctgtgtgattgtgattgatatttttccttcgttaatttaatcttaaatgtaattaacattgttactagtttacttgcagcatcgatcagcttaaattctccatacatttgttattactttaatttattttccaaactattataacgtgcgtatttacactttcaaagtctttaacaagcaaaacttgtgtgaaggaccaatacttacacgcattatccaaacctttgaacactccaaacgaattttacgacggcacaaagaggaggaggattggacagaagagaagcgaaaatg

SEQ ID NO: 12411 - DNA, 3000 bp, Unknown
  misc_feature (1)..( 3000): cDNA_ID_2994364_gDNA_ID_2214548_Annot_ID_134623 3000 nt of promoter + ATG
attatgtatattgtatacaaaaatatataacaagaaaggtaaacaagagaactcactgtagaaacaaagacttataaaaagcttgaggcttgaagaataagttgatcattctttcttggcgaccttaaatacaaaatgggactctgtttccaactcaacttagcctctctgtctctcatactcttctcttcattccctggacttttagcacaatctcaacaacatttcttgggacaaaacaacacaagcttgttgagtggagggagatgcaatttggctagaggcaaatgggtctatgattcttcatatcctctctatagtgcttttagttgtcccttcatcgattccgaattcaactgccagaaagcgggtcgtccggacactaactatcaacacttccgttggcagcctttctcctgtcctctccctaggtacttttgcacatgtattactattaaccactatagttttaaatagttagttagaagaaaagctaaggtttagattggcttatacactaatttttgcgtttgtgtataaaatatagatatatagtattttctgataaaatactttagcaatatgtaaacacaaacttgttggtgtttgcgttcacaattaacaaatgagttttgtttaaagatagtaaagattatgagtttatttgaaaacaaaagatagaaactatatataaacgcaaacgcgaacaaacaatccaaaatgtttttggtatcaaatgaacgagtatgaaaagtctaactagtatcttgatcatgcagaaaattggttttgaattgggtcaaaagaaacataataaagtttataagatatgtttttcgaaagaggtatattaacaattaaaaatgactatacagattcgatggggcgaattttatgaggagaatgagagggaagaagataatgatggtaggtgactcactgagtcttaacatgttcgaatcgttggcctgcttgcttcatgcttctctccctaatgctaagtactctcttcgtcgaagccaacctctcacttccctcactttccaggttttgatttttctttataatatctgattttattatctcttttgtttctattttcatatatcaataacttcacttaaaagtaagcatttcatagagctactcttgattctttgatatttttttgtttatcattctttcttgattttatataaaagatcctagctttatcaagtgaacaccgaacaccagtactagaaagtagaagcctacttaaattattaatctgtacaaaagtaatcattgacgattgtacagtactcatcgccaaatcttttgtcttactagtaactgatttatcttcaatctagttaaaaataaccgaaaatagcacattttctaagttaataaattttaaaatggcgtaacttcattaaaaattactcactaacaacccactttgtctcagtgagcgaacatctatgtaggtctgtgaaattctgaaaattttgtgaaacctaattttactttggacaaatttgacagtaagtgccattttaaacttatgaaaaaatgtgttttttttttttttttttctctggtaaaaccgtgtttatgttttttaacttttaatgcgacgagtcatcgcttctggcaattgaacccctttttttaatttttagtgttaatggtatctccccttttaatgcttttaggttctattgtttggttttgggtatttaattttacatcagaaaaaaaaaaaagaacgagtcttgctaattaagtgcctgcatgataatgatatgtcaaatgaggatcagatacgtagttatgttaattttctttaggtttggcgttttgatagatcaaacagttgtcatataataataaatgtaaaacaaaaacaaaaatgatattaatgtagatgagatcatgagaataagatatgactacgaattattccacattgatgttgaaaaaagaggttcctacaacgtcaccacctaatttatcttctgaagtatgattatctttgttttaaaaattgggctggttaagataatcctatatagtttcactaaaacttataagactttagcaacttgtaaggatattgaatttgtggccaagacaattgtaagatttatgtatacggactatttgacgtaagtcgtagttagtaattaattaagtttctaaaagagttttcaataataggaccaaacataaacgacatactagattattaagactacatgtacaatataaccacttacttaggtcaatgtcttattcttcattgtcgttttctaatcacaaagtgtattattaacaagtggacattcagaaatttaactaattatttattcaatattacttgtttttggggatcttcatatataattacatatagacagtgactaaacagtgacaagagtctgcctccattggagctgactttgattgctagttagctagcttctttgttaatggtttatgtgcttctctttcttttggtttgtaaaattaccgaaagcatgattatagaatatatgaatatactatattatatacatgtttaaaatgtaatatttaatgtattataaaaagagaagtaatatttctatttttatatatttttgacattttatttcctcaatattaatgttgaatcacgtaggaatgagatacacacaaagtcacaaatatcaacttttttttttcttttctatgaaatgcctcgttcaaatattatatgactgtaaaaccaaaagaaaaggtactaattgactgatcatgccatgttcttgttactgattttggggtttccttcgtatttgtcaaatgtcactagttaatgtaacatatctttaaacaaataaaaatgggcaggattatggagtgacgataaatttgtatagaacacagtttctagtagatgtggttcaagaaaaggcaggacgagtgcttgtgcttgactccatcaaacaagccgatgcttggcttggcatg

SEQ ID NO: 12412 - DNA, 3000 bp, Unknown
  misc_feature (1)..( 3000): cDNA_ID_2994364_gDNA_ID_2214548_Annot_ID_185495 3000 nt of promoter + ATG
ctgtacttctccaaggcagtatagttatggaggtccatacagaagaacaagaatcggccgcaaacagatatttaaaaaagaggagctttcccaagtcatcaggccttatatccagaaagacttgactagtttatcaatggttcatagtgctcgtgtcaaagatgatcttggaactgtaaactctagtagtttatcaatggttcatagtgctcgtgtcaatgatgatgttggaactgtaaactcaagtagtttatcaatggttcatcatgctagtatgaaagatgatgtcggaactgtaaagtcaagtgattctcctccaggtgaagtagaaaaactcatctccaaaaagaaatgtcagaaagacgataaagccaaaaatcaacagagtctgacagtggttaattctgttaaaagtaatgattcagaggttatagtcgataatgaacacggtctttcggcagataagtctgttagaagtcaagatttggagattcaaccatctctggccactagcttacctgcagaatctgatggtaacatttctgcattctgatttttctctcttttgaaactattgattcttaaactagatcctgttacatcatatccagtaccacaacctatatgttctgtatcatttggtttagtttcatgattatgcgattgcttagcgttgtttgctacttgcattgagaatagaatgcaaaagagagaaagtagctcatgatttgaagcaaattcacttaaacttggttatggtttcttctattcagattgcagaaaggaaaccaatgtggaaacaagttcgagttctgtctcagagccgaagtcagagattctccaacatcttagtgggagatcagttgaagaaagctgtatacttgtggatagagacgaattccatagtgtgtttcctgacaagatggagaatgacaaacacaaaccttacaaggttgcttcttctgtctctctctatctgtctctgtctttgtctcttttttgtttcatgtttgcatatatcatcacgtgtaaagtaacaccgccttataataaactgattctacagaagatcagagacgctatatcttcaagaatgaagcaaaacagagaaaaagaatacaagcgacttgcccggcaatggtacgcagaagatgttgaaaatgggagagaatgtggcgataatccgaaaccgatagaggaaaaccaatcatcagaagaatctgaatgggagcttctgtaaaatgttaaatggtaaacagagaatatagctctcctctctctctttgtacataaagaatgtattaagcaaaacataagataagaagcagctaagaagtcaaaaggcttcttcctctggttacataataaataaggcccttatctttatcaaattttcgtttaacttatttttataatttcaagtgaagatgttttataaattgtttgcatttgtgaatatttttgtgggagaagaaaaaagtctttcacttggtggttgtgtaataattgctttcttgtttcgtctattttacatttccaaattgttccaaagataggaccactccacatcatttctattttctttcattttgattttgattttatttattttcaatccataatgtttgggacaatttgaaccatacatcttttcaaatagaaaactatagtcattttcgcaaataattttctaggagttcagaatccgataagcccctataaagtatcttcagcttcgacctattgtgctattttgcgtgttttatattcattttctcgtttatttattatgagttggaaaggatataataaactttatgtcatataatcaataactcaaccgttgaagtaattattgaattatttgatgaatgaactaatggaaatttctagttttagtcacaacttgctaatgaaggtataatcattaacaattttgaataagaagatgagccaaatgagtattaagttagtacttgcataaatagttatatttgttcctttatttatacattgatactttgtaaaaagtagtcaaaattgaaatggttcgattcattgcattacctaaataagagtcaacagagtaataaaagcattcgttaggtgtagattagaaaaaagcttacttataaagaaataaaaatgaagaaaattaaaagagaagtaagtttttgggagtgagtggtggtctagttggaaaaagcaagccaccctaaaactcatcataacatgtgccaattgctactacatatatacatcatccttgtcttttcattctctattacaacatgcattttaagccaatagctacgcagataaaatataaaccgttaaaaaagattcatgaaaattgataacacaacatgattgaggttgaactaaatggatctcttgatttttaatagtactaatcgtgctgtcaataaccaattactgaattttgtagtgacgcactgattttctacattagctagattactctgttaggaggaatagtttttactttaatttgagtacaatttttaaatttattttttcatgaaataaattggttattataaaaatttatcctttgagaacattcaatatgttaagcaattttgcaagaaccccattttaagttaataatatatcaaaaatggttgtgcatgcagaaaatttatgaaaaaataataattcatatgcatttaaatatttagtacatagttttataaatatagttaaaaaaaagttttggctgaaccgatatttctaactaacttgcttataacaagttttattcaattagtaaatttgattccaaatcacctttatcaactcttaaagtatatattaagtttaatgattgtccacgaaataattatgtatattgtatacaaaaatatataacaagaaaggtaaacaagagaactcactgtagaaacaaagacttataaaaagcttgaggcttgaagaataagttgatcattctttcttggcgaccttaaatacaaaatg

SEQ ID NO: 12413 - DNA, 3000 bp, Unknown
  misc_feature (1)..( 3000): cDNA_ID_3025097_gDNA_ID_2214549_Annot_ID_134635 3000 nt of promoter + ATG
aatcttgtagaagatatgtatgctttcatgaggctatggagtggcagtttcttacaaggaagaacctagtgaatcccgagaggagagaagatgggtggatggagatagagattggggaattctttaatgaaggagcatttaggaataatgatgaaattgagatgagtgtttcagagactactcagcgcaatacgaaacgtggcttgattattcaaggaattgaaatccgtcctacgaaaaaacccggtaatgaaatgccctagaaattaaactcccttttacctgatgaaccggtattattgtcaattagttttacaacgaagtaaagagttaaactccaatttatgaaagagtgttttcggttgagtgtggtataataaataaattgttttgcgaaaattaagttttacctttgctataagagtagaagatgttgtcaaaaaatattgaaccgacattaaacacattaaacaaatgtttacaaacaaagaaaaacgcatgaaacacatggaacgtgacttgtgaggaaaacgaaaacacgggcgttgacttaatggccaaagaagggcagtttcaatacgtgtgcacggctttttcttataggtatttagcgtcggagacgactttcgacgagtctttaaattcttatcttcgaatctaaacgaagaaaaacattacaggtagaagcaacaatgggacaaaaactcggcgttgactctagacaaaaaatcagacaagttctcggttcctcatccaaggtgcaaaaacacgacgtggaatctatcggtggaggcgggggagagatcgtacccggtcattcgccgtttgatgacttgccggaggattgcatctccaacataatctcttttacaagtccacgggacgtgtgtgtctccgcttcagtttcaaaatccttcgcacatgcggtccagtgtgatagtatatgggagaagtttcttccgtcggagtatgaatccctgattcctccgtggcgagttttctcatcgaagaaggacctctatttcactctttgctacgatcctgttctagttgaggatggcaaaaaggtatttatatttgtccatttatcagttttacactttgtttctacattttgagaataatgacctgtctcttgccttcaagtgggaaactatctattcagattgatcgtttgagatttttttctttctttttgaaaataaaagagcttttggttagagacggcaagtgggaaaaagtgtgtactgttagctgcaaaggaactgtggatcacaggagggaataatcctgagtattggcaatggattgaactttgtgaatctaggtatttattacttaaattcgattgtaatgactcctttttattatataaaaaaacactgagcataactaaatcgaaatgcttgaacttgaaacgaaccgaaatttagttgtaaatcaattggctttattgtttcaaaatataaataaaattttaagacaatacattactataatgacgaattgacgatcaatcatttagtacataataaaaatatgtatatagatgtcattatattgcgtatttcggatttatatttccaattcatgaacatatgattgaaaaaatgttgctcaaatgtgttatgcagttttgaaaaggtaccagagcttctcaataatcgttctttccagatgggtggtagtatgagtacccaaatcttatccctaggaactcattattcagtttacattgtgtacaagataaaagatgaacgtcatggcttacgagatttgcctatacaagttggtgtaggatttaaaggccaagaaatgcctaaacaattcatatgctttgacgagtctaccgataaaaccaaagagtggccaaagaagaagctaatgaaatcaaagaagaggggagatgggtggatggaggcagagattggggatttcttcaatgatggaggattaatgggttttgatgaagttgaagtgagtattgtagacgttacttcacctaatttgaagtgtggtgtgatgattgaaggaattgaattccggccaaaggattgtcagtaaattaagtgttctcggtttactatagtggaaaaacggtttggtgaattcaggttatgtttatgttgtctatttgaaaaaaatgaaatatactttgtgaatcagaaagtgaatcagctcaagtaaatactatttatgtcctttaaaactggacctaaatatttgcactgaaaagcagaatgacgttaaaatagaaaccatcaaattttaacggtgtaagaggtagatattgttgagtttcaacaataggtttagtttagggagaagcaatgacttacctgtagccagaccagcttgtcttcccttcttgtaaatggaactcattacgcagcttacgttgttttggtatgagttacatgactaagttaaaaatactgttgtatatcttggaaaaacattttgtaatcaagtttttggattgtaaattctggttatgtttttgtatgactataatgtctacgtaagttataaatttgttgtatatcgtggaaaccttgtaacaatactggatttgggtttttgattatgatgttcaattgttcatcatgattctctcttttttctttattttgttaaaagttaatgttcaagtgaacaaaattcgtaaaaaagtcaaagtttgtacgttcatatatcatttatggactttattatagatcgaatttattagatagacatgagaagtcggctatatagataattaatttatatcacgatgatcttaattatatactaatctgactaaattatataacatgatttgttagttagaatatttccaaataccaaaacgaacatcaaacgtgcacactgacgcaaagaatgatagtttcgttaacgagtggacgacattacaacgagtctttctttttaaaacatttagcagctgagactatttcttgaaagtctcagcttgcagaggaagaaaactatcgaatg

SEQ ID NO: 12414 - DNA, 3000 bp, Unknown
  misc_feature (1)..( 3000): cDNA_ID_2711961_gDNA_ID_2214549_Annot_ID_134636 3000 nt of promoter + ATG
aaccactcatctattggtattattgtcaactgcttatgccgtggaatgaagaggtaaattccaactgctaaaagtttgttcaactgtgtgttataagataagttataactttgttcttctagtatataaaggatgttgccatattggtgtatgattcctgttatgttttgctattagtataaatggctaataaaatcacattttgtttcgattcttcctggaaacaaaatcacatttgtttggaaagtctgtcagttgggctttggcccaattggtttacctggtagtcagaaatgcaggtggcctgactaccctctgacattagtcggaaggcattccaaactcggaccaggcagtgtggtggtccaattctacctggatcgggagaagtccactctgtatcacttcggtgcgttcctaccaaagctaaccggatcagccgatagggtatatcaaaaaaaaaaaaaaaatggctaatgctgatataagtgaaaacattgttttatatcttgaaaaaacatcttgtaatagaatcaacttgttggaccataatgttctcgaatgtaatgttcatgattctcacacgaacaaattcgacaaataaaaaatgtgtttcgatgatctaaaactctattgttcgtgcatatactgacactcattaaaagaaggagctctctctgtgataatttcctaatcgaaagtggcaaaaagttacgtatatatatatttgtctgtccataagctttgaactttgttagtaaggtttatagaatagttgttaggctaatagcttcaaaacaaacaatggatggtgggtagattagtacatgttatttatataatatctttatgactcatcttaattatttctgatgtggaattccttagtgatgaaatgtctcgtattctaagttctaactgcaatctataaataatcagcttctgctagagaattatggcttcaaatgatgtgatttaaacttattaactcaaaaggtttccactatcttggaacattttggttgttcaaaaggttttaatttttattttttttgcgtgttgtgttttttcctcggaaagttcaaatagaaaagaagagttgctttcaccttttcatttttcattcttctatttgttagcataacgagtcaagactatattatataaaaaagggactattattgccaaccgcaacacggttcatccaaaacgcctatcttacttgactctttataatttggggttgtgtgtaacaatgtttccaaaccaaaaaagtccgaaaccaacgactcctgtgagagacgataatgaccaaaacaaggtgcatgcatgtgcattttcgtaaaattctacaacgagttaagaagactcttagactctcagcttccgaccaacaaagccaaggcgttactgagccgttgtctttgggtgatttaccggaagaatgtatctccctcataatctctttcacaagtcctcgagacgcatgtgttttcgctttggtttcaaaaacctttgaatctgctgtccaatccgatatagtgtgggagaagtttattccaccagagtatgaatctttgttatctcgatcgcaacatttttcatcgaagaaggagctctttttcgctctttgcgacgaatctgttttaatcaacgttagcaaaaaggtatatctatctaattataaaatgaaaattttgtattgaattatggcaacgagaatgagattcgagcttaactcaaaaaatttatgctaatttggagcaatttgatgaaggatttaagttcaaattcgtgctgctatttgaattctagggagtgttatgggtatctaatttacaaaaattttaatgactttaatcaaatcattgaaataataaataaatgattattttggtttattccaaattaggacttgtggatagaaaaggcgactgggaagaggtgtatgatgttatcagcttcagctttgaacctttccactcatcacacttggaaatggattacaaaccctgtatcagcttggtaccaatttttcatgatttttttttagttcggttgtaatgacttggttcaaaagatgatggtaatgataaaaatatgttgctcatgtgtaggttggaaacagtaccagagcttctcacaacacgttggttcgagattcgatgcagaacgaatactcgttttctatcaccaagaactcgttactcggtttacattgtgttcttgaaagcggatatatgttatggctttgcgtatgtggccatggaagctgtagttagaatggtgggacatgaattaagtgaatcttgtagaagatatgtatgctttcatgaggctatggagtggcagtttcttacaaggaagaacctagtgaatcccgagaggagagaagatgggtggatggagatagagattggggaattctttaatgaaggagcatttaggaataatgatgaaattgagatgagtgtttcagagactactcagcgcaatacgaaacgtggcttgattattcaaggaattgaaatccgtcctacgaaaaaacccggtaatgaaatgccctagaaattaaactcccttttacctgatgaaccggtattattgtcaattagttttacaacgaagtaaagagttaaactccaatttatgaaagagtgttttcggttgagtgtggtataataaataaattgttttgcgaaaattaagttttacctttgctataagagtagaagatgttgtcaaaaaatattgaaccgacattaaacacattaaacaaatgtttacaaacaaagaaaaacgcatgaaacacatggaacgtgacttgtgaggaaaacgaaaacacgggcgttgacttaatggccaaagaagggcagtttcaatacgtgtgcacggctttttcttataggtatttagcgtcggagacgactttcgacgagtctttaaattcttatcttcgaatctaaacgaagaaaaacattacaggtagaagcaacaatg

SEQ ID NO: 12415 - DNA, 3000 bp, Unknown
  misc_feature (1)..( 3000): cDNA_ID_2711997_gDNA_ID_2214549_Annot_ID_134641 3000 nt of promoter + ATG
ttgaaagaacacggttggaacttaacttttgttgttcaccacataaaacctaacataaccaatcaatacaataaacaaccgaatatacttttatgaatttgaatttacctcttcggtcttcactccaccaataataccaatagatgagccgataatcgggttgttccgccgcattacttcagaggattttagcaggtcggatttcaattccttgaatgatcaagccacacttccgattgagctgcttagtctctaaagcactcatctcaatttcatcattatccattattcctccatcattgaagaactccccaagctcaatctccatccacccatcttctctctgcttaggtttcacaacgttcctccttcccctccttatagcttcactaaagcatattaatcttctagaaggctcctgtcccaccactcctaccgcagcttctatggccacattctgaaagccataacatttatccactcccttgaacacaatataagccgagtaacgagttcttggagataatacacgagtattcgttctgccacgaatctcgaaccaacatacatcgcgaagtttcgctactttttcaaaccttcataacacagggcaacaattgtccatcatcatcccaacgagtcattacaaccaaactaacgcaaagataatgaaaattagagtacctagattcaggaattggaatccattgccaatactgaggattatctccccatatgattgagaggttcatcgcagataacatcagacacctcttcccactcgctttctctaaccatacgctctttgatttccaaaataatcaaaatgattcaatagcagcaaacttcaaaattacaccaaaatagagatacaaattgcaactttaaggcgatgagatgagacagatcattcattattcataaattttgctacctttttgtcatcgtcgaatagaacaggatcgttacagagagagaaatagagctccttcttcgatgagaaaactcgcgatggaggaatcagagattcataatccgccggaagaaacttctcccatataatatctgacttcaccgtcgattcaaacgttttcgaaaccgtagcagcgacgcacgcatcgcgtggatttgtaaaagagattatgtaggagatgcaatcttccggaaatgaatcgaacggagacgactccgatttaactctgcgttttctccccatcgatcgacgcttgtatcttcgtcttcgtcttccacggaagctagtgtaaaatctcaagtcgttctattaatttacgaaagtacccctaaggattacgaaaatttcaagtcgttctacatattgacgaaaatagccctgatttgtgaacaatccacgcgtctacttcacgctccattgtttttttttggtcattattgtggattcgttggttaaggatttggttttgaaaatatccaaattccaaactaacaaaccaattaaaaaaaggtcaagtcaggtatgcattatggatcaacggtgggaatattatttgttttgaatttttataatatagtctgactcgttattccagaaaagtaaagcttaagctaacgaatacgaaagaaaaaattgataaaaaatgaaattaagtaaaagcaaacaatctatttttcatttgaattaaagaaaaaaaacaaacacaaaacacgcttctcttgttgagaagctagcaaaacaacactaaacctgaaacaaacgtaaatccgccgcaacaacccagttttttccgacggcgtacaagcttcctccgccgtaacgccgtcgtttaataccaagaagcttgattaggtttccgtagtgtgtgatttgtgagattcgttaaaccctagctctactactttataattcctgtgatgatctttagctagattgagagatcgaagtgatttgattactctagtgatgtatttgatcgtttgattttgggtttgaattttcccctttttagacgtaatcggaaatttctatgttcggagagttttgattctttctgtaattaactttactttttcgttatcgtttacttgtatgtaatctctttgtgtgtctttcaagttgctgaagttttttcaatactttgatttttaagctaagcatctttatcatctctctgtttatctattgatatagctatgttctagggtttgtttccattatccttgatcggttttggttggtttaatgtatagaacagtgattttttcctgttttgatggcttacaaatagtgattttatgtctctgatattgaattttggcttcagttttaaggttctgaacactgatgtcaaacccattgaaagagtcaagagaggatattgcaaattctactcctcacatgagggataatgagtatgttcggctagttgtggctcatgaagcctccccagctgaaaccgtgttgtctctatcgcaatcagaggtgcagagtaagaaatttatgtggtggttaaaagctttgggaatatgtgcagttgctctcttgcttacgcttgttttcggaaaatggggagttccgtttgtgtttcaaaaggtaatttctttactcaaatctcaagtttctgatgattatttccttgtgatgatccatgtcacatactctgctctttggattgtaatagtttgtttctattgaaggttcttattccaattttgcaatgggaagcaactgcgtttggccgtcctatgctcgcgattgtccttgttgtttccttggctttgtttcctgtgttcttgataccttctggtccttccatgtggttagctgggatgatttttggttatggtctcggttttgttattatcatggttggaaccaccattggcatggttctcccttacttaatcgggcttatgttccgtgatcgcctccatgtaagaacccttcacttctctttttctcatgtcatatgatcattttttacaagctcactgacttgtagatatgatttgttttttaacaaa

SEQ ID NO: 12416 - DNA, 3000 bp, Unknown
  misc_feature (1)..( 3000): cDNA_ID_3025066_gDNA_ID_2214549_Annot_ID_185527 3000 nt of promoter + ATG
ttctcaccacgttttgtatctttccttttttgttttggtttaaagcaatatgagaattttacatgctttaggtgttttttttttctttttacagcaagaaaaaatgaagagtacaacccaaagtttacagagtaatggtacaacaattaccagacgaattatcttcttacagcttggttaaatcaattgctaaagcacaaactaatggcgtgtatatatattgcatatttagccaaatagtaagcttgaagattctaagactttcaaagtaatcccttgctgagttgctattatgctgtatatgtacaatagtatataataattaaaactttaacgaagacaaactcatgtgaaaatgtaataatcagaagacaaaatataagttaataatatgtcatatatataataatagaaatatatgttcttttcgaattaaaattaaaaggtcttaattttttacaattgcaaaaactttaaactgaaaaaatgatttaatcttctggaatgtacattatataatatccgccaccctacttgctacccctagctaaaagccaaaccgatggaagactcgcttgcattaaattatgcactagcttaatctacttttaaactctcttataatacatttaattcctaatttctatcgccattttatatttttactgatatcaatattcgaagggtccatgcctatgattccatgtcatacataatatttcctttcatacctacattcattttaatgaaaaccttaaatatatatccaaaagctatacatttatgtaaactaaactggtataataatttttgaaatatgtgtatgtctactgatttactatttgattagttcgtagtaaatatattataaattgtttaaacataaaaacaaaaaaaatcatgtaactagataattttcttgacgaagattcgaattaacaacacaaaaaagttcattttctgatatcgcaatggtctaattaatggttgttgaatagtttatcttttccacgtttcataagcttttttggtacgcgacatccatattgaaaaatgtctgtctacactgagctcaatccaatgaaatttgttgtgaatgagatatatgcattcacggatttctaaaaaatatgaagtccatgacatccattgaaacatttgacaaaataaaaatataaaatatgaagtcattacaacgtagagtaaggtttctaaaaaccccactctcgtttcgtagaagccccactaccacctcactttaatttcattcattatctcatttacgttgatactttaaattcatttttccatataaacttgtaagtatgaaatttgtacttagtatatattttatctatctttccatgatgaacttaaatatattacagtttgcctagcctttttagctcagctatatatatatatatatatgctaatgttgttacgatgtttattgttttgtgtctatatcttatttacttttttgaattattaataaaatggaacaattatacatatagattatagatacatatatctaaatataatatattgtatctatatatattaatacaaattttaaagaactggcgggtttctaaattctaacatatgtactgtaagttcagcttcttactaagtcataggaacatggagagcgttggcaaaatcatggtcagtttgttttgcattcataattgaagacatagtagtatcatgcaatgaagatatggtgggccaaatatatcataaaaaaaatagcgaaacaataagagaacgttcgtgaagctgaagcatatgaaaaacacgtaaatatatttatgacgagtgacatagtaagcatacgtgatattattatttaattagtaatataggccaccaatcagaattctttgtctcaacgatgaataaattaactataataatccaaatttttaacattgttttaagaatatccgttattcaattagtctacctataacaatgaattattatggatcctttatcgctatgccttgatcaggagaattagattagttacactttcgcaatttttgtagcgatggattggaacaaaaaccaaaacaaaatatagactatttacacataaattatacatgaaatcaacttaatttgttattctctaaagtttagattgtctttataaaataccaatcatatacctaactaaaactaatgaatctttaacgtgcatgagatggtgcatgtgcaaataaaactataaagaaaaccatgatatattttttctaagaatgatagtttttgggaattttagactttcggtctatatttttcgtatgtccacaccaattgttgatattgcatttaaaacattaattattattttttccaagtataattgaactagtaaccatgaggtccatgacatccatttgaaagatgtcaattcgtaatattgtttcaaaatattttttcgtttataatacataaactttaatttttcctgtaaaagatatcaactgttcttttcatttgtgttacaacccaataattattaaatatttgaaactttagtatttagaaaaaatacataaaactaatagatagatattttattttattttgaaacaaaaagctagaaatggagagtgagagaaaggtccaaaggcacggctaagaaaacaaaaccgtggacaccctgtcctcaatttgacaagtctttgtctcctccttaactctcttcttctctctctttgtcttattctagtttggtctcaactcccaaaaacgatgacgtttcattcctatatagtcgtcctctcttcttcttctcctcctcttatctctactcaacaccactcaatttcatctctctttttcccttccattgttagtataaaaaccaagcaaacccttaatcacttttcatcatcatatatcaccttaatccacatgcatacacatatctagtctttttgatatatggcaattgtatcctccacaacaagcatcattccc

SEQ ID NO: 12417 - DNA, 3000 bp, Unknown
  misc_feature (1)..( 3000): cDNA_ID_3025078_gDNA_ID_2214549_Annot_ID_185521 3000 nt of promoter + ATG
tgttgatttctaatcagtcatcaggctatcaacaatggttttttcattcaacaccctccacgtcatcttcttttttccacatcatttcttctctcttccacataataattcaatacccacttaaattttatactctactatggtttgcttaataaaattcaacactctacccactatttttatttcatttttctttcttttatgttttaaatggataattagtaaaaatagatgtatttttttgtatccaaatcaaataaaacaagtctttatttatagagtttgaaatatggtgaattttaatataaaaaaaaattaaaacaaatatatattttataagataattgatctataataactcagaggaaaagtaaatatcagaaatttcagtaacaaataaaagaataacacatgtcctatctatatttaactcttctctcacaatttctgtctccaattatttaatgacaaatagcagtaaggggttcatttttaacaattcaaaattgttgaatccgttcaacaccgttgaatccacataagattcatttctttatttaatattccactgtaagcattcaattattgaattaattttttcaatagcccattgtatatagtcttaaaaaggggtgagtgaatgtgaatgaatggattgtattttcttaaaataatgtgtaagtcatacgtgacaatttcacaacaaaaatatttatatggacaaaagaaatttggtagacatatttgatattcccattaaaaaattgcatgagaaaaagaatatatatgaaatggtttggtttcctttctaaacaagaaaaaaaaaagtaatctccgaagaagaacaaattccttgctgaatcatggttaatttcgaatctctttctatctaattttataaatgtgatgataacagatcatcgtctccactcagtttccgtttgatagtcttatgttaccgatttttatcaggcgaagttgaagctctactcttactggagaagctcatgtgctcatcgcgtccgtatcgccctcactttaaaaggtaccagccaatgattttattcttttcttgtgagcaattctttgatctgaatttggttcttgttcgattttcattagggcttgattatgaatatataccggttaatttgctcaaaggggatcaatccgattcaggtgcgtagtttctaggttatattgaactttatttgaagtaacattgtaaagataagaatggtaagtaactgagatttcttatgttagacttagaagtttattcgttttggttctctagatttcaagaagatcaatccaatgggcactgtaccagcgcttgttgatggtgatgttgtgattaatgactctttcgcaataataatggtcagtagtaacacatccatttagtttgtttggttttgttgatgaaaaggaacattcgtttattcgtcttgttgtttttcaaatggacagtacctggatgataagtatccggagccaccgctgttaccaagtgactaccataaacgggcggtaaattaccaggtatcttcgatcctttgtcttcagatgatgatgtgttgccatcatctgcaaaaccatgtagttaagtccaaatgtagtgaacattatcagctttagattgcgagtgtgatcgttgttcttattttgtatatttcaggcgacgagtattgtcatgtctggtatacagcctcatcaaaatatggctctttttgtgagaagatgagattaatgtaatggattctactaatggaggttctataacaaagcaaacatagttacattttgtcattttttttaacagaggtatctcgaggacaagataaatgctgaggagaaaactgcttggattactaatgctatcacaaaaggattcacaggtatgatatctctaatctacctatacgtaatcaagaaccaagacatatgttcaaaatgtgattttgttgatattgtggttgtacaggtttataacgacctgtctgataatgtctcatatgtccttcagctctcgagaaactgttggtgagttgcgctggaaaatacgcgactggtgatgaagtttacttggtatgtctctaaatctccctggataatctctatggtactactctcttctttattacaatgaagcattgttttgcaggctgatcttttcctagcaccacagatccacgcagcattcaacagattccatattaacatggtacttttcctcagctaatctcttctcctggtacctagatattgcattgtatatccccccaaattccatggaatccttgatcagagttttaaggtagcatgaaccaaatgttatctctgtctcacactttcacattcacagagtaacatagacgtaatactcagtttcataactttttttcctcgcatcacttggttttcatctctacaattttgttgtataggaaccattcccgactcttgcaaggttttacgagtcatacaacgaactgcctgcatttcaaaatgcagtcccggagaagcaaccagatactccttccaccatctgattctgtgaaccgtaagcttctctcagtctcagctcaataaaatctcttaggaaacaacaacaacaccttgaacttaaatgtatcatatgaaccagtttacaaataatatttcattccaaacataaacatgttgtattcatcagagagattcagtgaaagcttacataaaccgaaaatctcggtttgatcgggtcggtttgatcggtttccaccgaaatcaacagggctctcagatagactcttttgactgaaaagaaaacaaaaatatttgcatctgatttacgttgaccgtaaaagacaaaaaataaaaataaaaaaagtctagtgtcgtcgtcgtcgtcttcgaattcgccacttcttgtatatacaaaacaaagtaatcgcgaaaacacacaacaatcgctggactctgctactgcgaagaacaacaaattccttgtttatc

SEQ ID NO: 12418 - DNA, 3000 bp, Unknown
  misc_feature (1)..( 3000): cDNA_ID_3025082_gDNA_ID_2214549_Annot_ID_185520 3000 nt of promoter + ATG
tcaacagagatcatctgtcatcgccatcgctggagactacacgaaagaaaatgttcaatcgaaataaaatatcaagggacatattttttcttctctttcctctcaactaatagcaacttgccacgtaggggtccttagttgtcgacaaaatccctaaacatagaaacgtccctctctaataaactgattaatgatttaattttttgctatattactcaagagatcaaccctcaagagcccattaggaactgccgttgagcttggtctaagatttccggttcagtttgatagtattaaaattaaaccgagtgtatttggattaccaaaataacatttaacgttcacatttttaaaattttacattagcattgtactattgggttttaatatatggatttttgttttcaacatattattacataaaaagcattctaaactcaaatcaaaagctaaaacaaaaacaattgaaagacccaaatctgtcatggccattaggcatgactcgacgaagagaactacaagctttgtctagaacatcgttgatagcctaaagagttttaccataaataaaaggttgaattgccttcataaatgaaggggaaaaaaacacttttctaaagaaacttcaacatatttgagcgttcgaccaaagttggtcacaacttaatccttctgagtcatcagagagaagctacgctaatgtattgatcaatcccaccttctcatgactaagcttcacgcattcaaacaaattttaatcagcttatcaagacatcgtattgttgctcggatctcatctttagaggtattacaagaaaaaaaatatcatatcacactatttctataacaagttgttaataatacatgtcgaagtttaacatacagtgtttcagatagaatctctagtctcctttagttcctttcaaaatatgttcatacatggagaaatatatgtcttcaaagcgtttgcatcttgactatcatgaacaaatgatgaaccggacaatgctacatcctgatcaaaactagatgaatcatgagtttctatgatcacctccatgtccataaccaaaagaatcatgggcgtcaaagaaaagaaaaaaaaaaacactttatttcatatgatttgtagatttggttcttataatatactctttaaccaaattacagcggcaaaatttatatttttgtagaatttacactctaaaaaaatacaattttctaacattgatagaacatttagttttagtataatgaatattcaaacaaatttggaacatggagcaaagcgtagaatgcatgttccaaatattttaaaattttgatattcagacttctaaaaactttagaaacgaaaacttgtataaaattcgtagaacatgtacaaaaatataaaatacatactctatttttcgtagaactctagaaaatgtgttctgataaaattagacgaaacattttctatcaaaaaatcaattgcatctaatcttcaatgatttcaaaaacttttccattcaaattctctatgtaaatcaatcatatttttctgattattgttttaaaagtctgattaaaattagaacaattcttgggtttaccccctaaagggtgaatccattcattcacccccttttaattgatcaattagaattttacatgtaatctatttaaagaataaataaattaaatcacaaaatctaaatcttaactacaattttatcaacccaaaccaaaatatatttcgtttaatcacaaaatttaaactttaaccactattttatcaacccaaaccgaaatataatttcgttttaatcacaaaatctaaaccctaaccactattttgtcaacccaaaccgaaatataatttttttttaatcacaaaatctaaaccctaaccactattttatcaaccaaaaccgaaatataattttgtttaatcacaaaatctaaaccctaactactattttatcaacccaaaccaaaatataatttcgtttaatcacaaaatataaaccctaaccactattttataaacccaaaccaataattttcttaataaaaattctacagaatttgtttccttaatttgttttgttttactaattttaatttttatttattctttaaatagatgacatgttgatttctaatcagtcatcaggctatcaacaatggttttttcattcaacaccctccacgtcatcttcttttttccacatcatttcttctctcttccacataataattcaatacccacttaaattttatactctactatggtttgcttaataaaattcaacactctacccactatttttatttcatttttctttcttttatgttttaaatggataattagtaaaaatagatgtatttttttgtatccaaatcaaataaaacaagtctttatttatagagtttgaaatatggtgaattttaatataaaaaaaaattaaaacaaatatatattttataagataattgatctataataactcagaggaaaagtaaatatcagaaatttcagtaacaaataaaagaataacacatgtcctatctatatttaactcttctctcacaatttctgtctccaattatttaatgacaaatagcagtaaggggttcatttttaacaattcaaaattgttgaatccgttcaacaccgttgaatccacataagattcatttctttatttaatattccactgtaagcattcaattattgaattaattttttcaatagcccattgtatatagtcttaaaaaggggtgagtgaatgtgaatgaatggattgtattttcttaaaataatgtgtaagtcatacgtgacaatttcacaacaaaaatatttatatggacaaaagaaatttggtagacatatttgatattcccattaaaaaattgcatgagaaaaagaatatatatgaaatggtttggtttcctttctaaacaagaaaaaaaaaagtaatctccgaagaagaacaaattccttgctgaatc

SEQ ID NO: 12419 - DNA, 3000 bp, Unknown
  misc_feature (1)..( 3000): cDNA_ID_3025090_gDNA_ID_2214549_Annot_ID_185518 3000 nt of promoter + ATG
ctaattgttgttccagttttcattatttgtcttgtatatttaaatttttagtatttgtattaattattcaattttatgaaataaaatatttataattttattttaataataataatttttgtaaaaaatccacttaaaaactcgactacgaaaaaattaactaagcaagaaaaaaataatggaccaataaaaactcttaaacttaaaattcacaaaatttaagattaaaaaaatcggaagaacactattaacgacccaaccattggggttgctcttaacattgtttcatggctaagaagtgaaatgaataatcaattgtctaatgaattgtacaaatgtggtttaagtaatgcctaaaaagcaaatctaaaaactcctggacaaccgtagattaaaatatacactactagatcaaagagagcatgagcatccatattttcatacactattttagcctaaatgcttcttttatttgtttcaataattggaatcagtcacactaatataaatccaatcttgactagtcttagtcttcctactatatcagactttttttaccccttttgttatttactctaaatcctgctgaagaacatgtcaacgttcaaagctttatacaaacctatcttagctttgtgtcaactttcggctaaggcaaacgctgatgattatcttcttcgtgctgaactacgttcttcatctcgaatctcacttttcttacttgaacttcttcatcttcattagcttctgcgttttgaagctctctcaaagctcttttcgcgtacacagtgaaagcaacagtggtcacaaccgcaatgactaaggagattacattgtacacaatctccactgttgtcaaacgttgatgtccgtattgcacatctgcgaatgttctgattaaccgaccgctgcatatgaatcggaatttagaattaggttttcgattcttctgattttaactgttttgatacgaggagagtaagactgacctgtaaatgtagatgaaagcttctggtatcattcctgctatggatccgaagaagtaaggccagaatctcatgcttgtcacgacgattgcgtagttaaaaatcgtgtaaggaaatggggaaacccgaaagattgccacgactctgaattgatggaaccagcttccttctgcagctagtcttagaacagcagcttgacgaggccatctttttaaccattgctgcattttgttaaaaaacaaatcatatctacaagtcagtgagcttgtaaaaaatgatcatatgacatgagaaaaagagaagtgaagggttcttacatggaggcgatcacggaacataagcccgattaagtaagggagaaccatgccaatggtggttccaaccatgataataacaaaaccgagaccataaccaaaaatcatcccagctaaccacatggaaggaccagaaggtatcaagaacacaggaaacaaagccaaggaaacaacaaggacaatcgcgagcataggacggccaaacgcagttgcttcccattgcaaaattggaataagaaccttcaatagaaacaaactattacaatccaaagagcagagtatgtgacatggatcatcacaaggaaataatcatcagaaacttgagatttgagtaaagaaattaccttttgaaacacaaacggaactccccattttccgaaaacaagcgtaagcaagagagcaactgcacatattcccaaagcttttaaccaccacataaatttcttactctgcacctctgattgcgatagagacaacacggtttcagctggggaggcttcatgagccacaactagccgaacatactcattatccctcatgtgaggagtagaatttgcaatatcctctcttgactctttcaatgggtttgacatcagtgttcagaaccttaaaactgaagccaaaattcaatatcagagacataaaatcactatttgtaagccatcaaaacaggaaaaaatcactgttctatacattaaaccaaccaaaaccgatcaaggataatggaaacaaaccctagaacatagctatatcaatagataaacagagagatgataaagatgcttagcttaaaaatcaaagtattgaaaaaacttcagcaacttgaaagacacacaaagagattacatacaagtaaacgataacgaaaaagtaaagttaattacagaaagaatcaaaactctccgaacatagaaatttccgattacgtctaaaaaggggaaaattcaaacccaaaatcaaacgatcaaatacatcactagagtaatcaaatcacttcgatctctcaatctagctaaagatcatcacaggaattataaagtagtagagctagggtttaacgaatctcacaaatcacacactacggaaacctaatcaagcttcttggtattaaacgacggcgttacggcggaggaagcttgtacgccgtcggaaaaaactgggttgttgcggcggatttacgtttgtttcaggtttagtgttgttttgctagcttctcaacaagagaagcgtgttttgtgtttgttttttttctttaattcaaatgaaaaatagattgtttgcttttacttaatttcattttttatcaattttttctttcgtattcgttagcttaagctttacttttctggaataacgagtcagactatattataaaaattcaaaacaaataatattcccaccgttgatccataatgcatacctgacttgacctttttttaattggtttgttagtttggaatttggatattttcaaaaccaaatccttaaccaacgaatccacaataatgaccaaaaaaaaacaatggagcgtgaagtagacgcgtggattgttcacaaatcagggctattttcgtcaatatgtagaacgacttgaaattttcgtaatccttaggggtactttcgtaaattaatagaacgacttgagattttacactagcttccgtggaagacgaagacgaagatacaagcgtcgatcgatg

SEQ ID NO: 12420 - DNA, 3000 bp, Unknown; identical to SEQ ID NO: 12414
  misc_feature (1)..( 3000): cDNA_ID_3025097_gDNA_ID_2214549_Annot_ID_185515 3000 nt of promoter + ATG

SEQ ID NO: 12421 - DNA, 3000 bp, Unknown
  misc_feature (1)..( 3000): cDNA_ID_3025107_gDNA_ID_2214549_Annot_ID_185509 3000 nt of promoter + ATG
tagatcaatttttcaaactgtttttaaccttctctttataaattacccgatgcacgagttgtaacaacgttatttttttcttttgagtataatttaacattctattcaaaaaaaaaaaaaaatgcaattatcggaaaatcacgttaagcaagtgaaaaactaacactaacttattttagttcttaagatatttttaatgtatgatttttatgcaaatcattcacacacatgaacacattacaataaataaatcaaaacgtgttttaatcatctacaatgcttttgtacactttacttagcaaaaactatagagacaggataacatatgaataaatttatgtacatgaacgtgtctgtacatcaactggtcttagtaaagttctcagattttgtagaccattgttaataagaaaaaaccaaacccaagagtaaaatttgctttctgaaaaaataaaccaatagtcagttaaaaaacaggcagcgttgcgtgaacgtgtaaggacgcacgcggcagggcaatgatgcgaataagggtagtttcgtaaatatgtgtggacgactataaacgagtcattttctattttttaacaacataggccgactttagaagatttctttaaattctgagtttccaaatgaagaaagatgatacaatcaacaatgggacacaaacaaagcgttgactctagaggcaaaggccgaaaagttcccggttcttcgtcgatggtgcaaaaacatagagttgaatctagcggaggagctatcatctccggaccgtcactgttcgataacttaccggaggattgcatctccaacatcatctctttcacgagtcctcgtgacgcttgcgttgcagcttcggtttcgaaaacctttgaatcggctgttaattccgatagcgtatgggacaagtttcttccatcggattattcatctctagttcctccatctcgagttttctcatcgaagaaggagctctatttcgctatatgcgacaatcctgttctagtcgaagatggcggaaaggtatatatattacatcggtttttatacatattgctttattgatacaattttggtgtagttgtcaagttatacatttcatgcatctattgaaatatttatgattgttttgattttttattttttgaattatttcttttattttccaaaaataaaagagcttctggttagagaaagagaatgggaaaaagtgtttcatgttatctccgaagaaatctatgtggatcacatgggttagtactcctcagtattggcgatggatttcgattcctgaagctaggtagaacttcttttttggtcattcatttcgattgcataatcactcattctcatggtgatgattatgatgatgcactcatgcaggtttgaagaagtaccagagctgctcaatgtgtgttggtttgaggtccgagggggaatgaatactaaagaactatctcctggaacccgttactcggcttacattgtgttcaagacaaagaatggatgtcctaatttgggggatgtgccagtagaagctactgttggattggtgggacaagaatcttctcaaagacacatatactttgttgggccttcggatcaaaggagagacagagaaacgagagatgtaacgagaccaactaaaagaaaagatggttggatggaagctgagcttggtcaattcttcaatgagtcaggttgtgatgttgttgacacaagtattcttgagattaagactccttattggaagcgcggtttgatcattcaaggaatcgaattccgtcccaccaaaagcctgttctatatataatcaagtgaaaaactttgttgtatgggtaacactacctgtttttagtttttggatattgcactgtgtttgatttggatgttcattatataagcaagtgaaaaactttgttgtatgggtaacactacctgtttttaatttttggatattgcactgtttgatttggatgttcatcattctcacatgaacatatttcaataaaggaattgtctttttttgttttcatatcatctacaatgcttttgcacagattacttagactccgaatggagacgtgcggttcaactgcgaataaagtgcggtacagttcaaatagtaacaaaaatatatacatacatatatatgcaaagaatttcgttattatttgaaacgcactgcactgtgcggttcggttaccatttagccaaaaacaatagagatagaataacaaattaaatttgttcaaaaaaaacaatgaatatatttgttacttccataatcttttttttggtgagctgttatttacatgatctgattttaaacaaagactcactaaatttataaattattgactttttctgactaatataatttattattatgtaacaaagacttcagaggtaagttaaacacgaaacaattatttgatttgggtgattaaataaaggcaaaacttttttttgaaaaaaccttttgagattctctgaagacgattcattttacaaggctaggatcggaaaattacattatatcctgtaacgatcactgacggatataaaatatctgcctagtttccacgctttattcaccgtttcttagatcatgctccattacttaacaaaaatcatattcgtaatgaatggacttatatttcaattgtatgtaacaactttagttattctctcttgtattatcacattgacattttcatcataaaatcatttacatgttctatttttgctgaaataataaatttatcgtagtcggttattttggaaattttcataaccaaaaaagtgcaaaaaccaaccaacactgaaaacatgaagcgtgtaatgtaaggtagtcttgtaaatatgtgtggacaacattacacgtctattatttcctctattacaacagaagcgagttttgaaagagtcagaactcacgagtttatcaagttttcgaaacacaaacgatttgatcaaaggcaccgatcgatgatg

SEQ ID NO: 12422 - DNA, 3000 bp, Unknown
  misc_feature (1)..( 3000): cDNA_ID_3025110_gDNA_ID_2214549_Annot_ID_185507 3000 nt of promoter + ATG
ttgcttagtcatgccctgtagctgaaaccatttgtccatgattcacacattcgctcagttaaatgtctaaaacgtttatattcctacctagtaactaccatcttctagatcacgcctggaaaaagaagacatcgtgtagctgaatgatctcttgtgatttgtgaacaaagtgtatatggttattttgatttgttgagaaaacagaaaagatcaaggctttttgtgatgtgaatacaacaaacccaagcaagtaaaactgggtcagttctaatctaacttcgaaggcttttaagaaaaactatactatgggctttgttgcacacattacgaaaacaacaaccttgggtttttagtgaatagaaatagttgagcttttaaactctgaaagattgtgaattgtgttgtgtaacaaagcaagagcatttttttatttcattttcaaatattatctttcacatttgtttcgtttttctatttaaactgcaatgtttttttgggtcaaactacaaagtttttttctattttgggtatttttcctataaatttagtagttaggatcgtagtatattttaggagttttagagacatacgggaaaggtaggaaaatattagaaagggtaaatatcagtcatctttatttacattctaatttatacttttttaccaaaaaaaatcgttgtatgttagcaacaaccagcaagagtattattagtttattaccaatcaaagtcacactatttgtaatatcatatatatcaaaattagctataataaactataaaacttagtaagtcaattttcagaagaaaaaaagaacctataaaagactaacgaaagccgattatatcgaagccattacgagccacatggtattgaagattaattatagagttgaatagtcgatgtcacatgctttgactgtctccttcattatagatatcgacattaatattttattattaacatggaatcgtatcttaacttttccacgtaaaacaatatttaatctctttatgaaagatcatgcacacactaggaaaactatataagtgatttcttatatggtaaaccaactttgaatgtaggctaattagtttattaagcaatatagtcttttatgtctatgttcaattcaccattcacccatattgtcctcatttacttataaatcaagtaaaccatcaaagaaagttgtgtaaacagcctatttttctttaagaaataaatcatggcaagaaaatgtgagactttttggttttattttgttaaaatgacaatctattatccttttctttttttcgaacaatctataacgtgtatattactacaaaggtataagagaatccattttttaactgccaagattaatttttttttttcgattctttccaattaattaataacggattctatcgacaaaatttaggatagcgttacatataaaagtaatattaacgcatcctaaatttgtcgtttttaaaagaaaaaagtattaacgacaaaaaataatcctttagcaatgaaaattggtgataaaaaaactgaagaaaaaagcaatgaaatttatgttcctataccgactattttttagtttcttttatataaaatataaaatagtttatatataaccgttcttttatttttttatcgtctacaactcacatacgttacacttttatagttatacttctaaattagaagtcaagttattgtatagtgatattataaacttcaagttatacaagtccggtcatatgaaattaatattagtaatttgattggaattataacgtattgatttggacatgtaaatagctaaaaaaaaatagctcctatattagattcttttaaccaacaaatacaacaattaagttgataaccttcctctttgaagtatttcaagattttatggaaaaaactcaagatttttttccgaagcttttatcggaaactaaagaatatctagtaggtctattttcattcattatcaacttgcgaaaaaagagaaacaatgtcaataattaatgtaaatagaaaaaaaaaaaaattgtagttgagaagagagagagatgcaaaggtgtcaacgtccgtgctttgacttctatcttttctcttgtcctcatcttaaatcctcaaagctgacctaaccggtcactcccttcttctccggtcatctttaattattattcaattaacccataatcaaattttaatataaaaattaaccatttgcaaaataaaatcaatataattaataaaagctactcctttacctttttattgcatagaaactactaaaatataaatctaccatttgcagaataatcggcaaaaaaccataaagaaacatttatagtcacataattttgcatatatttttctaaattcgatcactttcatcattcattattcattaatcgttccaaattttcttctgcctatccgttgaacgacaaactattcaaagtaaaagatttagacaaaaaaataaaaaaaatatttagagaaagactttcctaagtcaatgttattgattaagacttcatatatgactaaacacactcaattataattgacaaaacacggaaaagatttgtctataacaaattttccaaaaacacaaattaattcacaaaatatttggaaaaataatatttattcaaagcttcttatttcttcttcttctttatttaaagatttttactgtttgctctgtatcagaaaaaagaccaaacacaactcttccactttctatctctctctagaattttgcttgcattaaaacaacacccactacttgctgttgcgtgttgaagtcaaaagtcgccatttttctctctcttgcttcttcatcttcattgatcatcatctaaaatggcaataatcagaaaacccgtttcgtatactctcagatttctcaagggtttttgttgaatcttaattcttctctcaaagtttcttcctttatattcttcttcttcttcctctgttcttgaaatg

SEQ ID NO: 12423 - DNA, 3000 bp, Unknown; identical to SEQ ID NO: 12418
  misc_feature (1)..( 3000): cDNA_ID_2708879_gDNA_ID_2214549_Annot_ID_134642 3000 nt of promoter + ATG

SEQ ID NO: 12424 - DNA, 3000 bp, Unknown; identical to SEQ ID NO: 12417
  misc_feature (1)..( 3000): cDNA_ID_2711993_gDNA_ID_2214549_Annot_ID_134643 3000 nt of promoter + ATG

SEQ ID NO: 12425 - DNA, 3000 bp, Unknown; identical to SEQ ID NO: 12416
  misc_feature (1)..( 3000): cDNA_ID_2711989_gDNA_ID_2214549_Annot_ID_134648 3000 nt of promoter + ATG

SEQ ID NO: 12426 - DNA, 3000 bp, Unknown
  misc_feature (1)..( 3000): cDNA_ID_2708904_gDNA_ID_2214550_Annot_ID_134653 3000 nt of promoter + ATG
catccttttggtaagaactgcatcttttgaatgctattcttgaaaacttgtttggacttctagatgaaaagaaaattcgtttgaaaatgactcaatcattcggtgtttgttatgcttgacttgcaggcaggactatttttctatgatatcttctgggttttctttactccagttatggttagtgttgccaaatccttcgatgctccaattaaggttagtaaaaatgcctcaaaagtacacaccataccaaattgattctgatttgttcttagtcaatttttcagtaatctcattgttacatatttctttcagctcttattccctacgggtgatgctctaagaccctattctatgcttggtcttggtgacattgtcattccgggtatgttctctaatgcttaacccaatagctatattcagcttatggttatgcattcttgaatcatatttttggatatgatatgaatataagatattaatttttgttttcctttaggtattttcgttgcactagctctaagatttgatgtgtcaagacgtagacaaccacaatacttcacaagtgcatttatcggatacgctgttggtgtgatcctcacgattgtagtcatgaactggtttcaagcagcacaggtcagtttttgtgtcttaattgttgtcatctatttattgcaaccttattttgggatttctctctgataggtttttgtttttgttttgcctttgtttcagcctgctttgttatacattgtcccagccgtaattgggttcttggcttctcactgcatttggaacggtgacatcaaaccggtttgttttctagtccttctagatttcgatgtatctattgttgtaaacgcaattatgcaacccaaacagaagaaccttcctgttaccttctgtttgcttatcgtgtttttggttgtagattaagatgtaaaggattagtgagcttatggtcttcttcttcttctttgttttgttgctgttgcagttgttggcgtttgatgaatcaaagacagaggaagcaacgactgatgaatcaaagactagtgaggaggttaataaagctcatgatgaatgaggaaaaatcgagaaagaagggcagaggagaaatatatacacataaatgtgtcttaatatatggaacaagaaggaaaacaattttgtttccaaatgatcatcaatcagtcccttctaaccccttttttgtttttttagattttcaaactttcttttggccaagacttgtgtaagttactataagttacaacaaattttctttgacttttctttctgttttatgttaaattcgttaggagactggaagttatatatcatttcgaacagaattcgaaatatgagctttttagctattgtagacaacgtggtaaggatatgaacagtgagaggcaaagaatagcacatgatgatgataaagttatgaacataatctgtgctgagaaagggacatttttgcttggggagctatttggagacaaaaaaaagctagatagaaactctacacttaatgttttttttttttttttttctgacatctagtacaattattgcttggagagcaagttgtgtgtttaataatatataacgtatatgtaagttgaataaaaatgtagagaaaaatcttaatgttaaaaaaaaagagagtaggtttggggtttaagtttgtgattaggtctagagctaaagccaaggaacaagcacgtatcaaagatcaaacaaaatgagagtactgagggacggccaaagtggtggtggtgccaatgagggagctaaagcggagaagactgtgtttgaggttaaacttgagtctttcgaggcacgtgcgaaaatcaagatcattaaggaggtaaggagaatcattggtgtgggtcttaaggaagctatgaaattggtggtgaaggctcctacggttttgaaaacaggactttcaaaagaagaaggagaggaggtcgttgagaagttgaatgcacttggtgctgaagctgttttacagactagagtgagtgatattccaagtctgttttggaacagtttgttccatctaataagctgatggatgatgataccgttaataagagcttattagctcaattaggctttctcattgctaatgttttttttttataaagagattaactaaaccaatgtatctttgcttgtttaacatgtatcgcaagtccttcttcttggcataataataatcgataaatttgggaactttgttgttattccatggctttaatgatctccagtgagagttctcttactttgctcatttatttggcctgactccacagcacaactaatttgtgttgatatcaagatcttgcaagatatgcaagattagaaactgaaaaaatgtagcaaacacagaaaaatgtcattgtacctaaacacaaaggttacaaaactagggacataccaaaaaaaacaaacctccaacactttgtttgcgtgttgaaagttaaaagacatataacaatagattttaccaagaagtgaaatattctcacttggagatgtcaatatttacatctccgaacttaggcctaggaggatccgttgccatatccacatgacccgaccaattagtttactaaaacagtgtgattgttcatttccttctaccatctttggttgctatctcaagtcaaatcttgaacttttatttcccatcaaaaatattcagcttctctgtttcaagcacttacactaatgggctatatgagcccatttaaagttggtacatttgacaatgtgcgtgtccttttctttttttttgtttaacaatgtgcgtgtcctatttaacatcgttgtttactcccaacaaaaattaaaaaactctacaatgttggaatcgagtgtattcttcttcacaaacaaacttattatcttcaacaaattcggaagattcacaattgcttgttcctctcttatgtctacttcccagaaaaatttctgcttttgaaattcaag

SEQ ID NO: 12427 - DNA, 3000 bp, Unknown
  misc_feature (1)..( 3000): cDNA_ID_2712007_gDNA_ID_2214550_Annot_ID_134654 3000 nt of promoter + ATG
gaaatataattaagaagaagaaggcaaacagtaagaaatgacatgttgtgctcatgccctttctatgatttgcagagggaaaactgatttactatgcacagaagaataaaaaaagaataggtgaaagtatagaaaatgaggacagaagaagagcttcggatctgcatgcttgtaagtaggacgcataagaccccttgtgtacatcttctgtacctagtagaatatatgcttttgttcaattacaagtatcataatagtgtatacatgatatatggaagttgtatgtgatcttttgggtatctcaaagctgttgtgtcggtcttgttattgaggcagagatgaaaactaaagttatttcagatcatacaaaaagaagtttagtattcatttcagaatcatgttgactatgcgtctatagtctatacgattcagtgggtagggaaaaagagttggtaacaacgctataacacgacctgaagctgcataatgagatggggtctagttttctacagtcagagtcaggaagttggaagtgcacgcaggtaacgactaaatttgttgacccattgtgtcatagtccatagtccagaacttcaaattgtaactttattttagatgtttaaagcaactctttgttttggtggtatatacttctatcattttagggtgcacatctgctgcggctacctgtaaacggtatgaactaaagcacaataagatgttggagttttctcgcaaggccggaatgaggaggagactgatctttagttgcaggattatgcagttgagaaaaaatgtaaataagttgaatacagaaatcacaagacttgcacatgggggttactgaaagtgttgttagagatatatacgagcatataagaaaagtgagctaccgatgaaattgaaggtccctatttctgtatttttgttaagatatgatatgtttttccttctttacccatgaatcttgtaaaatctatgcagactcaagaaaggagcttagtgtataacgagactgtggttgaccttttaaatcgtgatactgagcccgttggactattaaatgatctagaggtatttaaagggttggaagctttaagccaattgctgaaatagacatacactatctcggctacttggagaatgttgtctattttgcagaaaggaaccattttgccattgaggagaatctgatggaggaagtggttgaaagcagacagcatttacatcatttaattggcatttgtgaaggttatacttcctatcgcttgttaatatactttttatgcatttgatggtgatggtattctaggtgcatacgtttggcaaagcctcaaagtgtgttgatgacattttgaagatatgactcattgtctctttaatgagacacatggtaatcatcttttccatccatgtatgtgattttccatttgcttttatagctcaaaggcaactagaaaactgctttgaacgacaaaagttcaagatcacatacaggatctagaatgaaggaattctagaaactaagcattctacgaaagttttacctgtaaagatgtagtgatatcaaattcgctctcctattaacattactcctattgcttcaaacttgtctgtgtttgatgatgtgcttattagaaaaacaaaaatggttttggttgttcttggtaaaaaaagacactcttctgatggtcttcattttaggggtttgattttagctgattttttgttttaggttgtctcagacaaaaaacatctgcagcaaaagtagcgaaactcgagtcagagtaaaggagcctggagtccagttcatctacctccttgaagtcgcttttaactgagaatgagatgaaaatccaacagctatgacttcaagcaggttgacgaactggactcttaactctgactacaagcaggattcacatcttgagtgatctcttctgaaaatatttaaaatgtggacctcacttgacagactacaagcactgttgaattcagttttattaacaaaaacaacatggagattgatttatcacttgcaattattcattcatgttaaactaatggcagaacagcttaggagaaatgataatgtgatgtgaggcagttagtctttaacttagctggtgcctattgtgctactccactgatgctatacctctgttgatagaatcatacaaagaagagtaatggatcttgacattatatttttggacaaaaccacaagcctcgagtaaagtttccaattttttttttgatatttagacaaatatatcaaaaatggtgatttactaaatcttatactaactataaaaaattcattaccatctaaattttttaatgctagattttcattttttttttcattttttttcttcacaaatgtaacattatattaaacattcgatacaatacataaccaaaacaaaggcccttaaagagatacagaaagtggaggctcaaactagcctataacgggccaaatttgttttgaaaatataaaagaacgggcctataacgaacttataaaaaggctaatatataagcccattaaaagataatgcatgcgtgtcctctaacttgaacccttactactaacaaacatatcgttctctttactttctcttcttcacagcaaactaatcctcaaaccattctctcaagctcgtcttcttcctctatctgtgatttctagggttttgttttttccctttttaatctctcaattgcttagtctcttcctcttctctcaacacgtaagacacgcaaagaagaaacaatttttcaatcttcttgtaggtaaagtccgtcaatttaatttaattttactcgcttgatcgaatcatgtatgtgaattcgaaattgtagtttagggacgtgaaaatttcggttgattcatgttgtttttttgataaatctttgttattgttcgttcttcgtattatctctcaaagaatgtactaactaaaattacaaaattgaaaccagatgcatagagat

SEQ ID NO: 12428 - DNA, 3000 bp, Unknown
  misc_feature (1)..( 3000): cDNA_ID_2708920_gDNA_ID_2214550_Annot_ID_134661 3000 nt of promoter + ATG
actatgttccctctttacaggtttgactataatgtttcttctgttctcatgaatatttaaggtggaacttaatgttttgatgcactctgccttctttgatcttcgtacagtttgttcgggttcgtcgttctgcacatacttatgtatgctggtaacatatactactggaggcggtatcgagtgaattactctttcatatttgggttcaagcacggtactgaacttggttatagacaagttctatttgtgggattaagcattggagtctttgcacttctttgtattcttgccaatcttgacatggaggttgaccccgaaactaaagattatcaagcattaaccgaacttcttcctcttttcctgctcactgtaagtctataaatccaatattcagcttttaatgcgaaaattagcgatatgacaataataacggaatgactgtgtgatatagggtatgtttgtagttctagtcttaccattcaacatcttctaccggtcgagtcgcttcttcttcctcacttgcctctttcactgccttgctgctcctctatacaaggtaggaacagaaactgaacgtctcattgatgattgatgatgaaaaataaaaatttgatcattgtacttcaacatatccaaatcttaatattcgacttctcctgcaggtaacattacctgatttcttggtgggcgatcagttaacaagtcaggtgcaagctcttcgaagtatccagttttatatatgtcattacggttggggagattacaaacatcgaataaacacttgcacagagtcagatgcctacaatgctttcttattcattgttgctgtcatcccatacgtctctcgtctccttcaggtacaaagcttgttgagttcatacgaaatccaaccattcgaaactctcttcattcatataatatttgctaaagaacactatatatttgcagtgcttgaggcgactgtttgaagagaaaaacccagaacaaggatacaatggcctcaagtacttcttgactatagtggctgtctgcttgaggacgacttacagtgtcgacgaggataatcaatttatatggagaatattagctgggatcttctcagctattgctgccattttctgtacttactgggacttagtctatgactggggtcttctaaacagaacatctaagaacccttggctccgtgataaactccttgtcccgcagaagaaagtatacttcatcgcgatggtaagcacaaactatagagtaacacaacatttggaatcctagtgcaaaattgattcttaactttaaaaacatatgcagatcttgaacatcttgctcaggttcgcgtggctgcagaccgtgcttgatttcaatttctccttcatgcacagacagacgatggttgctgttgttgtcagtctagagattatccgccgtgggatatggaatttcttcaggtgagaaaacataagttactgcaacttttcttcaccatgtattagcgctatttactgtcacacaacatatgatataactttcttggggatttgtttatgcaaaaaaacaggttagagaatgagcatttgaacaatgttgggaagtatcgagcatttaagacggttccattaccgtttaactacgacgaggatgacgataaaggcaactagttttctcggtttctagtcttagattctgtaaagactgattcatccacaacgagtaggaggaagatggactagactaaagctggttcattgagatcaaggagatgtttcactcaggataacggatattcgctagattagccatagtaattagggtcactgatttgcacttaaaatttgtttcattgagagaaacatgaaattcatgggcatcaacaaagcaatgacttaaaaaccaaattctcccacaataacaaaagtaataatcagaaacattcaaagtatcagaataacttaaccaaataaattctaataatcgctcactttcccttggtttcttcttcttcttccttcttcttcgccgcagcggctgcctcctccccttgttccaactcctttaacgactgagtccgcatctctttctgcattgctagaaacggtccgtagtaatcgacgttagtatacatacatgtaatcagcttcaatctagcatctcgacagttcgtgccgtcatctttcacttccctacaatgatcaacttctatgaatgcatctttgcaatcaccttttttcaaataccgactaagccaacactcttcacaatcttcttcctctttctccttgttagtctcactcaaatcatcatcagaacttactgttttggatttgttcggatcttccgaagcagcagatgaatctcctccttcatgatccaaagggtcgttaccgctttttggtttgctctcagaattctcagcattcgcattcatagaagacatggttgtttgattttaaaagacgaagttaggtttgagagtcaagaacacaagtgggaagcttaaaacccctcctcttaaaccctttagttatgtcggcttttaagttttaggaaatagtttcgttaaaacctattcttggagaacaagtggtggtattcttggagaacaatttttcttttatggtattttaagatttttttaattttaaaaatggtattttaagatattttctctttaattatcttattacttaaaattatatacattattttataaaattttgacatttgtaattttttaaagattactgtagtaaaaatttgacagtcctaattagaagtaattaaattttaacatggtttactttttctaatattcacttgttacaataggggtcaaaatataacattacaaagtttatggtgtaaaaagtaataatgtagaagtgaagatattcaattgaaatataattttattacaattaaaccatgtcgtggagacatgttctgaaataaagttatgaagtcggtgagtgactttagagtctccctcaagagcaatcaatg

SEQ ID NO: 12429 - DNA, 3000 bp, Unknown
  misc_feature (1)..( 3000): cDNA_ID_1834360_gDNA_ID_2214550_Annot_ID_134663 3000 nt of promoter + ATG
aatatcttatatacgaaatcaattaaatattaatcacataaatattagcacaaaaaaatatggtacattcgggtctatagtagttttgcaagacttttttggtggatttgggtaaaagtgcattctggtcatatggtagattcccttattaaataaatatggtgcactcctatgttattagctaaaatgtttagattataattcagagtcatatcataaataaaattaatattaataaaataaatggctttttggtaagacggatttggagggacgggtttttgaatcaacattaataaaaaggaaaatataattaattcaccgtttcaatacgggttaaatctttaatttataattttttaataacaattaatatatataaatacttaataataattataaactgtaaatatataaatattttataaaaataaaatttgcaagttttaatatatattacttttaaaaaataaatcatcccgcggtataccgtgggttaaaatctagttatagcatatatttatgatgctgccaatatgatccgaaaacccgattgttcttagtaaaatttgtcattataataaaatattatttctttaattttaaaacaattattttttgggttaagtctcaatattgttgttcaaatattattcatttttaaaagataaatttgttcaggtaagatttttgagatttacaggccaatttaatgctagggtgcgtcaattaacctcaaataataatagaaactaacgcaagagagaagtcgacattggtcacgaaaacccgcagctgagtcatggctcgacacgactcacgagagtctcccaatccagctcggggacaacttttctagtagcagccaaaattggtatctcccattgaagcctaacaatcaaaaaggttttggcatccaaggcaaagcaagtaaacgtttggaatggaaacgtgtccaccataaaaagaggctttactatagtgatgagataacgagtgcataccaaacgtaaagagtaacgcactaaatgaaaaaacaaacaaaactccatttcaataaatataatgcatgaatgcgtccattcaacacatgcaaaaagaattaagaaaacaaacgacaacgaagaagagaaaggggacgacgcggcgtgactggctgtccttcaaatagacagaaagtcaaaaactatgagaaatataattttattactcaataataatgtcaagttaaaattatatatgttacaagttatattgatcgtccaattaataataagtctttctatctcaatatataatttcagttgatttgaaaataaaaatacttgtttggaatttttactttgaaatcatcataagttctattcagtggctaagtactttcaagtttcaaccaacataaagatcttcagaatttaacgaagtggatcgttcttcttagatcgtaatctttgtgaatacttaaaccatatttttgtctatggtaaacgaaaaaagaaacatgcatgtggtatattgactggtgacttcttaagtccaaatagataggttcatgtttgtaacttcgatgtcacataagaatatgaaaagctgtaaagctaagaccagccagagtaagatcttatcgtttagatttgagatcttcaagaaaagatttagcatatacaaacaataaactaatcacagtatatacgtacgagcagcttcataatttgagaaagtcaagtggggactgtacatttataattatttttatatcaactaatgatttagatggtactggtaggacaaaataagatgtgaaatatttaactaacaaaataaaataagctatgaaatatgtgtaagataggcgatataatcggtgcaggaaaaaccggaccaatgcagacgatttagccaatacttttagggataatttgctagataatctgtttttatattatagtttgttgaactttcattttcttaacaaacaactctttttttttttttcaacgtaacaagttagacatacctatgttgatacaaattgtagttgtactattaattaacagaacgttaaaagtgtgttatagctcacgttttaagttattaattattggtggtatgaaaaataatttgatttttttcatgtttattgataacttgcaaaaaattggatactttcacaagttgcatgatttatttcaagcgtaacaaatatgttttgagtgatatacagtaatataacaaatatagcaactagtcttggaaactttcaaattctttcaaaaattcacaaatatgtttggaaactttcgcctaaatgttgaaaatcttttacaaacttttggaaactttcaagacttgttgattttcttcactatcaattatctaactttgattccttttcttcaatttctttctatcttaatgtttcaaacttatatatatgtcgtgacgagctgtgacgagctgtgatacaaaccacaagtccataaccggcctttgatgcacatgtctttttgccacctccacctccaaaaaaacttaagtctacacgtagaataaaaggctgctacatcactccaatttatctatctctatctcttttattttataatgttagaataattcagattggtatgtcaatattataatattatgagctgtacgtgttctattcggttccatctattgatgtccgtcgtgggacattcctcacgcgctttggttgcccaatctgaacacattggtaaatgtgttttcaactataaaccaacgaagatttgatgaaaaagaaactcgtttttataacaaagctaaaatcaaggaaaattgacccaatgaattttttattatatattgttggactgaccagtcactattttacccatcttaaagacttaaactaagttttgttctgtcttctctttcactcttcagacagacacaacagtgaaactaaaaagattagatttcttcggacaaagattttctcgagattggagaaaaatg

SEQ ID NO: 12430 - DNA, 3000 bp, Unknown; identical to SEQ ID NO: 12428
  misc_feature (1)..( 3000): cDNA_ID_2708920_gDNA_ID_2214550_Annot_ID_185546 3000 nt of promoter + ATG

SEQ ID NO: 12431 - DNA, 3000 bp, Unknown; identical to SEQ ID NO: 12427
  misc_feature (1)..( 3000): cDNA_ID_3025134_gDNA_ID_2214550_Annot_ID_185539 3000 nt of promoter + ATG

SEQ ID NO: 12432 - DNA, 302 bp, Unknown
  misc_feature (1)..( 302): cDNA_ID_3025241_gDNA_ID_2214551_Annot_ID_134665 3000 nt of promoter + ATG
aagcttgttttttttctcttgcatgacccttcgcttctcttctcctctcttctctaccgaagtttgattcttctcagctgagaaatacaactgccgatcagtaagtacttctaaactcgtatctataatctgtaagattgattaatcattttgccatcaattaaaacccatttctcctgatcctgctttggtttttgtgtttcatttgtggggattcaatgatcttcactctttcaatctctgtggaatttttcttttccttcagattctcatatatacatagacgtgctttaactctgatg

SEQ ID NO: 12433 - DNA, 3000 bp, Unknown
  misc_feature (1)..( 3000): cDNA_ID_2712052_gDNA_ID_2214551_Annot_ID_134666 3000 nt of promoter + ATG
acggatttgagacagttggaggagtattcacttgcgggtatggtttatttgttgcaacaagttaaacctaatttgagtaaaggtgatgcaatgtggtgtttgctaatgagtgagcttcatgttgggaggccgagtactatggatataccgagttctggaaaaggggatagtagtaatgtaggggttggtggtgctagtagtactgtaaatggggttggtggtgctattgctccggcattgtgtagattccatggaggttggggttttggtaatgggaaaggacccaagttttctggtaatgggttttctttgcacagtgaagagttaacgttgcagagagagattgattgtccaaggagatttaatctctcaccttcgatgaagtctttgttgagagagaatgttgcagcctttgctgctgggtatcgtgctagtatggagcaaaagaagcaggtgcaaatgcagtctgaaactagtggtactagcttgtcttgcacggctgctgctacacattcagagaagtgtgagcagccacatgtcttcggaagtgaagaatgtttcagttcagtgctggagaaattccgggatctgaaccttgatgacaatgttgattcggcacctgaggagctgaaggatgatgctttaataggactacttcagcaggttcaggatctcaaaaagcaattgaaggagaggaaagactgggctcagaagaaggcaatgcaagctgcccaaaaggtcagcgatgaactgtccgagcttaaatcgttgaggagtgagagagaggaaattcagcgggtgaaaaaggggaaacaaactcgtgaggactcaaccttgaaaaaattatcagagatggaaaatgctcttagaaaagctagcggtcaagttgacaaggcaaatgcggtagtaagggcacttgagaacgaaagtgcagaaatccgggcggaaatggaagcttccaaattaagtgcatcagaatcgctcacggcatgcatggaggcctcgaagaaagagaaaaaatgcttaaagaaactactggcgtgggagaagcagaaaatgaagttgcaggacgagattacagctgagaaagagaagattaaggcactcaatagagctttagctcagatcactcaggaagaaaaagaatatgaggtaccaagtaatgcattatcttcgtttacacaccgagatttttctggttcttcacaatttttgacactataacctgtggaagtccatttagttagaacataagataatgaacccttctctttgaaagcgcatctaattatctgttccaaggaattattattcctgtaaatacttttcatgggccaagtctttctctctatgctgctagatggatcatatttgcatagagaggttgtctttttcaggcaacttttcatcttgttaatatgtatttgcaggcgaaatggaggcaggagcagaaagctaaggagcaagttttggctcaagtggaagaagaacagcgctcgaaggaagcaattgaggctagcaacaagagaaaggtggaaagcctgcggttaaagatcgaaatagacttccagagacacaaagatgatctccaaagactggaacaagagctgtctcggctcaacaaagcctcttcaactgactcaagcctccaatccaataacacctctcacacaaaggtgaaatcagacaagtcgaagggagaaacaatgtctaagctgcttgaagagctgaataggcttgatggatcatatgagaaggaagcaaactatgaccgggaatgtctgatctgcatgaaagatgaggtttcggttgtgtttctcccttgtgctcaccaagtggtctgtgcgagctgcagcgatagcttcatgggcagtggcaaagcgacctgtccttgttgcagagctccggttcagcagagaatccgtgtctttggagcgagttcttagtaacaaagataattatctggggtccaaagattaatcacagcacaacttcttttgtcaggtgtaatacttttttgtttgtttgtttgtttgtttatggctccgtctctctacttcctattgtctcttatcttcaatctgagggggtttggactattcgcatcttttacattgttttgagttgttcaaagaagatgttgcctggtttatgatcttcccaggattcacaatgtaagtaaataaaaattctaccacctctacccaaccctgaaacgtcgtctcacaatttctgatacacatgaatcacttgatatgtttttcttaccatgaacctatcacaaaaatttcatttttagcttctaacttgtggctaaaacaagttaagcttcaatttctaatattagcccattgttcttctgtaacaagtttcatttgttatcacaaaagctaatttttcttttcacttaattttgtctagtaaaatttttggaaagaactctattgacatttcaacaacctcggaccaaaccggtctacaccgttacagaccaatcaaaatacggaaattcaaatctatgtattaaaaaaaatcactacagaattacgtacgtacgtataaatagaggttagtacattaatcggcgaaaaaacattcgacgtagaatccgccttcggagacttgagtcgccaccggtgagtacttcttcgatacattccgccgttcgtttcctcttacttggcgtcttggggtaagcttcttcataacctatcatcatcctccttctccagctcttcgagtttcagaaaacctagatctctaagtttttatccctaatcttttagggtttctaccttgttcgatcattctgaaattatttgtcttctctcggaattcaattcctggggactttctcctttttggttagagaagtttatgtatactctctaactctactgttgtatctctgaaacaagtgatttgaaatttatagctcttctgataatcgaaatctgtgttgatttcgtggtgttggtttatgattgtagtgcagtgaga

SEQ ID NO: 12434 - DNA, 3000 bp, Unknown
  misc_feature (1)..( 3000): cDNA_ID_1024045_gDNA_ID_2214551_Annot_ID_134669 3000 nt of promoter + ATG
gtctattataacttttttattttgttcatcaagtaagatttcaggcttttgtttcgatttaggttacacatattcaaacttatccatatatacacttcagaatctaaattaaagtaatctgatcatgttttgcctaatgttgtcataaactctttagacatgtacatatttcattggaaagttactgaaattattgtttttgtcttatgcgatacgaaaatattatcacacttacctttcaaattataccaaaaaatatgacaatttattatatagattatcttgtagataaccgagaagtttgacatttccttaaacgttacgtgccgtcaagaattggcaaagccactcccaactactcacaaatcacaatccataagtcatagccaagaaaaccctttatgaaacacaaatgtttattattcctgaaaatacaaatttaaattccaatttctaccacgaagatagcttactttataggtatatatattttcttcaccaaatccgtaaaaagcaaaagtgatttgaatttaaatcagaaacgcgtatagattgtgtatatatgtaagttaaagggcatgcatacctttttaatgttatttaatattaatcttaattccattcttcatagacttttgaataaattttatttttttcttgagtttataagtcagggaaattgtcacccacttaaccactaggaaagcagatttggttactgaatctttttcacacctaaggctcaatcaagttttgatgggacctaagttgacctagaactcattttcacacccataataataataatatgacaaaacttatcacactttatttctttaatataagggaatctcaatattcgagtacaacacggaccattgatcatggaatttaaaagactagctagatcatgtacatcaataggaattttggtctcaagtactgtcatgctttgtgttgtgtctcaatcagacaggacaaaaaactgatctcttggttgcacattgggtattaagtatttttcgtctgttgtgtgaatcttaccaagcaatggttttgatgcaaatatgcattacatctggcctgctcgtatgtcccggtctatacgatctgcattatatgtacctggaagctctctaaaatcctcgttgaatatggaatatgcactgcgaaagaaagcatgaaaaaagatcgaacttattcagctctaacactcaaaagagaagatatttcatggcctaaaactcaacaatactcatgaggataccactttacagctaataagaatactagcagaatcttatgcttccagaatcctaagacttttttttcacatctccaagttaccaatgatgtttacgttttagataagtgttatataatttggtatctggaaaatgagttgctatgtcagtcagatcaatggaggctaagtgtttttagaaatgtacatacctaacatcaccaggctgtcgtttaccaagattgagcaagatgattgaaaatccagtccctagtatctgaaaccccccgtgataacaaagaaagccatcaaaggagattaaacagaaacgacttgttagagacactacctctctatacaaaatgtctcatattcaatggcattgcaaaaacgttgggcattttcaggaatccagacattgaagataaagatgacttacaaatatagggcccagatcccaccgatgtgcaataggcgccaagataaaccacaaggtgataataacccacatctttagacttaaagagaaaagtcccataagaatgatatctagaagatcatcacacaaccacagatcaataaactatttgtttcataagttcttggacattgcagatgatgcacatatcaaagattaaagagttctcacctggcagcttcaacttgttacgcagaaagtagtataacttcctcttccaccggcttgctgacggtgggagtttaaacttctgcaatgccaaaagagattttataaggacagaaactaaaaaaccattctttaccagttaagaaaccattctttaccaaatcatcatcatcatcatcatcaaatgactcaactccagctggtggatttggtattacagcaacaataaaggaatctacacaataaaatcaagacttgtgcataacctaaagacgcatttaacaaacacagataagcattgatgcttataacattttcagcagaacctgtttaccttggtccttgagcgtaacgtataaatcatctccatcttcttcgtcttgcaatgcctttccacgaagaatcatccttaaagttgaaacgggaaatttacccttttccgcaattgcatttctcaaatcacgaatctaaaatcagcccaaggatcaatcaatcattcccttcgtacaaaggaattcacttagagagataaagaagaagaaaattctttactttgatatgagacgccactcgaatttgagacggccgagctgggccgatggttttgtacgtgatctcgacggtgccattgttggttgaatctgagctcagctcttcggttgaattcatcatctcaccacgaattgtatgcaatcaatgagaaattgaggattagggtttcgaatttgggaattgaaaaaaacagagtttgttttctcacttgctacttctccgatgacggagagtcgacttgagttttcaatattttcatatctgtccttacatatgtttttaattccacttttaaccccaaaggtttcagagagtataaaaaactccaaaacattggaaaagcaattgtaagagcttctgcgtcaaaaagaaggtttgggttacacttttcatacacaccatatgcataggatgaggccttcaatttctgccttacatatcaaaagatagaacacacacacaaataaagcaaagaaacagaatatctttgagatctcctctttatttggagaagacaaaacacagaacaagaattagaaagaagggagagaaagcaaaa

SEQ ID NO: 12435 - DNA, 3000 bp, Unknown
  misc_feature (1)..( 3000): cDNA_ID_2708937_gDNA_ID_2214551_Annot_ID_134670 3000 nt of promoter + ATG
atgagttgctatgtcagtcagatcaatggaggctaagtgtttttagaaatgtacatacctaacatcaccaggctgtcgtttaccaagattgagcaagatgattgaaaatccagtccctagtatctgaaaccccccgtgataacaaagaaagccatcaaaggagattaaacagaaacgacttgttagagacactacctctctatacaaaatgtctcatattcaatggcattgcaaaaacgttgggcattttcaggaatccagacattgaagataaagatgacttacaaatatagggcccagatcccaccgatgtgcaataggcgccaagataaaccacaaggtgataataacccacatctttagacttaaagagaaaagtcccataagaatgatatctagaagatcatcacacaaccacagatcaataaactatttgtttcataagttcttggacattgcagatgatgcacatatcaaagattaaagagttctcacctggcagcttcaacttgttacgcagaaagtagtataacttcctcttccaccggcttgctgacggtgggagtttaaacttctgcaatgccaaaagagattttataaggacagaaactaaaaaaccattctttaccagttaagaaaccattctttaccaaatcatcatcatcatcatcatcaaatgactcaactccagctggtggatttggtattacagcaacaataaaggaatctacacaataaaatcaagacttgtgcataacctaaagacgcatttaacaaacacagataagcattgatgcttataacattttcagcagaacctgtttaccttggtccttgagcgtaacgtataaatcatctccatcttcttcgtcttgcaatgcctttccacgaagaatcatccttaaagttgaaacgggaaatttacccttttccgcaattgcatttctcaaatcacgaatctaaaatcagcccaaggatcaatcaatcattcccttcgtacaaaggaattcacttagagagataaagaagaagaaaattctttactttgatatgagacgccactcgaatttgagacggccgagctgggccgatggttttgtacgtgatctcgacggtgccattgttggttgaatctgagctcagctcttcggttgaattcatcatctcaccacgaattgtatgcaatcaatgagaaattgaggattagggtttcgaatttgggaattgaaaaaaacagagtttgttttctcacttgctacttctccgatgacggagagtcgacttgagttttcaatattttcatatctgtccttacatatgtttttaattccacttttaaccccaaaggtttcagagagtataaaaaactccaaaacattggaaaagcaattgtaagagcttctgcgtcaaaaagaaggtttgggttacacttttcatacacaccatatgcataggatgaggccttcaatttctgccttacatatcaaaagatagaacacacacacaaataaagcaaagaaacagaatatctttgagatctcctctttatttggagaagacaaaacacagaacaagaattagaaagaagggagagaaagcaaaaatggcactaagaatgtgggcttcttctacagcaaacgctctcaagctttcttcttctgtttccaagtctcatctctctcctttctccttctctagatgcttctccacaggtgtttgtaattgtgtatgtagttgtgtgtgcatagctttatctgaaactgttgatgaatgtctctgttatttttttagttttggagggtttgaagtatgcaaattcacatgagtgggttaaacatgaaggctctgttgccaccattggcatcactgcccatgctcaggttcttatttttgtaatctaagtgttaaaatagctcagaaactagatagatgtctctttggacttttggagaatggttataaagataatgatagttttgtaagattattggctgaaatgggaggagaaatgacattgatgttgcaggaccatttaggtgaagtggtgtttgttgaactgccagaggacaatacttcagtgagcaaagagaaaagctttggagcagtggagagtgtgaaggcaacaagtgagatcttatcaccaatctcaggtgaaatcattgaggttaacaagaagctcacagaatcacctggcttggtacagttttaaagtcttaaggaaattaagtaagttaccactcatgtgacaacatataagcaatgatttggcaattgtgtgttgtttagatcaactcaagcccctatgaagatggttggatgatcaaagtgaaaccaagtagccccgcggagttggaatctttgatgggtccaaaggaatacaccaagttctgcgaggaggaagatgctgctcactaggagggtttctctctgtcttttatgttccaagttctatcaattctcatgcttgttttctaaatttgcatacactctatgaccaacttcacaaaataagagttcaagaagatgaaacagagacctaacaaacacattaagattttttctttcatatatcttgttatcctcaaaatgcatttaccatcaccccaaaagccagtccaataaaaaaggtgatcctaatcaaaaattattaataaaaatttggtaaccttaaagatataaccattactttaaaataaataattggtcataagaaaagaaactggtcgtccaaatattacaatctgctccattatattgaaatcacgtattcaagctcataaggcaagttaggtccctattggtcaatttggttgtatctaccgttgacaaaactgtaacatccattgtggtaaaaattgggcatgaaaacaaacataacgacatatgataacatacaaggaacataatattaacgaagcacacacatgacacgtatatatatattcatatgcacacaaacacagatagagatgaacagaaacacatgacataactttccaa

SEQ ID NO: 12436 - DNA, 3000 bp, Unknown
  misc_feature (1)..( 3000): cDNA_ID_2992404_gDNA_ID_2214551_Annot_ID_134671 3000 nt of promoter + ATG
aattgcattgatctttggtttgagttacacaagacttgtcctgtttgccggtgtgagttagatcctggcatgattggatctggaaggcttgaatcattccacaacacagtcacaattactattcaggacataaaccatgatgaggaaaatcctccaaccgctggttcaagcaaaaggctaatagaagcctcggcttggcgattctcgaggtcacattctactggacatttcatggttaagactacggatgctaatgtgaagtccaaaagaaggcattaccaaacaggaagctgtgtctcgttcgacgaacttactcggtatgaaggagcaggatggcaatggcttggtgattcatcacacattagcaggattgaagtatagtttactgaatttctgttacatcttcattattgtgttctttgtagcagtagttatttcaaaactgtaataagatctctagtcagattctcatgctcctatcggataacagagaaaataataagagtcactccacaatgttttcttcggaagtgtttttgtcttctacagtgtctccatcttcagaagcgttgttagcttctacactgtcaccatcttcagattcactggcgcttctcagactaaactttagagtgataggtctacccattatctcctatagaaaaaccaaattgtaatgaaacactttacatgctcaaggctaaaggagcaaactttatattaatatgcttggaacttcataccttcccattgagttttgtgattgcattctcagcttcttctctagtagcaaatgagacaaagccatagccagaagatctaccttcggggtcagcgaaaacaacccgagctgagaccgggttgaaatctgcagcagtgaaaagctctcggagatgtgttgatcttgctttccaagcgagattagatacgtagagtttgtgacgagtgtctccaggggcaggagaaggaagatcgttcggtgatttcggagtaggcttcttgaaccttcttgcaaagcttacgctaatgatcctccctgacacttgctgaaaacaaagaagatagaagcttaaacatcaaaccttagctaacaactcaacacaatgtatgatttagtagtttgaactatctacctaaaaggctttgaaattaaacaaacaacactcaatcagaaaagaatctaagggatttgagcttacaaaagtatcgaacttatcaatagctgcttgagcttcttctccagaagccatagttacaaaagcaaatcctcggttctttccatctttttgccttataatctaggaaaagtttataaattgaggtaaggcaattgctagtaataacataaagattgaaacgaaattgagaaagaagaaagacctcgacattgttcacagtcccacattgtccaaagagctcggaaatgtcatttacactcatagaccaaggaagattgaatacaaaaagcttccttttcagatttgaattctgggtttcttcagtcttctcctcctgcgacgtttcttcatccgccgatgtttctttctccgcgacggaacagagtacggagacgagccgccgtgagttatcgctgccggaacgtagagagaagacgggagagagattgctgggaattcgaagactaagggcagtaagttttaaggaagaagagcgtttagaaaagagataaggttttgaagaggaagaagaagaagagaaggagaaaatggagagagaagcttccaaaaccgccattgttagctttggcactagagaaatggattagaccgagacaaaaggataaaactttttgggccggtttggttattcggaaaaaaatgaattgtgaaccgggtctaccaacttcggtttttgaaggtaaatggcacgaggaacttaaccgtatatcatgtattttttttggtataccaataaattccaatccctccacattgcagtcaaatggaagaacaaaaaagtgatgaatctcatgatttttctctttgaagtcaaaactcgaatttgactaaaactgaatttgattggtgtatattctataacaatgtaaatacaaaagtttaaatttcaatattctaaataaataagttagtaaattttttttgagttttgagacatttggtgaaatacaaaatgaagagaccaagatttcaatcaatcccaaaaagttaattaatcctaagaaaagtccagccagacgtctccaatccatcaaacgatgtcgtttagtaacaacttgtagtcttgtacacaccaaccaaaccatttcctatttatttttcacaaaacgaaaaaaaaaaaaatccaaattcgagaaagaagagtccaacacaaactcggagacgaagaagaaggagagaagaaaaccattaagccattccttcttccgtatcactctgtcaccttcaaaatcctaaaccataatttttccgaattcgttgtggaagagactgcttgagtgagtcagaggtgggtttacgtgaggtattgctgacaatggcgtctctgggtctatcctttcctcccgccgcaaaaacgccgacgtatctagcctcttcgtcttcaactttcttctctaactcttctctatccgtcagaacctctcagtttcgctcccgaaactctgtcttcgcttgtgttgtaagcggtgttcatgaatctatagaattgcttattctgcatttttgaatgttgatccttcctttcttattacgtttccggatttgaggttcctagattgagtggaccctaatagccatcttgtcaagtttgtagttctgagatttttattggcgcatgagctgaaaagctcgtctctttcgtttgaatattgtttgtttatgcgaatatagctacataaaggttgtctctttcttcagaatacatttgtttgaaactatccaggaacagaaattgagacctatatgattatatgaatctctgattgagtcttgttgttgttgttgctagaaatgtgatatg

SEQ ID NO: 12437 - DNA, 3000 bp, Unknown
  misc_feature (1)..( 3000): cDNA_ID_2708951_gDNA_ID_2214551_Annot_ID_134679 3000 nt of promoter + ATG
ttaccattaaaacaaagctatgttaaaaaggtttctttgtagattgaatttgtattggtatcaccatctggttgtcttaatgtttggtaaatgtcaggtttctttcaaagaaggcacgctaaaacccccggtgatcaaatcaagtgtagatctcccagagagtgtgggcgtctttgggcagcagattagcctttcgttgttaaagcagtctttgaaccccttacaagatgtggcagcaaacatttcacgggcactctctggtcagccacctctcaagcttccgtttccaggaaaccgaggcagctcttggctcttgaccacttatctcgacaaggatctcaggatttctagaggagatggtggccttttcgtgcttgccagagaaggaagctctctgcttgagctctgaaatatttgataaagtatatatatagcaggcttcatgtaaaaaccgtaaccactacagtagagacatcttcagaataatgctgaatgcagattattgggcctaatcttaaattttaattatgtactcatttgtctgtcacgaaattagataagttcagtttcggtcagtagtaaaaaactaaaaagaatgattcagcaaaattggaggactgatatgagacaacgagtcagtctataggccaattggatccaatcgagagtgaaaacccgaaaagtaaacctgattgttttgttattgattatagaacccaaaatctctcagaagacattcctggttgtaattagaagaagaagaagaacagatagacgtgttagtcaagtaagtaatactagtcacaatttttagttgtccaggagattttcctatcaatccaccggttattaaaaactcatacaaagtgatacggttgagacaagtgtttccttctgagtatgttgtaatctaagaaacagaagggcctttgatgaattttggcggctttatctcttctgcaccatccactgcaaaatgtccttcctgatgacgctgttgaacccgcctctagcataaattggtttaatcagactggattcaccaacactgtaaggcctgtactgagtagtagttcccgtggatcttggaggtttgatcatcatcatcgaagcaatggggtatttggaccgaaagttcctcaaggacatgaacaagttcctatcaacctcacggttctgaggagtctgcgtgttaacatgtggtttaagacgggttgattgtaatactcttttcgccttgtctatgcttggctctgtattctttggtagtagaacctgagccgatggcttcatccggtcaagcccccggagaatccagtttccaagattccgaccaataaccatgtctctctgttgtatgttcttgtggaccctaagtgccatatcaaagatttgataagtcctcctgcataaaaggaaggaaagagagagaaagttaacacaccaatcgtctcagtcggtaatggaaatctcaaatacacaactcaagactcgtttaacagtagcattatctatacgactgtatgaccttagcatcaacaaatatatttcctagcgacaactacacttacaaatcccaaacgggcacaatataagacttcaatccaggaaacaccagatgttctatctctccctctatgaataaatgcatcatagcttcgtgtcactctactcttgaatctcacatcgaatggttcaagagcaatgtatagaattacgaaatcacataagtaagttcaacgaatcaaaaccgtggaaataggactagcctacctcttgattttacttaaatccaaccacttgcattgcattgcattgcttaaatcacatttttatagcgatacgggagtcagaacaaaactaactggacagtagaaaatcgaaatcaacctaaacacaataaacaatcagaacgatacatcaataacaaagcagtttcatcaattgaagaggccaattcatatacaaagaaacgtatttccagtcaaacctaaatcagaaacaaccaaatcgcaaaatccacaaaaagaaaagcgtaaagatgaaagaaacttcaccgatgcataaaatctcgaatccttggatgcttagggctaacaagccgacgctgggtcttcaatgcgagccggtaagtccgcctaatccccaagaagtaagctgttcctagagctaactcccacaacaccattactttctacaactttcttcttcgtcttcctctttgtcaccttctttcttcctcaacgtatttgaatacaatctacaattttcctttgaaagagccgccagaaatttcaatctcactcccatcggaatcacagatcctccgtttctagtttaaagcaccaggttgcttgatctgcgatacaatcttgaccgtccattttacttgttcgtcaagattttattttaaatgttttaatgggctgggcttttgtagccttgaaatatgcccatatagacgagacggacaaactttttatggataatttaggtttttgttcaccaatcataatttttggtatgcaatgtttttttttctttttttttagcaataattattatttttgtgtgaagcaataataatttgtttgcttgaaacgataagatttatatatatattcgctctaaaaatagaataaacttcagcaatcagattaatccgaatcaattccgttggtgttacagttattctacactctctatagatcccaacctctttcttttaaatatttatatacatctctctttttttgtgaatttttttactagattccaaagtaaatgagtagcgaatacgacaactctcgttattagacagagatatataataatcgcgtaataattatttcctatttaaatatgataaactcatgtgtgtgcatatttactttttatttacttatgggatactcaccaatatttatttgatacgaaccataaccttcactaagttttctttctctagcctccctcatctttctctctctgtcggcgatg

SEQ ID NO: 12438 - DNA, 3000 bp, Unknown
  misc_feature (1)..( 3000): cDNA_ID_2712033_gDNA_ID_2214551_Annot_ID_134680 3000 nt of promoter + ATG
actgcgtcaacaagattaaaaagtggaaggtaattaaccgaacaagccaatgattatttgacacgtacaagtgaatgagagaggagcgtcacgataatgattgtggactaaagtgacagtcgtcattatgacagaccgcgtggcatcatttatctcaccaaatgtcctttttcattattttcctgatcaaattaatcacaagtggagcaccctaattaacacgttgatatgacgaaccggacacattaacacttgccattacgttttagatttgattccttcagcttctttaagttttagttcagcaattatttgatcgatttggatatatattgaacctatgatgataatttagtagtagtgtaatgtaattttttagaaaataatgtatgaaattcatcagtttcatttttggataaattccggtttaacaagtatggtttggtaccaattaattaattgattaaaagtttcaaattcaataaaaataatacatgtggctgattatcgaatttgattcataaatagaggaatatttaaaaacgattattgaatagaggagattggtcactttaactcctcatagtagtaataattttctgatttcactgaatccaagtaaatgcctagaggaacaacaacgacgattctttccagctggaatattaatccgaagcacgaggcactgtaacggtccaaaaattccagctggattgcataactactcttaaaggcgcactctaacctactcctacttcactctactgttaacctacgcctctgtcagcgtactctagcatgacagttataatttcatcggcggcgaggttttattcgattttatctgcctttcgatcagttataacagaaacgcgactcgcaatattttaattggaagtaaacaaatcgacatgcgatgcgacgaataaaaattaagattgcgattgctagaagtcggcggttttccggtgagaagtccggcgacggggaagtgatttcgtcgtgaagctttccgtctcttgtaggtttcgtacactactacggatggatagagtatcggctctgataaatccagaaatttcgtcgccattttcgtcggatgattctagtggagatcaaaacaatcaaatcaggaactcaaattcaatgtgttaccaacagaaataaaattcgaaatgggaatcgaatctgcaatgtacctagatgtttcgaaggacgcatgaatccattaaactgagccaaatctgagaaaaattcaaaatcgaaaaaccgatcaaaatcaataaacacgagaagatcaatcaatcaatcaaaaacaggtggatcgtcggattttgaataggagaagccaacctgattgagacggagcgtaagaagtgaggtaaaggatgataaagcagatgagagtgagaatcggaatgaagtgaacaagcttctcttgtttctgattcgtcgtaacaaaaggagattgcaacgatgataaccgtcgcggcttaaagtctttgagctcgtgatcgtcgtaatctactgcggatgacgacgaagaaggagaagaggaagctggtttcaagtcatcaatatcgtaggtatcgtcctttcgtcctccatagctatggagcttcgaagctgatgagtctaacgatatcctctgcatcgccgacagagagagaaagatgagggaggctagagaaagaaaacttagtgaaggttatggttcgtatcaaataaatattggtgagtatcccataagtaaataaaaagtaaatatgcacacacatgagtttatcatatttaaataggaaataattattacgcgattattatatatctctgtctaataacgagagttgtcgtattcgctactcatttactttggaatctagtaaaaaaattcacaaaaaaagagagatgtatataaatatttaaaagaaagaggttgggatctatagagagtgtagaataactgtaacaccaacggaattgattcggattaatctgattgctgaagtttattctatttttagagcgaatatatatataaatcttatcgtttcaagcaaacaaattattattgcttcacacaaaaataataattattgctaaaaaaaaagaaaaaaaaacattgcataccaaaaattatgattggtgaacaaaaacctaaattatccataaaaagtttgtccgtctcgtctatatgggcatatttcaaggctacaaaagcccagcccattaaaacatttaaaataaaatcttgacgaacaagtaaaatggacggtcaagattgtatcgcagatcaagcaacctggtgctttaaactagaaacggaggatctgtgattccgatgggagtgagattgaaatttctggcggctctttcaaaggaaaattgtagattgtattcaaatacgttgaggaagaaagaaggtgacaaagaggaagacgaagaagaaagttgtagaaagtaatggtgttgtgggagttagctctaggaacagcttacttcttggggattaggcggacttaccggctcgcattgaagacccagcgtcggcttgttagccctaagcatccaaggattcgagattttatgcatcggtgaagtttctttcatctttacgcttttctttttgtggattttgcgatttggttgtttctgatttaggtttgactggaaatacgtttctttgtatatgaattggcctcttcaattgatgaaactgctttgttattgatgtatcgttctgattgtttattgtgtttaggttgatttcgattttctactgtccagttagttttgttctgactcccgtatcgctataaaaatgtgatttaagcaatgcaatgcaatgcaagtggttggatttaagtaaaatcaagaggtaggctagtcctatttccacggttttgattcgttgaacttacttatgtgatttcgtaattctatacattgctcttgaaccattcgatgtgagattcaagagtagagtgacacgaagctatg

SEQ ID NO: 12439 - DNA, 3000 bp, Unknown
  misc_feature (1)..( 3000): cDNA_ID_1395836_gDNA_ID_2214551_Annot_ID_134681 3000 nt of promoter + ATG
actcttttggtgaaactagtctccattatcctgtttttctttacttggaatcaaagagtcttttattgatcaacagccttggttctttgtgaggtttaattcatcagctggaagttattcaacagccttagttttaaaaagcgcgctaatggcgtgccatggcgcatagcgcaccgatgctctaagaatagggcaacaagacgtggaggcgaggcgacatctataatgcgcacgccatacgtgagccttggccgatgcacaaggtggcaaagcgatcgcctcttgtgttcaggcgaaaactcttcgaaaccaacaacagaattctgtgattttagggtttgcacgaagaaatgactaggaggaataggataaaccattttctaaacctagctggttaatacatgattcaatttagctggtcaatacctaatccacgactagaaagtttaaccatgagttataattagcttatcaaaccaaatcaatcctaggtttatcttaaactaaaacggatttgacccttacctcttaacccacgacattttaaccagttagaagatgtaaaatccctaatttttctaaatagaacaccatagacgatataagcttgaaggctaaaaccatatgcagagaatctgttaatagaacaccacagatctaaaaagcgcgcgctttggtgagccatggcacatagcgcactaaaggactctctgagccatggtgcgctttgtgccatttaaaactcagattggtagtcaattctcaaattatccaatatacaacttctttaacaattaaataccattgacaatgacaacaataacagaaaatttcttcaagagcattcgtttgtaggagagagcaaaaagcatgtcttgacactgtttatgtaaactgtggatgaggtccagtgtcagacgatggatcccatcccggcggttttatattgggccaatcgccacggcatcccaagcgtatgtacaaactcttcttaccttcaatatcataaaagacgcatttaatctccaaaacatttatcagattaaagcatcaatttacaaatgggtttcttctatttattacctggaagtcccttgtctgagatgatcagttgcttaagtgcactcaaggaagcctgagccacgctctttgcatgcgtcgggtcccaaccttggagcttcaccacaacgtcggcgtttgaatacccaatctccctctcttgcttacttctcctcgcttcttctttagctgactcttcatctacattcagaaccaatcttgaatgtataagcagtgattctcgttttctgttcagaagggttcattttaagtggatgtagagagaaattgacctgtggcttcagtctgtgatacccaaacggtaaatccggagtaaagatgtctccactgatcagctctccccgcagctccatgtttacctcccaaagttgagacaacagtacgcacatggctgcaaagacatggagatcagtggctaatcttggtaactggaaagagattgaacactagacatgactttttacctgctcaagctttccaataccgaactctctgcttcagctacagaatccggcccttctgcaagaatccctaaaatgaagacaaacaaaagggtcctgagaagtgaggaagattcttgttagatgatgaccatgatccaaaagcaaacttacaagaatcgattgtttgcttggaaaagctttccagcaattcctttgaatctaaaggactgtacctgcagatcataacaagtgtataagactctgaaatactattcatactgagctcatgaacgaaaggcgggaactgaattcacccactgagaagaatctgaattcatacccaaggccaacggctagctctcgagacactttttggttgatttcagttgaatctccaacaatgtagattgatgcacctttaagaagttgcatcattcctgcagtcaaagactcccaggactcgacaatatcaggccacttcaattccccatccaccttcttcatattcacaaccaactgatcttcgtctatgtacctgttctggatcaaaaccaaaacttcagccctcaaggaaatgtcacacatcacaaaaacaagtcatataatgcaagatttacacgtagctaaccatattgtttcagagggcataatcttctcaaagagatggttagtctctagaagtgtaatcagcaatccattccgcttttctttaacggctaacgatgttccatctgcgtcaacagatatatcctttggagaaagtatctcacctgtctttaacctcaatcttaattccacctctttgccaccatccgtgaactgcatcatatatgaaaacgattcaatttttatctaactaatgtacaacaactacatgatcatggtatatatacatagaccttggaaccagccatttatacgcaattctccattttatcactcagactgatagaccagcaacactagtatagacgtgaatacgaaaattcacctcgtaatcgatagtgctggtggatacggcggataagcaattacatgagaagctattaaaccggtcggggataacattttgagagaatcgccggaagccgcgacgtcggaggctgtgaaatccactgaaaacgcgaggagaggaacgaatccgattcgaagaaaggaaggtcgcttgagttgtgacagggtttagtgaaggagagttgaagattatagccaaaccagaagcaaaagcagccattgatgattgatttcaaactcactcactcagacaaagtatcactacggggataagggaaagagacgaatacaaatcgttataatgggcctgggtcaggcccattagtttaaagtttttttttttttgaagttttaaaattgcgttttttctggggtcatctaaatttcgtgtgattttctaagacttgagtaatcttgttttccgaaattttctcaccaagctcgaacacaaagatcggccatg

SEQ ID NO: 12440 - DNA, 3000 bp, Unknown; identical to SEQ ID NO: 12438
  misc_feature (1)..( 3000): cDNA_ID_2712033_gDNA_ID_2214551_Annot_ID_185568 3000 nt of promoter + ATG

SEQ ID NO: 12441 - DNA, 3000 bp, Unknown; identical to SEQ ID NO: 12437
  misc_feature (1)..( 3000): cDNA_ID_2708951_gDNA_ID_2214551_Annot_ID_185566 3000 nt of promoter + ATG

SEQ ID NO: 12442 - DNA, 3000 bp, Unknown
  misc_feature (1)..( 3000): cDNA_ID_2992404_gDNA_ID_2214551_Annot_ID_185561 3000 nt of promoter + ATG
ccttttctcacaaggatttgtaagaacaacctttcttatatcccaagcaatctacgaaactggtagaatctgggggtttctctaatcatcaaccttcaaatgtcgtcaacaacatcaatagattcaataccagctactgctgttttccctagtgtttccatgcctgtcaccgtagttttgaccggtgttcttctctttgtaattttcgccggattcttctctcttttcttatggcagtttcttctgaatcgattatttactacttggaaccttcaacgaacaccttacggtgacctaatccatgtggccactccgcctgaaaatactggcctcgacccgtttatcatccggtcctttcctgtattccactattcatctgcaactaagaaaaatcatgggacggaatgcgctatttgcttgtcagagttttcagatgaagatacagttaggctcataacggtttgtcgtcatccctttcattcaaattgcattgatctttggtttgagttacacaagacttgtcctgtttgccggtgtgagttagatcctggcatgattggatctggaaggcttgaatcattccacaacacagtcacaattactattcaggacataaaccatgatgaggaaaatcctccaaccgctggttcaagcaaaaggctaatagaagcctcggcttggcgattctcgaggtcacattctactggacatttcatggttaagactacggatgctaatgtgaagtccaaaagaaggcattaccaaacaggaagctgtgtctcgttcgacgaacttactcggtatgaaggagcaggatggcaatggcttggtgattcatcacacattagcaggattgaagtatagtttactgaatttctgttacatcttcattattgtgttctttgtagcagtagttatttcaaaactgtaataagatctctagtcagattctcatgctcctatcggataacagagaaaataataagagtcactccacaatgttttcttcggaagtgtttttgtcttctacagtgtctccatcttcagaagcgttgttagcttctacactgtcaccatcttcagattcactggcgcttctcagactaaactttagagtgataggtctacccattatctcctatagaaaaaccaaattgtaatgaaacactttacatgctcaaggctaaaggagcaaactttatattaatatgcttggaacttcataccttcccattgagttttgtgattgcattctcagcttcttctctagtagcaaatgagacaaagccatagccagaagatctaccttcggggtcagcgaaaacaacccgagctgagaccgggttgaaatctgcagcagtgaaaagctctcggagatgtgttgatcttgctttccaagcgagattagatacgtagagtttgtgacgagtgtctccaggggcaggagaaggaagatcgttcggtgatttcggagtaggcttcttgaaccttcttgcaaagcttacgctaatgatcctccctgacacttgctgaaaacaaagaagatagaagcttaaacatcaaaccttagctaacaactcaacacaatgtatgatttagtagtttgaactatctacctaaaaggctttgaaattaaacaaacaacactcaatcagaaaagaatctaagggatttgagcttacaaaagtatcgaacttatcaatagctgcttgagcttcttctccagaagccatagttacaaaagcaaatcctcggttctttccatctttttgccttataatctaggaaaagtttataaattgaggtaaggcaattgctagtaataacataaagattgaaacgaaattgagaaagaagaaagacctcgacattgttcacagtcccacattgtccaaagagctcggaaatgtcatttacactcatagaccaaggaagattgaatacaaaaagcttccttttcagatttgaattctgggtttcttcagtcttctcctcctgcgacgtttcttcatccgccgatgtttctttctccgcgacggaacagagtacggagacgagccgccgtgagttatcgctgccggaacgtagagagaagacgggagagagattgctgggaattcgaagactaagggcagtaagttttaaggaagaagagcgtttagaaaagagataaggttttgaagaggaagaagaagaagagaaggagaaaatggagagagaagcttccaaaaccgccattgttagctttggcactagagaaatggattagaccgagacaaaaggataaaactttttgggccggtttggttattcggaaaaaaatgaattgtgaaccgggtctaccaacttcggtttttgaaggtaaatggcacgaggaacttaaccgtatatcatgtattttttttggtataccaataaattccaatccctccacattgcagtcaaatggaagaacaaaaaagtgatgaatctcatgatttttctctttgaagtcaaaactcgaatttgactaaaactgaatttgattggtgtatattctataacaatgtaaatacaaaagtttaaatttcaatattctaaataaataagttagtaaattttttttgagttttgagacatttggtgaaatacaaaatgaagagaccaagatttcaatcaatcccaaaaagttaattaatcctaagaaaagtccagccagacgtctccaatccatcaaacgatgtcgtttagtaacaacttgtagtcttgtacacaccaaccaaaccatttcctatttatttttcacaaaacgaaaaaaaaaaaaatccaaattcgagaaagaagagtccaacacaaactcggagacgaagaagaaggagagaagaaaaccattaagccattccttcttccgtatcactctgtcaccttcaaaatcctaaaccataatttttccgaattcgttgtggaagagactgcttgagtgagtcagaggtgggtttacgtgaggtattgctgacaatg

SEQ ID NO: 12443 - DNA, 3000 bp, Unknown; identical to SEQ ID NO: 12435
  misc_feature (1)..( 3000): cDNA_ID_2708937_gDNA_ID_2214551_Annot_ID_185560 3000 nt of promoter + ATG

SEQ ID NO: 12444 - DNA, 3000 bp, Unknown; identical to SEQ ID NO: 12434
  misc_feature (1)..( 3000): cDNA_ID_1024045_gDNA_ID_2214551_Annot_ID_185559 3000 nt of promoter + ATG

SEQ ID NO: 12445 - DNA, 3000 bp, Unknown; identical to SEQ ID NO: 12433
  misc_feature (1)..( 3000): cDNA_ID_3025237_gDNA_ID_2214551_Annot_ID_185555 3000 nt of promoter + ATG

SEQ ID NO: 12446 - DNA, 3000 bp, Unknown
  misc_feature (1)..( 3000): cDNA_ID_1807526_gDNA_ID_2214552_Annot_ID_134693 3000 nt of promoter + ATG
tctttgttgatttactctaatctgtgaaattaactaactataaaaaccagcatcatgttttaatctactaataaagaccattcaacatattaataaaatataatccgatggtgacgactgatgatcataatactagtagtaatggatcaatcaagaatcctctttaggttagaaaaatagactaataaccaattatagagttatatttaagctcaacaaaacccacaatagtacattctcgttggtttcttcttaatattatattgttgcttgttttgtaccaacaaaaaaagtacgaaccacacactttcgatcgtgattaggcttctttcaacaaattttgattagtaatataattaaactatcatcgtctacataacatatgttatccgtttcactcaacctatctatgttatctctttgcgaatctggcgcgggtacttcaactagtgtagaaagatactattcaaaaaaaaaaaaaaaatctaagatcacgagattaaacatgatatatatatgatgtttaacaataacaaagcggtttgttcaaaaaaataaagcggtgccggtatgctagagaggaaagccttgataattacgaccacaagttgtatgagaaaaattattggaaccttttgtatttcatgaccctgagaaaaattgaaaatttgacttaacgtggagtttgctagagaaaatgactcaacaaaattatatccctagctttgttttacgtcaaattgttactctcttttcagttggttcgctagtttgatttccggtattaagttactaaaagcacataatgatatttcagttggttcttggtaataagtttacacgagacttttgtggtattaaagtacataatgatcttttaattagatattattaaagcaaaggtgaaaaaagtggttcgtttactgtttttacaatgtgacgactgacaagaaacatggacgtgttaggttggatagatagctagatactatcacggggcattgtttgattctttctggcgaataatatacacttattttgttctttttatatataccaattgaatcctataatcaatataatattagtccactaaccacgagcactttttgcagattgactttccaacgatttataatagtaatatcttcataaagaaattcattagcattctacaattttcttcataaactggaagtgacaacaatcggacataaaaatgattcaacttttccatgacaatttttgtttctttggtgaagaaattaatcttttctaaataaactttttttattgaccaaaaacaatgtatcttttaaaagattgcacggattctatggttgaatatattctagatttagtttgtaatagcatatcgtcaactagacataagtctatattcctcactagctcgtgttcctttcttctttcgtcacggttagttcagatccggacaagaatcctggattgacaaaattttggaaatggcttaattaaactattgttttatctttcttacaattctttgaaacggtgatatttcatataaaattctcaaaatttttaaattagtgtcgttaaattctgtattagcagctcaaccagttaaatataaagccacgttttgagagaatcggattatatctgaaattcgataccagttacgaagattatattacatttgattttgaagttgtaagataaaaaaaattagtgtcattattgtatgaacttcgtgaagtttatttatgtgcttcacttttagttaataatgtaatatgtataacaaaaacaaacttgtatgcctatatttagtacaggtggattgaatcgtatcaatgtcacgtaaaagttttatttggtttaatgtctcacgtaaaagttgcttttacttttcaggtgcctagccgtgttcagaaatcagagaccaaaatcttatgggggcaatatgatcaaatgtaatataccaacagttagttaatgcggattgttgacaaagaagaacatttcatgatcggatattgttgacaaaaaactactgtaagccaaaaatgaacaaaagaaattaatgataattaagtataagacttgacaaaaccaagccgacatgagctgagtcaagttcatgtcgtcaatgttatagtgatgattgacgaatatccaacggctgagaatgattggaccgcagtggaatggacttttaactataaaatgggacgaattattcatgattgcttaattgaaaattcacattgttattttgttatttatttatcattaaaactctacttcttttctcttttagtcagttttgataaaattcaaaatttcgtttgttacaatttgaatagtattttaaaatcaataacatcttttttttgtcattctaaataattaaaactcaaaataataatttttaaaaaatattgtttatatatgtgatataatgtggtaaaatacgaatcaatatattttcgtataataaatttatattccttataaattatcgtcaaacttcatattaccaatgtttatttttgggttaaaatctcacactattttttttttatacttcaaaactcatatattttttgaacaatcatgcctccaatatagaaaaaacaaaattgacggatacaaagaaaaaaaaacaaatttgacattgaatataaatgcaaatatttttttgaaaaagtagaaaaaataaaaagaagatggggtttaaaggcgggaccggtccgtcatcaatgccacctccctaactcctttctctttctctctttcagctacttgcaacaaaattgcaaaattgtcgacagaaacttctctcaaatttagttcctttctcatttatccactgctcttaatccaacttcaatatctctctatcctcacaatatttgttctgtttctccttcaactttcaactgataaagtttaaacctttatgctctttactctctgatctcaaaagggttttgtttagttctcctcaaaacc

SEQ ID NO: 12447 - DNA, 3000 bp, Unknown
  misc_feature (1)..( 3000): cDNA_ID_2709449_gDNA_ID_2214552_Annot_ID_134694 3000 nt of promoter + ATG
ttttactgatgtgttcgttggagagtgtgaaacgtgggacagtggtgtctttttttagttcttcaatgttaaatgtgtaatctttaggggtgaaattagaagtttgtttaaagtagaaggagctgtgaagcagatgtgaagagtacttctggtttcagcgtattatagtaaaagaagcagtaatagttgtgtttgtaatgcttcttgtagaactccatattgtaatttatatataaatgtgtgtatgtttatggtttattatcttctttttttctgaaaagtaaacatcattttgttacaaaccaaattttgatattaaatggaaaaaacttctgaaatgatagagaggttatattctactcttttatggaaattgcttcaattttctgtatttgtttataatggttgtttgacatttattatgtatttttatacttaagaataagggtgtttaatttcggttatgttaaagtggtttgggtgggggtattcaattcttatggttggttactatacttagaaagttagaataaaagaaaggaaattaattgattggccataaatatttgagttatctaaagaaaaaggttgggtggaatagtgtggatgataagaaaaaataaaagaagaagaatcatgggattttatgggatttcttttaaaagcctaaaacaaaatggatgatagtgaaattttgtacacaagcaatgagatgtaatcacgaaaagtatttaatgttgcctgctgttttttctttcttgagccaaacccataccatccaatataaatagcttttgcatgtatttataatatatttgaaacgtttttcatcaaaaaaaatcatgaattagataatagtatttgtattatgcgacaatacatatgatgaaaattaagaaaaattaagacttatttttctaataattttattaggtgggacatgtaattttattaaatatttttgtttcactatatgagcatgcatcatagacttttacatcattattaacttgttaattattattgtagtatttatcaaaaatattatataaaatagtttagctggtaattaataaagacgcacgctcaaaatttcgttccaaatttttagttaacaaattattattcacctatataattttgttttcttgtcactgatcaaactaactaaagaaagaaaaatatttgggttgctctttgtataatccattttcatgttcccatcaatttttgtagtttaaatgtgtacatggaaaaaagagaggagggaatagatagaaaaaagggtgaaatcggaaagaagctatatatgagagtcacatcaacgaggaaggtccattgggtacttaacgagtagaaagaagaagacgagattcgcacatgggtggtgggttctttttgttccctccctaggacatctatagtctcttccattcactttaaacaaatatgaaatttaggtttcaatgagaaatttgtaaacaatatcgtaaatatgtgtaaatattttgtagatataaaatcttaataagtcatcaatcatttcttcggtaaaagtatctaacaaataaccaaattttggaaaaactctttcaataacccaataacccacacctcctccctcaccagccaatgtcgcaaacatcggatcttgcattatgtctgtttgtggcgtgacttcaactgcaccaaccgtggaatctacgatggcatgatcatcaatggaagtgtgaatagtggtgttatgaatgtgacgtcaaaaatataaatgttatatgatgtttgatggtaaaaaagtttatggattgttaatgaaagttttcttttgataatggcagtagatgtgaaagacgcctgtaaaaacctaactagccatctctatatgtgatctatttatttttagttatttgtacattcatttttggtatactaaatcaatttctttgctcgtgtgtgaacaatataatttcattgatgtgtagaacatttatgtgaaatttactagaaaccaaaagtccctattatttctcctaactacaaacaaacctctaatatgtgtttcttttttatttatgagaaacctttgctacaatcctcctcttgcatggagaaatctattccccattcctcttatatggagaaaacatttgttttgatgagttaaactttggactgagttatattggcttagttttgactgttccaagatacaatttgagtttgtaaatagcataacagtttttggccaaaattcttcctttttctacaaaatgtctcacatgttatttacataattatcaactgatgtttgaaaccagtaaatgaagtttgcattatttaaattaacatatcaaaattatgtatgtattctctgacctatatacaatcagaatttttaaaagtgaagtccgagaaaggcccatcaaatgtccatgttccatatacgaaagttagttaggtgagaaaaataaaaatgaatcgaccgatcaactaacaacaacaataaaactagaactaatcaaagttggtcaatcgtcgagactggttcaaaatcttggtgcttcatgaataatattcttatcagaaaataatttatatgtatatttatggttacctaaaaaaaactcgtgcattactacttaatagataaatatattttatttatttttatagaattttttactttaaattcattaatgtggtcgatgtaaactattagtaatcgaattttctatatcacacacacaaaaaaaaaacatttatgcgactaactcgttctgagcaagactattactgtagtacttataccaaagttaggtcaagtcaagaaattttagatctctcggaatcgacgattcttaactcgccacgtcatcaactacgagttaaaacctgtcacatcagatcataagccatcttcaaagtgtatcatcttcttccaaaaagtcaccatttttattttcgttgactcggtcggatttggggaagaagaagaacatg

SEQ ID NO: 12448 - DNA, 3000 bp, Unknown
  misc_feature (1)..( 3000): cDNA_ID_1809029_gDNA_ID_2214552_Annot_ID_134695 3000 nt of promoter + ATG
atttctatgttctattttcttgcaatggtaaaagcttattattcttttaagtagtgttaaaaaaaactagaatccaatatctaatgtttaattggagcctagatacatgtaggcggtttaagtgcttaaataaaaaaaaaaatttagctaatttctgataatattataaagatattatgattcataataaacttaaaatatttcaaagtttcgacgataaattgaaagttgtctagatctacctaatgttcttaaagccgtttaataacaaaaccactaaaccctaacacttagaaaatacttgctaccatatgttgatgcatatataacatcatatagaccatttaaacttctttttaaaacaatgcttttatgatagaaccatgtgatttttcaaactacagtgttcttcctgttactaaaattacaataggctccacaacatgttcagcaaacatttttagatgtcaaaaaagcattatgcttttagccataatgaaagaaaataaaagagccaccattaacaaaacagagatattggcattgttttggcgcgtgcggctcgagaattcagtatttttctcaatttgtctttggatttcaagaaacattaaagtattaacattagtttcgttttttaggtggtgagcttattatgtagtaattttaatgtttcagtttaaacaaagattcaccggtttacatgctccggtgattacggtaatcaaaagggtcccaaagttatacgtcggacaagtacacttgataggattccatgtggtggtcccttatgttagtcatcactcatcatccaatcctagccttcttcaatcatacatattacatactcactcgaggctaaattcgtcaaagatgggtttgttttttaagtataagatgatataaaatgtgacaatgtttgcatattattaggttatctccttttgttagtcaatctatctcaattctagatggtatgtatagtcctactcttaccaaaccacacatgtctgattttgtacgtatatgagtattagttgaattaatatttaaaattagtgactgaaaaaaaaatagagtagatatgaaaaacaacatagattaacgatgcattaaaacatttttcaaaatagtaattcatttgtttcagttttatccattatattctacaactcattgttcgtttagatatccataataattttttgcatccagtttagggttgttactcgaggacttgttcaatccggtgtcgttcttgttgctcatgtagcctaatgttgagaaaaccattgtctcgagccaaatttactccaatgtgtgccaaagttggtctctagagaagacatgttggagtacttagattaaagatctcatgtatatcaattcatattacttgtaatctttagattctccaaacataggatctcaacttaaaataattatggttggaaagcttgatcctaatttacaaacaacaaaagttgaattagttctcgaaatcacattgcagtgatatttacgtgtgaattttttagggcgtatcaaactttgattcacgaagtttgataattgttattaatttagcttccaagtaacatacacgtacggtacgtgacgtaccctctctctatttttttcttatgtccgttacgtacggaggaccaatcatgtatcttgcaacaaaggggaaattatgcttaagaaaggtattaggtgtgatactaaaacaataattttgtctttgattttaatttaaggtactataacaacttctttatgctaatgtatattttttaagtagcgggacttttccatgagtatttttcactgtatcaagtagaaaactcgtacacccgtgaacactataaaatatttcatcataattacgtaatatctacatcattagaacattataaatacaaaaataaaatatttccaattctttgataataccgaaaaatatatacttatgttatttttagtagttaagtgtccatattcagttattcacttcgaactcttctactgcatttaattatttttggccatccataaacgttttcagacaagaaacttcaaaattctatgatctcgaaaaaataatatgaatttccacctacaattctcttttgagcaaagaaaaaaaaaagtgaattgaggtctagctttttgcgtatataaaaattgaataatttggcgaaagataatgtaaaatttaccaaattgcattaaatatatgataaagaaaatattatttttactgtacataagtccaatagccgaaatgatgatataaactaataaccatgatcataagctataaccgtttctttagaaactaaaattaacatagccattactagaataccaaattcgtattacttaaattcaatacacatcaatagttatcataggtccatagccagagacgatatagcaattttaaagggcgcaaaaattttgatagcaactaaagagtggtcgtcccaacgcgcttcaatggagcgtggtaacatctttatcagattttagtggtgatataacatcatctttatccgtacactatgaactatgattgggcagtgtgaaccacacgttactaaacgcaagtggtcttagcaataactatattttggtagagacacattgagggaaagggcatacaccaaacatttaattatggatttgtacgcatgactttttttacacatacaaataattgtaaaacttttgtcaaaaacccaaatcgtgtttagtaatctctattcataagctagagaactatgacccctagaggttaaacttttgtaatgataaagaaagagaataatacaaagcaagagaaataaataaatgcttaagtcccaatttatatatagtcacctctctatacccttccctacacacatggagacactccaataaactcttcttctgcctcctctgcccatttctcccaatctctctctattttctcagtctctctctcagataatg

SEQ ID NO: 12449 - DNA, 3000 bp, Unknown
  misc_feature (1)..( 3000): cDNA_ID_2708977_gDNA_ID_2214552_Annot_ID_134696 3000 nt of promoter + ATG
ctgaataattaaagtttcctttgaaaacaatgtcgaattccctcgtctcgttggctgcaagggtttgtatctcagcgaaatgaagatagaagtaaacttcagcgttagagggtcttggtttccaagttatgattagcggtgcactagcgtttttaggcgtggcagcacttttgagtgcagcttttggtatctcaaatgtatctgaattgtttatattgagactagtcgttatatagctaaacgaagagctgaagaatggataccagacacgatcataggagtcatcatcatacctgcaaataaattgcattaggcagcataattaagcaaatcaatccttgttatttgttaaaaccgatttaaatagaaaaaaaatagctgacacacacaaatctaatctcaatgcaaactacatttatttcatacacgaatcatttttgtttacatgtttaaaaaaattgtataacgatatgatagtttgataataaataacaaaaaaaaaaatgtagaaaattgattaaaacaaaacatgtcgtgcggtgatagttgcaacttgtttttttttatccaagttaatcatgaataacgatgtttatatactaaccaaaagtacaataatttatgtataagaaaattgatgccatgtatgattaatgacagaaaactcccacttattgttttaaacaaagtcaactaattaccttatttcgctatcagaagtgctgcaatgaacccggaaagagttcctcagtgagcctgaatgcgtaagataagtatcatttctcattggtcgtagttctatagatgatattattggcgaggttggtcctgttttaacaagacaaatatccaaagagcttgacctcactctgtgtatgatctcctcgaatgtaccattttgtcttccttccatatctattcttgcccacttatcaggaccaagatagagatcaaagtttggataaatattaagaccatcataatttccatatatgaaggtaaccaatataagataatttgtgccacgagtgacattcagactaacaattacgctttccttccggaaagtatcttagagtcaaatatggttttcggaatattttgttgagctctttatcgactctaccactttctccagtctggataaatgttgaatctgatgtgaatgttaatccagtagatggatcactataaggagattcctcaataggaaatccgcaatccaaactgatgaaacctgttcaagcataaaaaggatcgacgaagtttaaaaaaaaactatatatagaagatatatcaatttaaaggatggatgatcctcggtgaatatctactaaagagtttataaattattaccttcttgtttttgggcgccaactataacggcaaaggttccaattatggccaacaaaagatggctcatcatcttcttggaaagctaatatggaaatcaagaacataaaaaagacttgcttagtgaaaacaaggagctacgtaaatgagaaatacctcacatacacagattggaaggaataatacattaaagaaagtcaacttaagccagacatgaagattgaataattgcgagaattgctttatttttggtttattgtgtgaatttctttgacatgttccaaccccaacttgtgtttaaaataataggttatgatcataagactccgacatgtataggaatttccttgtattaaggtttgtatatgtcttctttaaacccttgaccaaacataataaatcttcgattgatcgttagacttggagcacaaggatataacaaggtttgatttaagtaattagtttgaacccggtcgttacaaaaaaggatttactacatatgaaaaacaattacatattacaacctatttgaaacattacgtctgattcacataaagaaacattacgtctgatccacaataattatagacgtaacttatgtaacttgttgtagaataattatgtaaaagagagaattcgtatattacaacatggacaggaaaaaataaagataaagatcattttgtttgattcaatgatttgcttcttacaaactcaggtatttatacaaataatgtgcatcaaggtagccagtactaaattttaaaaatatatttacaaccacactttaactattacaaacttgttaaaaaagcaacaataaaaaataagaattatcacataattaatatttttatatagttaacacatacagtttccgattgtcaaagctccattaaaaaagcaaattgtgaaccaagtggataatggtccagtagcgtttggaaatgatctttccaaaataaggtttgatctcttttcccactaaatcccacctaacaagggatattaacaaaggttgatgtagaatttcttggttgacaatgtatagtaatactgagaatatgagctataactataagaggccagctatctcttaacgtctatgagtaagccatagatagataatgcatatacaggcaaacaaaacgaatattagggtttgtcaagaaaagactaatcttagtttatttttgaagaccaagaattttacattattgcagaggtattgcgattataattgagtgaaagtcaacaaaatgtattaaatccaccaagttgttgttaagtacaagtcgttagcagaattatcatatagtttataaagctttgacattagatcaacttggcaggttttacattgtttaaacaaagattacatcaggtgctttgatttatgattaaattgctctcttttttccacaaagtggaatataaatgtatatatctttgttagaccattcttcagtcgtgcttggatatgaatctataattggagagtattccacgccaacatgtgttttggattttaattgatcttcatctaaagtatttctatcatttgtactagaaaatcaatatattgtatcatatatttcagattgtctttggtttcaaaaatttgtatgttaacttaacttgaaaatg

SEQ ID NO: 12450 - DNA, 3000 bp, Unknown
  misc_feature (1)..( 3000): cDNA_ID_2712094_gDNA_ID_2214552_Annot_ID_134697 3000 nt of promoter + ATG
cagcggtggaagagttgaccttggagttctaacgagtttcaagtagcacaacccggagctacatttgtgaggtgataggttatatttggtatctgattgtaacatcgtaggactatatgctgactgaataatatcttcttccaattcaatgtcgaattctctagtctcattgcccctcaaagcttggatttcggcaaagtgaaagtacacgttaaccttgtcactgtcgtcatctagagacacgtaaaatctcaatggcaagctggcattttcgggcgtgattcccatcctacttacagcttctggtacttgaaagggactcgaggatctcacgttgagggtggtgttcacatccgtttcaaattcattatatcggtcccatttgcgatcaaaaatatcatcaggatacctaaaaccatttttggagtagccatgcaaaagtaaatgaatcatgttagattgtttttttttataaaagagttgctaaagttgagtttacataccgtataaaaccggtagaattgctactataggcccgccggtagatgaggtctaagggaccgaattgagtcaaatatgaatcatttcttagtggccgtagttccaaggttgatatcattggtatagttgatcctgttttgacaagacaaatctgcaataagttcgacgttgtcatgtaaatgatctcacgatcttttccgaattccaaatcaaccgcaatccacatgttaggcccaacatgtaaatcaaatttgggatatacattaagaccatcataatttccatatccgaaccctgctcttatcaaatagttgatgccttgctctactttcagattatagcagtttcgtattccatcgggaaaatatctcaaatccttgtactgcctgtagatatatgtgttatcatccccagcttcaccacgtaaaccacttaaaataaaatcagcatcagatgagaatgttaatccggttcgtgggtcggtataaggagactcattaacgggtaaaccgcaatccaaactgatgaatcctggcaagatacaaaatgtattattagtgaaaaataatgttttccttttgttagaccatgaagcttataaggaagacaatcaaaagttttggaaaacagagaatcctttattttctttaaccaaatctcttatatctgtaatcgttaatattattttcatggtggctatgcgtacaacaaagtagaaatcggttagtgatctcgaccagtcgagcaagaacactcaactacttggctaatccttaagtctttatgtgtcaaaaactgaacatgaagcaattattaaaaaaaggtatatagagaaacctcgttgatcaggcggctgagcttgaacaagatgtgtaatggccaaagccccaaagatgaacaccagtaaacgttgacgacgaccttccattttcaagttaagttaacatacaaatttttgaaaccaaagacaatctgaaatatatgatacaatatattgattttctagtacaaatgatagaaatactttagatgaagatcaattaaaatccaaaacacatgttggcgtggaatactctccaattatagattcatatccaagcacgactgaagaatggtctaacaaagatatatacatttatattccactttgtggaaaaaagagagcaatttaatcataaatcaaagcacctgatgtaatctttgtttaaacaatgtaaaacctgccaagttgatctaatgtcaaagctttataaactatatgataattctgctaacgacttgtacttaacaacaacttggtggatttaatacattttgttgactttcactcaattataatcgcaatacctctgcaataatgtaaaattcttggtcttcaaaaataaactaagattagtcttttcttgacaaaccctaatattcgttttgtttgcctgtatatgcattatctatctatggcttactcatagacgttaagagatagctggcctcttatagttatagctcatattctcagtattactatacattgtcaaccaagaaattctacatcaacctttgttaatatcccttgttaggtgggatttagtgggaaaagagatcaaaccttattttggaaagatcatttccaaacgctactggaccattatccacttggttcacaatttgcttttttaatggagctttgacaatcggaaactgtatgtgttaactatataaaaatattaattatgtgataattcttattttttattgttgcttttttaacaagtttgtaatagttaaagtgtggttgtaaatatatttttaaaatttagtactggctaccttgatgcacattatttgtataaatacctgagtttgtaagaagcaaatcattgaatcaaacaaaatgatctttatctttattttttcctgtccatgttgtaatatacgaattctctcttttacataattattctacaacaagttacataagttacgtctataattattgtggatcagacgtaatgtttctttatgtgaatcagacgtaatgtttcaaataggttgtaatatgtaattgtttttcatatgtagtaaatccttttttgtaacgaccgggttcaaactaattacttaaatcaaaccttgttatatccttgtgctccaagtctaacgatcaatcgaagatttattatgtttggtcaagggtttaaagaagacatatacaaaccttaatacaaggaaattcctatacatgtcggagtcttatgatcataacctattattttaaacacaagttggggttggaacatgtcaaagaaattcacacaataaaccaaaaataaagcaattctcgcaattattcaatcttcatgtctggcttaagttgactttctttaatgtattattccttccaatctgtgtatgtgaggtatttctcatttacgtagctccttgttttcactaagcaagtcttttttatgttcttgatttccatattagctttccaagaag

SEQ ID NO: 12451 - DNA, 3000 bp, Unknown
  misc_feature (1)..( 3000): cDNA_ID_2712082_gDNA_ID_2214552_Annot_ID_134700 3000 nt of promoter + ATG
ctatttacaatttcaaaatatgtcatattcattgtagacttgaaggaaatccagatttgtgcaaatccagtttttgcaataccgaaaagaaaaataaattcttgctcccggttattgcatcagctgcctctttggttattgtagttgtggttgtggctcttttttttgtcttccgaaagaagaaggccagcccttcaagtaagttatgagccattaataatttgtttacctgctataaagcaatgcatatagttagcatataaccaaatatactatcatatgtagatctacatgctccaccaagtatgcctgtatcgaatcccgggcacaatagtcaatcagaatcatcattcacatcgaaaaaaattaggtttacttactctgaggttcaagaaatgacaaataacttcgataaagctctcggtgaaggaggatttggagtcgtgtatcatggttttgttaatgttattgaacaagtagcagttaaattgctatcacaatcatcttctcaaggctataagcatttcaaggcagaggtaccctttttctagtaattctcaatagatatccaattgatttgtatatctctaagagtgttggatgatggatgattggttaggtggaactccttatgagagttcaccatataaatttggtgagtcttgttgggtattgtgatgaaggagaacacttggctcttatttatgaatacatgccaaatggagacttaaagcaacatttgtcaggtaatatcacatatataattgttttcttaataaaacctaaccatgatataatttttttttctgaataattaaagatcataactaaattgatatgaagtgtgtttaattgatacaggaaagcatggcggattcgtcctgagctgggaaagtagactaaaaatagttttggatgcagcactaggtattcattaaactttaagacaaatgtttagttaataattacagcttttatgggtattagtatggcctcgaccggatcagaaaggaaccatatgatgatatcgaaattaatctccattttccaataaacgatggtattaaatttaatatgtaggattggagtatttacatactggatgtgtaccaccaatggttcacagagatatcaaaactacgaatatacttctagatcaacatctccaagctaaattagctgattttgggctttcaagatcttttcccatcggaaatgagaaaaatgtgtcaactgttgttgctggtactcctggatatcttgatcctgagtgagtataacttcatatgttagttccaaaatcaccattccttttttttactttacaatcacaacaatttcttgttttgcaggtattatcaaacaaattggttgacagaaaagagtgatatatacagtttcggaattgtactgttagagataatttcaaaccgtcctataatccagcaatcccgtgaaaagcctcacatagtggaatgggtcagttttatgataacaaaaggagatcttagaagtattatggatccaaacctccaccaagattatgatattggttctgtctggaaggccattgaattagcaatgtcatgtgtgagtctttcttctgcaagacgaccaaacatgtctcgagttgtgaatgaattaaaagaatgtcttatatccgaaacctctaggataggtgagggacgagacatggaatcaaaaggttcaatggaattcagcagagacatttataatgaggtaatacctcaagctcgctagctcgtcaaaatttattcttgctggtttttcttctcatgaatattcaaatttgtgtgtttcaagagtgtctttcgccaataataactaaggctttcactaataacatgtaatactgatgttgaattgtcgtagtgtgatatatattttgtgaaatacatatggtgaaatttattgaaattatttcatgaatttgtaacccacaactaattctcgtctttgtttctatctcaagaaatgcattaggttgttcccactttcggtattttgaaaaccaaaggaagagttgaatataccaaaacttatgtatttccttcaaaacttaagagctgtttatatttccttcaaaagaagataaataaagaagatataaatggtctaataaaccaaaagttggtcaaaatttagtctaaatataaaacatgaacgtaatagaacttgtttacaagcgtatatctcgttgatcctgagtttaataagatgtataatagtaaatgttacgaagaactccaataatgaaatatcacaagacagatttatcttgtggagagggttcatcatgtaaatgtttttttttttttcaccatgtaaagttggtaattcttgttgtatattgttttaacgaagacacacttcgacctagtctagtacacaaccagtggagatttaaaacaacatctatcattcaaattggacaaagaaataaccgaatccaaggaaccttgcattggatttaggatttatgacaaaaattcttcgcaaaatgtttccacgccaacctctctataaataaagggccacaagaacatgcatgagtgagaaaaatacattttcgaggcgggaaagatagactaaattttaattttaattgtaattcatagcttgaaattttaaaattatacagctacttggctcctttatcaaacaacgtgcaaaagtatagtgattttaagaccacgattttttgtgccactagagacgtgcttgcatctttagaaatggacattttaattttatgggagaactttccacaaccctaactgttgaatatatgttctaaatgctaattttatccaagtttgcctcttttatttatttttgtatccttttaaactctttttattcgttcatatatgtttcctttccggctgctacatttcaagaggtcgagcagaccataactctatcatttatcttagttaattcatatacataggaaccttggtagcttcatctttcaaa

SEQ ID NO: 12452 - DNA, 3000 bp, Unknown
  misc_feature (1)..( 3000): cDNA_ID_2708973_gDNA_ID_2214552_Annot_ID_134702 3000 nt of promoter + ATG
aatgaatcttattatatagttgtatttgtatattagtagtagagttgaaaatagaaaatattcctttctgtttcttgtaaaattcagaaaatatgttcctttccttcgaatccaaatgttaaactttgacttagcttctaaaaccgtcaaacactttaaaataatcgtaataatttaacgtataattattatagacaagatcttgaaacgttagagaaaatcttatcaataatttcattttactcgagattaagtttgcaataatggatccaaaaagagtactactacaagtatttcttgcatcatttgtccgagagcgagagatgcatttttttgtccaaaaacataaagaatgtaaagatgcattttagctaggggtgttctagagttcagttcaagttgtccgattctttatataaaatgaataatggtattcaaactaaaatttatgttcggattcatattttagtcaaaatataagcttaatttttgaaatttttgaaaaacttcggtataatatcgttatttttccgacttgggttttcggatatagaaaaaaaaaatcatataagttagattaagatatatggttcgtttttacttttcagattgagtattttgttttgatttagttcagatcagattcgtttatttatccggattatactcccaattttggctttcagttctcaagcattttgttatgttatctaacattcattgatatcaaaagttccatctgaaagattatgagagaccatagcacaaactgttttgattttatttttttttcaattttgatttctacttaatacattttgaagaaatatagatttcaaagtattgtagatctcacatatgtagcttatcatgtggacaaggataaccacacatacatgttccttgaccaccgtcacggtcacaatcgccactagcatcttgtccaaacttagtcttgcatgacccactgcaatctgtaatgacaccacacgagccaagaaccgccatgcatcccatattttgttcaactataaccaacaaaaccgttctatatttagataacaaaatatttactagaacttaggagatgtcattacactgaattacaatatttctgctacatgctaatgaatagagccgacgctacaaattatagtagatcatatgtgaaaacttttaagatattggtatgagcaaaccattgatacaaacgatactttatgcatggctaaaatcacaatggactacaacatttagggcatatgccaatgaatattgtgaatataaaatttttgaagaaaaaaagcttgagataaagaaatcatagcaaggaactaatataaccctaagagtatatgtcaatgaagaaagcccgaaattaaatgtacacttaagaaaaagatagcaatggattacatcatatagggtataacccaattaatatagctacaataaaaactatgtttataagaagaaaagaagatgattgaatattttgacgaataattctaaagataaaatgcgtacttaaggcgaacataacaaggaaaatgatgggaaaaacaagtgtagaagctgccttggccatagctatttttcttctttgttttcttaatatgtagagtagttttagttgataaatctgaaaatttgggaaatatatagaattatgaggttcaaggaatctcgaaaaagaggatctggcatcaattaaattacatcagttataaacgacgtaaaagtaggaaaaagaaaaaaaagtttagcatcatttatgggtactttagataatggtaactgataaaatatctactcatttattgtatgatactattcttagtgacatcaatattcgtcggaattattagcgctaaaaataacagtgcaaattgaaacttacaaattgtcccgatgcattcccgtatatggagaaattttgacatgataataaatttttaaaaagaacacactatcttctgctaatatagtaacatgacatgataaatcttttacactctttgatgtacatatttcttttttggacaataattatttttcggaaggtcgctcacctaaaaattattccagctcaaacacgtttaacttcagagtatttttgagaacatttgaccgaaaagataaatgcattttagtgacacccgaaaagataaatgtattttagtgacaccaatgaccaaattgattcttttaaaattcttcgcatgcatcactatattcctgaaactggagtgttataccggtgacatctctggggaaacatcaagactttggccagagaattagtggtggaaaaaggacaaccaatggtagaagcaaagagaggttgaatcagggagtttgtgattaactggagtgagattaagaaactgaaacctaacaataataaggaatcgatcaacaatggtgatgggtcattgactattggtttcatatattagagacgatgatgctttttttttggtaaaaaagacaatgatgctttctgttttgggtttgtaattaatttctacccaaataattctttaaaaatctttagaattaaaaaaacagatttgtaaatcttttacattccttaaaaatctctaattagctctctaattcaattcaatctttgattcatttaggtgcctgaacaaatattaaggacacatgtacgaggaaatcttgattattaacaatagctccatatgtaattaattatcgctttattgaaaaaaaaaaacaaatcttttcattaatcactacaaaacctttgaacgcttcaacaaccatcccaatctcaccatctctctcacagcgtccattcatttcctaaatctaccagagatccatccattttcccctaaatccatccttcagatccagaaatcaacacaatctttaacgatttcttgcatcacaagcaacaaatcgggtattggtaggtaagatttggttaattaatgcatgagaaaaccacataggagaggaggaacaatg

SEQ ID NO: 12453 - DNA, 3000 bp, Unknown
  misc_feature (1)..( 3000): cDNA_ID_3025259_gDNA_ID_2214552_Annot_ID_185609 3000 nt of promoter + ATG
agcaagtttcaaacgtttcttaaatcgtaactcaatgtaagtatgtaacaaaattacacaaacaacttttctttggtatatacccaagtataaagtgtctaacaaattttactatccgtacttaaatttgtgattaaacatactttgttcatcaaagtttcttgtgcaaatctttttaagttgttaaagtgttgaaatggacttgacgtagtaaaactggtatatgcgtatagccaaaggatttttttacttttattatacgtgtcaattagtaaacaatgcaacacgagtatcaaaaagagagatattgtgtgcataagaaggtgcgttcagatgttgaagctagtactatgttgggtataagaaattaaattacagcttagaatctaagcctttgatgttttaaaaaaagaattgttaacttctcttcttttttgtacgagagagtaattttatataaggaaaaatatggtaaaatgggattagaagaagtggtaaggtcacatggaaacatgtgtaagctgagtaggacatggtcaggtcggctggtgggtcttaatttttaacgcaaagccccaccattttcacttcatttatgtaccctaataaataattcacgtaatccttttgaagttctgttttggaaccaatgatttggaatttatgaaaagaatcgagttcaacgaaacatgtaagagtatttttgtggattttctctctaataccgttttctttttttttttgtcacatcatccatatgtttatttgtgaaatttcgataaacgattagatagtggctgtatatgattttattataagagacttccgcaatgttgcaaggaaaagtattctaaaaaaaaaaagtagtactctaaatactttctgatataacttaagacttttgttaaaaatttcaaactcaaaatgatgcgtatcattaattctatagttttaagaagagaaaatataggatatatttaagaagacaaaaatgtttacatacacaaatgtgattgtaaaagtcacatcttactcaaaaagtaataaaaaataaaataaaataaaaatatatggagaaaaaggacacgaatctatataaatagatgcaacttttttaaagggggattgacaaaaaggcactaaaaaaactctccttttgacgggcgatgtctcaagggaaatcttgaatgtgactcaaagcgaagagatgaaacagctcgaaaagatttggtttgagaatcaaaattgtcctcatacagacaacattgtcgtcccaccgtctcaaccttaatagcttctggggtctgtttttaatagcaggccttgcttcagtcatggcacatctcgtcttcatagccaacttcttgtacgaacataggcacacgctaaatgaggaatcgaaaatttccttttccagaaagctaacatttttgcttagaaactttgatgaaaacgacagaaaatcgcacatgttcaaggagagtgcaattcataatgtgagttcaccttttagtcaaaccactccaagaccttcaacagtgcagatcacaccatgaccacgaagtccgtcgcaaaatatgcagtttgagccaagatgtgtatcttttgaaagcaaagaatttttcactccccaattagaatgtatagctaaatgataaatagaatttcaaaagttgttgaagcattttgattacttagctaattttactgacttattttcatatttttgtgtgttagtctcttctcaaatctatatataacccatgatatactctatatttagcactttatcatggttattaagatccattttatggtgtttcattagtattttcattgtggtttgttgcatttagtgtccaagtgagtcttcttgcattttagaagtcctatagttactgtgtgtattttgtgtctcttttgagatatttcatgttaaaataatggaggacacacatttaaatgcaaagaagagaattgatgattcataacctatctgaagtctctcaaagatcgactcggatgaagttctttcattgagatttagctttggacctctttataatggttataggaaattgaaatagatttccaatggaggtgatgtttcatgggtatgtgagctattggtagagatttatggctgattttcgtatacatatgtcaatctatcgcagaaaagaaactcatctagaaacctctcttaaaaacggacagaagcttcttcgacctccaccttcggccccaacaccaccaaagcccctctccgatcaccatcgtcgtccatgacacaaccgaagccatctctttttagctttgatccaaattgcaaccgggttgtaacccggtttatctcgtcgatccggtcagaacctattaagcaaattttagacatttgttaataataaaattttcactacaaaaaaaataatatagtaattttccaaaaaggtttttggttcgtgttacattttctgagatgatccatcaacttacaattggcattttctttctctctctctcttagtaggatattcactagcgtaaaatcactcgattatgaccttttatgtgtatgaaacggtcttgctagctggaagaaaaatattaatcttccgtcaaacaagtaagaagactgaagttggagatttttcaaagtaaacgtatgtagcctaaaaaaaaggagtgacaatggtagagaataatgacaaaaagcgagctcatattatcgtccatacaatttttttctgtcactttcaaaccttaacttcgtttgttttcttttacattcttgttttcatattttattttatctctatatatgtatatatatatatgtatgtgtgtgtgtgtatatatgcaatagaacaataaaaaagaagaggaagttaaagaatgacataaagttcctcaatctggatgaaagtgatgaaccctagaaaaactaataatacctttatgtattactttgtcctgttcgtttgtggttttgtgttgatg

SEQ ID NO: 12454 - DNA, 3000 bp, Unknown
  misc_feature (1)..( 3000): cDNA_ID_2712076_gDNA_ID_2214552_Annot_ID_185607 3000 nt of promoter + ATG
actcagagctacacagcgagtctcacctctttcctcacggtacaaagtttgcaaccgacggtcacaaatgtaaacgatctcatcaaaaatagggattgtgtagggtaccaaggtggtgctttcgttaaagatattctattagggctaggatttcatgaagatcagctaaagccttttgattctgccaaagatgccgacgaccttttgtccaaggggaaatcaaaaggtatcgcagcagctttcgacgaagttgcttaccttaaggctatcctttctcaatcctgctctaaatatgtcatggttgaacctacatttaagactggtggttttggctttgtaagtaccttctgtttcctttctatgtatttttacaaaataaggggacaaataacacatgttttgtttccatgatcaatgtgtaggcattcccgaagaattcacctttgacgggagaattctcaagggctatcttgaatctgacacaaaacaatgtaacgcaacaaatcgaggacagatggttcccgaaaaagaatgattgtcctgatccaatgaccgctctttcgtccaaccgtctcaacctcagtagcttcttgggtctatttctaatagcaggcactgctatatctttttcattactcgtcttcgtggctcttttcttgtacgaacataggcacactctaggtgatgattccgaggattccttgtggagaaagctaaagttcttgttcaaaatcttcgatgagaaagacatgaattcgcatactttcaagaacagtgccattcataatataagttcacctatgactcacaagactccgagcccttcaactgtgcaaatcacaccatggccacaaagcccatcacaaaacagagagtttgagctaagaagagtgtcatttagcccgagcgaagaacgcttcactacgcaaccgataatacatcatgaagatggagaatctgatattgaatgtcgagttgaacaatagagatagatgttttacaaaactacattaagaagttatagatgattatttaccaaaaaaaaattatagattcttccatgaaaattaatacgattttatttattaaattgttattatagatttatatagaattcatctttcagtgcttgcctactcaatatttgaaagaagatacatcaaacgcacttctattaattaaagtttgtgaagcaagtaacatcagaacagagatgtctacaaataaaagtaagaacatttatattcttataacaatatacataagacttaatatcaaacccaaaaagaaacagaaaaagaaaaaagactgacgacgataacttaagaaaatttcatcattatgcgatcaccgaccaaagatgaatagatgattatacgaataatattaagacttttaaaaaacgaagggaagtttcttaaggaagaggaaacgttgaagtgtgaataactgaggagttccagcgaagcggctactgcattttgcagtgatctgaggttcgtatatgcgtacgtggatttctagggatgtcacggactaagttatttttattttaatcttcaaatgtcatttgatttatattttaaagatccttctccaacttatccactacgcagccctttcaccacaacgaacgaccatatacgtcaattttaagtgattcattgactaaagataacgttagtttaaagtatttaatttaccaaggtccaagatatgatgaagttttcaaaaatagtttagaaaataaggtttttggtgaccagagtaaattttatttaaaaccttgcattttataaaggtaaaagatcgtcaaatattctttttaatccattcgttatagaaactattaattatttaatcgttttcttaatcatcatgttatcaattgttttctattgcaaagattttttgtattatcttctatcgtcattgtgtatacacaaaatacgtaaaagtaattgactatcacatcgtacagagaaaagattcatcatcataaaacaaaaatggaaaaactcaaacgtagtatttgtttaactaatggaagtggtaatattttctaaacaaaagaaaagaatttaactttgctagattttttcttgctgacaagagaactcaaccatacaacattttcagtggatcccatttatctcaaagaaaaaatgatgaactaaggtctttgttttttgtggtcactaaagtgtagtgtggggttagccaaagggcaagtaaaatacagtccaaatacacaaacaccactcaccactgaatttacacattatttttcctttcttgttccgtacaggttttcgtatcaacaaaaaatataaattatcctaaaataattaatcgtagaacaacaaaggatagcaaacgataaccacataaatagtactgcgccgaacactttgtgtacaaatatctatatatgtaaagactcaaaagaaaagtaaaatcaagttttgaaaggagaacatgtaaataacattcaaaaaaaaaaaaaaaacaagtagaatgataagttctgaattatacttttaatatacttctagaatctaggatattctatttgtagtatatatgcaattttcaagtttgtgtttattggaccaaagaaccgtcggcaaatttttgtattacttatcaaaaatatattttattttaattactataaaaataaatacaaaaaactaagatagatatacgatctttattttttctttttgcatatattagctattcgttggcggcaaaattctaattaatatgtatataattaattacaataaataataaatgtttgaacaaaaaagaaaaaaaaaagaaagaaagaaaggccaggaatgaagtatctttccatctcaactatagctatataaacccctcaatacttcaagcaaaagtcactaacaagaacaaacaaacacacacaactcataactataactatacattcatacatataacaataattcacttaaatcactcggaataatg

SEQ ID NO: 12455 - DNA, 3000 bp, Unknown; identical to SEQ ID NO: 12448
  misc_feature (1)..( 3000): cDNA_ID_1809029_gDNA_ID_2214552_Annot_ID_185594 3000 nt of promoter + ATG

SEQ ID NO: 12456 - DNA, 3000 bp, Unknown; identical to SEQ ID NO: 12447
  misc_feature (1)..( 3000): cDNA_ID_3025245_gDNA_ID_2214552_Annot_ID_185593 3000 nt of promoter + ATG

SEQ ID NO: 12457 - DNA, 3000 bp, Unknown; identical to SEQ ID NO: 12446
  misc_feature (1)..( 3000): cDNA_ID_1807526_gDNA_ID_2214552_Annot_ID_185592 3000 nt of promoter + ATG

SEQ ID NO: 12458 - DNA, 3000 bp, Unknown
  misc_feature (1)..( 3000): cDNA_ID_2708965_gDNA_ID_2214552_Annot_ID_134704 3000 nt of promoter + ATG
cgacttgagcaagaatttggatttggtatgcatcatgagttggtttatgtgccaaaatgtgtatggctgatgctgaaagacttgctttttatttactaattctcattttctttgacagtacgcattggattgctttatatgatatctggatttggtggaagtttgttatcttctctatttaaccgggctggtatatccgttggtgcctctggagcattattcggcttgcttggtgctatgctttcagagcttctcactaattggactatttacgctaataaggtagccaaatcttcccttgttaaacaagccgcactttcgatgaatgatgtgtcaataatgtcattggtttttctacatttgcagtttgcagctcttttgacactcatcttcatcatagccattaatttagcagtaggtattcttccacatgtagacaactttgcccatcttggaggattcacatcagggtttcttctaggctttgttttcttgatacgtcctcagtatggatacttcaaccagcggaacaatcctcggggttatgctgcaccgtctgctaaatccaaacacaagccataccaatacgttctttggatcacctctttagtgcttttaatagcagggtatacttctttttctttcatcatgattacaaaatgaaacagattcagtcaattctttaatgcaaatttttgaaaatttggtgttagatataccgctggactcgtagtgcttcttcgaggaacggatctaaacaagcattgttcatggtgccattatctcagctgtattcctacgtcgctttggagctgtaaatctcaaaatgtctactgtgaggtaaatacttcttatgctctttagtctttatctaccatgtctagtttgatcccaccattcttgttttgtgttaatacttaaaagaagacactagtcttatgtgtgtgactaatcttatgttgtattcgagtttataaaaactgagagtgattgtggaatttggtgcagtcgagccaaattgggcagcagatgaacttgacatgtatcacgaatgggaaaacagagatgtacaagctctctaacgatataccgtctcggattcagcagttgtgttcccaattgtgcagatgaataccactaaacgtctaatttttatactcttgtagaaagttaggaatgtgtcttgaggaagagaagattgttcatttaacatgatcatgcacttgtggattcttctttctgatcattgtttgtttccacttcttgttttattgttgcatatgtattgaccatgatctatgtaatgagaacataggtgaagagaaagttgaacaaagtttttgttcttaaacattttaattataaattcagatgtttaatctaatcttaaatttcttttgcatttaagttgcataaaaatgaaaataatattttgttgtatatcaaatcattttatatatttaaatgaaaatttattagtgtaatagttatgtcaaatgataaatgtaatttactatcattcgcaactttcgaatttccaagaagaaaattatataattaatttaaaaattgaaatttgcttacttaaaagttaaaggagtctaatcatattttattatttcatacgtatatggttagtgcgaatacgaaaactccactaatatcttcttcatttttatatttttacgtacatgtgcgttgaatttacatgataatctataaggctataaccttatcacaagacacaaatcattattaactatatgcacaaaatagaataaataactatatggtaacttttttaaaacaaaattttgtattatataaaaaaatccagttaaacgaacatggaatatattagtttttgaaaagtattgttatgtagtgtagtataagtttggacgttcgagtattcgtttctgttttagtttaataccattgtatttcgattatttcaattttgaagtttaaaatctatataaacaccaaaaaatttggttatgttttgatttagatttggttttttttttatttagaaatctatgatccattcggattttttttttttggtgcaatagttttagatttgttatttgtatttagtcattactttcgtcaaaacatatttaatgtttaaatgatcgctgatatgagataaataaaaatcaagttaaaaaaatcataaatatatctgttaccagttaccaccaattcgagaaaaatcttcacttttctgtcaccgatccaatcctattctttttttagagcattaaactcttatgtattctaacgtagttttaactttaatgccaattccacccatcgtaatgttaggtcgctcggtggattatattgttgtttatccattggttgttactttgaaaatttcacaaatatcagaatcattatttgaatctttatttcataatcgttgatcttacaattacatactcaaagtttgacactagctagacttaccaaaaccagttggcgccaaatcgcaaaatagaataatcatatgattatagtaatttttttattctgattataaattcaaagaacgtcggaaatgcctaacaaatttcctgaccaagtggatttatgattcatataaagaggacaaaggagtgtgattaaacaaatgtaaaaacttgtatctatcttctatttattattctctatagttttatacataaaaaatacttagtctccaccacttacacagatcattttcttctccaacacaaagctttcttcttccatagcatccgaatcgtcgcatcttaaacctcctaaacaggtatgcttgtaacttttgtttcttaccagaactaaattcactttgttaatttgtgattagattctctgtttctttccggttactaatcttgatcagggacaagaatttgtttttgtgtcggagactaggaatataacaaggatttttgcgttttcttgtgtaacaatttttagggtttattagggttcttgatttcatca

SEQ ID NO: 12459 - DNA, 3000 bp, Unknown
  misc_feature (1)..( 3000): cDNA_ID_2708961_gDNA_ID_2214552_Annot_ID_134705 3000 nt of promoter + ATG
taataataacccaaagatcataacttttaaacctcgtacatcatcagattcattcaaactgaggtaagctatgacatcaatctcccgtatttcccgtgtttactctcattcacatgtgcaattcaatttcggttgcttctggaatctaaagtttgaatttttaattcttcctttgactctctctgtttcgtgttcttcttcttctttttgtgtagctttttctatgtgggcagagcaactagggttttgatcatggatccaaacttctctgaatctctaaacggctttgagtattttgatggtaaccctaatttgcttactgatccaatggaagatcagtatccaccaccatctgatactctgttgaaatacgtgagtgagattcttatggaagagagtaatggagattataagcaatctatgttctatgattcattggctttacgaaaaactgaagaaatgttgcagcaagtcattactgattctcaaaatcagtcctttagtcctgctgattcattgattactaattcttgggatgcaagcggaagcatcgatgaatcggcttattcggctgatccgcaacctgtgaatgaaattatggttaagagtatgtttagtgatgcagaatcagctttacagtttaagaaaggggttgaagaagctagtaaattccttcccaatagtgatcaatgggttatcaatctggatatcgagagatccgaaaggcgcgattcggttaaagaagagatgggattggatcagttgagagttaagaagaatcatgaaagggattttgaggaagttaggagtagtaagcaatttgctagtaatgtagaagatagtaaggttacagatatgtttgataaggttttgcttcttgacggtgaatgcgatccgcaaacattgttagacagcgagattcaagcgattcggagtagtaagaacataggagagaaagggaagaagaagaagaagaagaagagtcaagtggttgattttcgtacacttctcactcattgtgcacaagccatttccacaggagataaaaccacggctcttgagtttctgttacagataaggcaacagtcttcgcctctcggtgacgcggggcaaagactagctcattgtttcgctaacgcgcttgaagctcgtctacagggaagtaccggtcctatgatccagacttattacaatgctttaacctcgtcgttgaaggatactgctgcggatacaattagagcgtatcgagtttatctttcttcgtctccgtttgttaccttgatgtatttcttctccatctggatgattcttgatgtggctaaagatgctcctgttcttcatatagttgattttgggattctatacgggtttcaatggccgatgtttattcagtctatatcagatcgaaaagatgtaccgcggaagctgcggattactggtatcgagcttcctcagtgcgggtttcggcccgcggagcgaatagaggagacaggacggagattggctgagtattgtaaacggtttaatgttccgtttgagtacaaagccattgcgtctcagaactgggaaacaatccggatagaagatctcgatatacgaccaaacgaagtcttagcggttaatgctggacttagactcaagaaccttcaagatgaaacaggaagcgaagagaattgcccgagagatgctgtcttgaagctaataagaaacatgaacccggacgttttcatccacgcgattgtcaacggttcattcaacgcacccttctttatctcgcggtttaaagaagcggtttaccattactccgctctcttcgacatgtttgattcgacgttgcctcgggataacaaagagaggattaggttcgagagggagttttacgggagagaggctatgaacgtgatagcgtgcgaggaagctgatcgagtggagaggcctgagacttacaggcaatggcaggttagaatggttagagccgggtttaagcagaaaacgattaagcctgagctggtagagttgtttagaggaaagctgaagaaatggcgttaccataaagactttgtggttgatgaaaatagtaaatggttgttacaaggctggaaaggtcgaactctctatgcttcttcttgttgggttcctgcctagtgattttagtgttgttttgttacaaaaatcatgtaattttaggattacgtctgataggtttagaagaaatcttagctcaatttctctcatatatttctataaaaatgtttggccattataaatgaacttgtgattataagtttataaccaccaccaaagttagcttattggccccactttaattctccacagaactaattaacccattgtatgaaattccacgtaggattttactgggtcaagtaacgagccaattagcgtaccccacgtgtatatatagttcctttttccttggaacctataaaagaagaatctcttctttcttcttctctgcaatcaaaacaacttttccaatttttcagttccgatctgctgccattgactaggaagatcttcaagcttcaaaactctataatcggatcttttattccttggtacagttgaagttgatcaagctctagttgaatttattgttcttcatcttttggattttaacccagtaaaagtgttcaacactgtcctgatcatctataacgttctcgttaagctattaaatctatctggattcatataataaggttccataagtttggattttagtttgttttaagttttttcgatgatcgcctttgatcttgttttctgcagagatcttatctttatagctttgatactttgaattgaaatttgtataggatcgtatgttattctgaagttgattttttttagctttttattttgtgcccacaaggtattcgatgatttgcctcaatgggttgcgttgtaaaccagaattttctaataaagatcagattttgaagtgtttttctttttcgtttttgtggcagtggagat

SEQ ID NO: 12460 - DNA, 3000 bp, Unknown
  misc_feature (1)..( 3000): cDNA_ID_1834466_gDNA_ID_2214552_Annot_ID_134706 3000 nt of promoter + ATG
ttacactgcatgtagatgacatcttgtaatgtcgacaggtggcaccaaaaccttacacgtacatgccattcggaaatggagtgcactcatgtccaggaagtgagctggctaaacttgagatgcttatcctccttcaccacctcactacttccttcaggtattttaattgttttctattaaaaaaacctggatttgtttttttaatttggcttcaatgtctaaccttattttaattttaattaacacaattctatagcaactatttttatttactccatgcataagtctcttctgattgatagaattaaccctgagccaattctccccaagtctttaatgatgttttgatttgggttatagttgatataattaggaaaaacagcttcaaaaccaagaagtttgtgatatgatgcttcaaaactattctaagacgtcatcacttaatgatgtcatatacgcattaaaaacttctattttgacatattaactacgtgttttattgaagatgtttagttgaacttgtgatgatgaagggtccatatgaacccatgaagaaagaaaaaaaaaacttgtgatagtaaagacttggaaagagattgccagctgtaaatgagatctattataagaatcaatcttggatattgtttccattcattaaatccttacgagtagatatttatttacaacaataatttgtagtacccaaacatatgaatcggcgacctgtcaaattagtactagtctatatatggtccaacacaaaagatgtgaatctcgtttgatatcaatttgtttgcatatttcaatcttactattattattattatgataatattgatgaagtttggattttaatttgcagatgggaagtgattggagatgaagaaggtatacagtatggtcctttccctgtacccaagaagggtttaccaataagagtaaccccgatttaagcctaaggcatatttgggattttttttactagtccaataagtcatctttaatttctcttagtagagatttttttcttcttaaactttaaaattggcctccaatttggcccctttttcttttgtaatttttttttatcttaatgtaaagctgcaatttaatcaatctcatttttattgctttggacttattgaaatatctttgaactctacatttccaactagctgttattgctatcatgttgtgacagttgcgttgaaatatttgcgtttgtgtttggatccgaagcaaacgccaaatttggaatttgatattctcttttaacctcttggatcctaaatgttcgatttatccttttacattttctccggcatcattttctacaatgcaataattccggatatttgtttgagattccgttcagacatataatgagctgaggtagacgtaattgtttgtacggaagcaaaaacgtattataattatttacttgtaagtttttagttggtagtattagtaagttatacagagttgtaaataaactaataattcgattagaccaccattatcaatattgttgtatgtaacaaacacggaagtacataaatcgttgagccgtggaaaggagacaaaacatatttttagtctcgtgataaaacgagtcgccacgtgtccacagtcgggtacgtgcatgagatctaacacactttataactagcttacgtgggactctcgacttccataaaaacgaagaagattgaaatgaatctaattcattgtccccgatttgtctctgtctaaagtcagagaatcagagattcgtttcagagtaaaatgattttgcattggtccacttaagagtctcttaaccattccaaaggtttggtggacaaaacatgctccaaccctttcttatccaatttgtcccctcttgtctctctttaattaagccctaccccaaagtttttcacatgatttgttcttgaaagtgtctctctcaatctttgttgtttattattattatttgatgtgaggcgactagaacgtgtacaaagaaaagaggggagattggggattaacacgatcgatattccttttggattagatacgtgaagtacccgaaatgtataagttttaacatacactaaattagtgtcagtaataatcggcgtaaatgagaggagtctttcaaaaacatacactacatcttatatgtcgatcaatagacatagttcatacccaaaaaaatatacaatacgatggtataaggtgccatgatttccaaattgagtttttgcttgatatcagttcctatacattgtttatgaggaacaagttatgtatatatgtctataattttatcatatatatatatatatatatgataaaattagtgattatttatttgtttctcaattatgatttaaagagccataattcttctttagccaaaaaaaaaaaaaaaaagatagaaccataattctttcattaacaacaatgcagataatttcgttgatgatggttagtgtcctttttagttaatattggttcattactgaaaataaaataaactgatatgctacggctacctcttcacttttattttcaatttatgacaaaagctatgcccatatgttctccaaggcccaatatatgtaaaattaggcctatgaaccaaacactggtttaataagaccggtaagcacaagttggattcggacattatttagaacaaaaccggttcaagagaatctacagaacacaacaagtacagagtctttttgtctttgacatttcataaaccttctcttctctcgataaacttcagatattaaaaaacccaaacttttatttcccccaatcaaaaaccctaatttcttcttatcttgtttggatttttcatttcttctgtttgattttattccacaaacacaataaaaaagtttgcattttttcctcttctaagctcgtttcagatcttcgatttcaccatttttataaactattatgcgaacttagttttgttctttgtgattttgtatgacaatg

SEQ ID NO: 12461 - DNA, 3000 bp, Unknown; identical to SEQ ID NO: 12454
  misc_feature (1)..( 3000): cDNA_ID_2712076_gDNA_ID_2214552_Annot_ID_134707 3000 nt of promoter + ATG

SEQ ID NO: 12462 - DNA, 3000 bp, Unknown
  misc_feature (1)..( 3000): cDNA_ID_2712068_gDNA_ID_2214552_Annot_ID_134709 3000 nt of promoter + ATG
cccggtaagtcgaaagatgttccgaaaggttggcagattccaacaaacggaaagatgcttagagtgggcattccagtgaagaaaggcttcttagaatttgtggatgcaaagatagatccgatcagtaacgcaatgaccccaacgggttactgtattgagatattcgaagctgttcttaagaagttgccttactccgtcattcctaaatatattgctttcttgtctccagatgagaactatgatgaaatggtataccaagtatacaccggggttagttcgtctatttctactatggttcttttacttttactttaactttcaccgtggatcatgtcttttttctttatatgtgatttctaacatatcattaacattcgggtcaggcctatgacgcagttgtgggagatgtaaccatagtagcaaacaggtcattgtatgtcgatttcacgctaccgtacacagagtctggagtgtctatgatggtacccctcaaggacaacaagaacacatgggtgttcctcagaccttggagcttagacctatgggtcaccactgcttgctttttcgtattcattgggtttatcgtgtggattttagaacatagagtcaacaccgactttcgcggaccgcctcaccaccaaataggcaccagtttttggttcgctttctccactatgaactttgcccaccgtaagtaacatcaatcaagaactaagtcggaatagcctagtggtatttgttcgagtcttagtttattcttctttgtgggataccgctaggaaacgagtcccatcttctatgatcatcattaaagttcaaccttggtcactatagaaacttttaaccggcaagatttccgactttatgttacaaaaattggcagatgatgaaagaactctaaatacggtttttatatagtagatattgtatctcaaattattatcaataagatgttccaaaataagaaacaagataataatgatatacttacaacttgtttgcgtgtataggtgagaaggtggtgagtaatttagcgaggtttgtggtgttggtgtggtgcttcgtggtgcttgtgctgattcagagctatacagcgaatctcacatctttcttcacagtaaaactgttgcaaccaacggttacaaattggaaagatctcataaaatttaacaaaaatattgggtaccaacggggcactttcgtgcgtgaacttttgaaaagtcaaggatttgatgaatcacagctcaaaccttttggttctgccgtagaatgtgacgagcttttttccaatgggacaatcacagcatcttttgacgaagtggcctacattaaagttatcctttctcagaattcctccaaatatactatggttgaaccatcctttaagactgctggttttggctttgtaagttcttttacccttacactagatacagccaaagaagtacgtatattgatgatataggtattttcattgctttgattttcttcttccatgatcgttgtgtaggtattccccaaaaaatcacctttgacggatgatgtctcaagggcgatcttgaatgtgacacaaggcgaagaaatgcaacatattgagaataaatggtttaagaaaccaaataattgtccagatctaaacacttctctgtcctccaaccatctcagcctgagtagcttctggggtctgtttcttatagcaggcatagcttcattcttggcacttctcatcttcgtggccaacttcttgtacgaacacaagcacacgctctttgatgactccgaaaattctttccgtggaaagctaaaatttttggttagaaactttgatgagaaagacataaagtcgcatatgttcaaggagaatgccgttcataatgtgagttcacctattactcaaggaagttcaagccctttgaccgatcagagcactccattgccgcgaagtccggaacagtatagggaattagagctaagaagagtgtcttccatctcgagcggtgaacttttcactacgcaatcagaacaagttgaagatgaggaatctgctataattcaatgtgaaggtgaatgatagagagaagttgctaaagtgcataacaagttagccagtgtggttaatgctttcttttaggagtactttcttttctcaacacttgtattcctatgtttgttttcaaactcaatgtcatagttagatttctgaatttggattctaatcttcttcctttttgagttatataaaaattagggagattatgaaaataacgcaaaattttataatctgcaaaataacacaaaaaactattaatcttttgacatggatgtctttctcgatctcattgttttggaaaaaccaaatgttgacaaaactaacatttgttttggatctgcccacattatacgtcttcatgtctccgagacgtgtaagaaaatgtggtcctccaacagccaatacattgtgtttgatgtgaaatatggcatacccaaaaacgcgttgaacaaacgaaatttgttttaatacaaatatccttgcactaataatatgataaaataatatatttttttaaattactcttgcacttaaaagaaagaaaaacacattgtgaagtttcaagacagagttagccttcataacggaattgttaggcaatctttccaactgaagtacaaattttaacttgaatcatcacgaaccatgtacctcaatgattaaggtagttatataactcgtataatagaaattttgtagccttgctttgccgagaaacatcttcggcaatgtctcatgactaaatcaaaccattttttatttttttctagtcaacactaatctttattattttatcactcttttcttgatgagtaccaattttgttatagcattgtaaagtcttccaagaccttttcaaacctatttatttcctctgtatttataacagaaaaagggaagttttagagaaccacataacttgtctgtctccttatctttggataatgatg

SEQ ID NO: 12463 - DNA, 3000 bp, Unknown; identical to SEQ ID NO: 12453
  misc_feature (1)..( 3000): cDNA_ID_2712064_gDNA_ID_2214552_Annot_ID_134710 3000 nt of promoter + ATG

SEQ ID NO: 12464 - DNA, 3000 bp, Unknown
  misc_feature (1)..( 3000): cDNA_ID_2712153_gDNA_ID_2214553_Annot_ID_134712 3000 nt of promoter + ATG
aagttctactgattgcccaagacagaaaggagtgtcaagaagcctagtttggtataaaggtttcctactttattcaatagtaggccatgccttatatatacatgagatgagattaaacctaagcacttacatataaattacacaattgtagttagactatataatatttgcacatatgacttacacaattgtacttagactatagtataatatttgcacatattgtgtattatgaatcattaatgatttataaattgtaatgcttaggaagtagattaatgtgaaattaaggtccatcttattactataaagtttttcaatattttcttttaaaaaaacgaaagcaaatatagtagacaaaatgattttacagaagtagagaaacccggaaaggaagagtgactgagaagtaatgagacatactataatttatgacctcccactagaacaaataaaattaactcaatgatcctaacttttcttttcatttgtttacaatgctaagccacataatctcatcatttaaaagaaggtctaaagaaaccgaaggagaaaagaaaagtaaacttaatacaagagaaagcgtgtttctcggatccgtgtgggatcagcgaagcgacaggagaaagaccgtgaaagattctcaggctcatcgtggtcgtgccatcctggaccttgatcaaaattcaaagagtaatcacaaggctcataagccacgaccttagtggaagaagcacgagaaggcaagagcttaagcttcatcaacaaaaccttccatttgggcaagagcctttctcttcgttggtgttgcttctgttctctgcaactcttgctatatcttccaagtacaattgtctctctgtgagatgaagctgatgataacacgttaacgttccatctctttttgcttgaagattctaacatcatttcttccttctgttctgttctgtctttgttttgttggttgaatatttcgtcttgtgtctttgtgaatatcttagctgtgttatttatattttgtagtagatggatggataaggagacgtaaaactgagactaattcaaagtcagctttgaaaggcttgtgaaactgcgttagccaacttgtatgaataattaattggtgaaagggagcattttaaatgccggtatctaatctgactactgaactacaaaacaatagtcaaagtagacgttgttttgtctttaaatctgacttcgttttgctggtgacaactaaatatacaattagtgaacattacagtaattagagtaactgagtttataactttataataaaattacattggtcttataaacgttttgtattttttctgcgtcttataactatgatatgtgtagacatatatttctgcggaaaacatccaaattcctgctgaaacattacgaaattttgtgacatacattctgttgaaatttctcaaccaacttgtgacaaatttatgacaaaactttaaatctgttgaaaattccagacaaaaataaatagtcaaaatgtatgtcgcaaatttttcgatgaacaaaagatgtcaagaaagaatcgtcaactgggcttctccaagaacatatctacttgggcctataactctttaaaaggtccatctgttaacttagcccacatacgaaattgagtcttatgactcataaggtatataatatacctttgttttttgggcaaaggtatataatattaccaaattctaaaaccgatcggatatttagaattatatttcaagtaatccaaatacataacggttcccgtatcgattccaattctataaagtttcatttgtcaccactagttactatctcttctcaattggagtttgactctatagatgtagaaaacggactaccggagtttggacccagtccttgtggcccggccgacaaaaaaaaaaaaaactcactttagaatacacagacacattttccttcagtctttcattttttccgccaatcctccaatacaaaccatggcaggtggtccgaatacggacatttgcttgtctaaataaaactataaagtacagataaaaaataaaaaagtaattgtattacgtcattacgtgatctagtgtgtgtcctaattgcatcatcaatgataacatcatacgcaatcactcgtcgtcttggcatttctcataaaacaaaaattcgagacctcctctccacttcgaaatttcattttttttttctcaacagagtaaatttggctcttatgcacctgtcgtgtgaatcctgatctcgctttagattgtggaagccttcgacacatttcccattttgaatttgtcttcttcttcttcttcctttagtttttggggatatttcaccatcctcgttgaaatcagtgtgattcttcttcgtatacaatgacgaaattgagatcgaaatggttaggtttaagatctgtaaccatcttcttaatcaatttctctctagcttttgctttcgtttccgctgagagaagaggaaaatctctgaggttaagtacagacgaaacgcgggaaaatgaatcaagtttcttccttaaagctatcaattttctatgggaatctgatcaaataggttatcgtcatgtttggcctgtaagtatcattcttcttctaagtttcatctcttgtgtcagaattatatgttaatggttttttttttgtcagtcaaaagagcgaatgttgtttacatttgtgatatgacgcggaattacatgtattttgttatttgtataaacaggaatttgagtttaattggcaaattgtattgggaacacttgttggattctttggagctgcgtttggtagtgtaggtggtgttggtggtggtgggattttcgtacctatgcttagtttgattattgggtttgatcctaaatcagctacagctatttcaaaatgtaagtttttagttaacaacattatatgtttttgtcttgatgtttttttgactaatattgacatgattttcttaggtatgatt

SEQ ID NO: 12465 - DNA, 3000 bp, Unknown
  misc_feature (1)..( 3000): cDNA_ID_2712145_gDNA_ID_2214553_Annot_ID_134714 3000 nt of promoter + ATG
gttccaggataatccatttttatacaatatcttaattggttttatacttaaaccatggaaaaatctcttagtatatcctatgattatgtaacgatgtcaataaaagatgatcatactccctaaagatactcccactgggtcgtgcaaagaaatatagtaactatgcatggccgcatgggtatgtgcatacccacgaatggtgacaaaagtaatggtatgctgaagtcttttatactttattccttttctgtccaaataccttttttatccttacgaagagctgagtgatcttaacagatacttgtgctagtgatatttagacgttggtgtaaacacaagagcagttttatcaacaatgcatttttaccttgagcataatccaatatctttgagcaacatccttaaattaattagcatcatccaatatcaccttgagatttcaatagagcatgttcctaagttacttacatgctctcctatatatcttttatacatacatcttttggataagaaaaaaatagacatacgacattaaatgtagaataacaagcgcaataaaaactcacttatcctttgattataaagttggctgaggacataagcaaaatgtgagacttgactacccttgtgttctcgtatttcgaataatttatctgtttacactcgctacaaaagttatcttttcaaaatagctgtgatttttttgaaattgatacactgacttgaaacattaccaaatgacaaatatctatcacttcaaagaaatccttgcatttattataagatactctccataaaaagagattgtcatctgcaaaattggtaggttagtccgaaatattttgaaaacatgttaaattattattttctcctatataaagatagttcaacccattctttagatgtttcatgttcacatctttccacgtattgcagattttttaagtttgatttgttcttctcaaaacatagttatgaatatatagtttatgatgcactattgtgacctcatcacatgatgcaaattgaacatctcttccaaacacaaatcgatgattaacattccaatggatgtgttcagcaaaagctttcctaatggtcaacccataaacaagatcatggtgaggaaatctagacgaacactcgaaccccaacattttgtcgtgatcattcatagccgagaagagatcatattccgagtcaaactttgaaaatttgacatttctcttttacaaaaaaaaaaaaaaaaaaagaagacaaaataactaaatggatcatttgcaaaaataaccatatttgataaactatttaagtatatagcactatatatgtataaattaaaaaactaacatagagggcaagtataatgaccaaatgtggtggtggtgatcaaaagtgatggtggtagtgactagtgaccaaagatggtgatgatggtggttattgtcacggtgctggtgggagtggcaaaaggttgtggtgctgatgggagagattaaaggtggtggtgatggtgatgatgattaaaggtgatggtggtgagtggtgacggactgtggtgtgatggtggcggcagtgacggtggctgtaatgacggcggcagtggtggtgatgactgtgacggctatggtggtggtgacggcgacagccgtggtggtggtgacggcggcgacggtagcccgtggtggtggccgtgttatgatttggtggtggttgatggtgataatgatgaggacaaaattgtaaataatatatattacacacaaaatataatgaaagttttttttttaggttagtttcttaatttataaatttttgttggttatacacccatatttccctaactaaatactcttttaaaccggcgatttaccattctattgatgaatcgattcacgtcaaattttgaataaattctacccaaatcttcttcaatattgaacctggttttgaaaatttaacatttctcctttacaagataatgaaagaaagccaagatatatcatttctctttttaaccgaccaacattcacatcgggcttttggaaagccttaagaaagaaaaacattccaacaagaaacttgtttacaagcccccttcaagtcacacagagttggtccattaacaattttaagtattgtagatttgattaatctatgttaatcatgtccaatgtccatattgttagataaaagaaagaaaaaaaatcattaaaaacccatagattgtgtgaagaaaccaaaaaaaaaacatcccataaataagaagatcccttaacagaaggttaaaaaaaaaagatcagagtcctttggattcttcaattgcttagtctcataaatccccaaaatctctccacccagttggatttgcagctctctcagattcatcagtttcttgatctctttgttatattcaatttcacgaagattgtatccagagcagatgggtctggaagcttctttctttctcagtgatttcgatcgttccatggaccagacgtacgatgcctgagctgcgtagcaacgcacgcagagatcgggataagaagaacccgaagcagaacccaattgctttgaaacaatcacctgttaggagaaatccgaggcggcagctgaagaagaaagtggtggtgaaggaagcgatcgttgcagctgaaaagacgacgcctttggtgaaagaggaagaagaacagattagggtttcgagtgaagataagaagatggatgagaacgacagtggtggtcaagcagctccagtgcctgatgatgaaggaaacgctcctccacttcctgaaaaggtgtcaactttattgttggttttgttgtttttatgaggttttagttcatcggaattgtctcttgcattgtgtgttgtgttttttgattaggagaaagctctcaaacttaggcatgccacttaaagttaaaactttctcttgtaggatgatttgattattgactccttggtttttacaggttcaggttggtaattcacccatg

SEQ ID NO: 12466 - DNA, 3000 bp, Unknown
  misc_feature (1)..( 3000): cDNA_ID_3025349_gDNA_ID_2214553_Annot_ID_185618 3000 nt of promoter + ATG
atagatagctagaaaaaaacaaaaggttcacgatgtaaagaaataagatactctgaaatctcccaagaaaaagtagtatcactctattaaccttcgtcaagaagttttaggatcctacatttggtaattgcaggttaagaaaggggtgtggaataataatctggaacaacttttagcttttgtttttaattctctgtttctaatttatggtttgtttcgcttagatttgtctaatagttctttataaaatgttttcccttgtgtctgtttttactagctttgttgttgtaacttttctttggttggtttagtcttccgtattgtttgtaatgacattttgatcattaatataaattcatcaattgacctataataaaaatattccactacgtactcatcaatacaaaggaacaatgcaattcattattcaatacaaaggaataatgaaaaacaaaactcttaaaccaaaaggtgaaaaacaaaaccaaaatctaacaatcaaaaatgtgatagtcttcctctagtgtccattgttcaagatgcacacgttcggtctcaattgttcttcgagtatactatgcatagttgctgcataaaggcatcaaagttctactgattgcccaagacagaaaggagtgtcaagaagcctagtttggtataaaggtttcctactttattcaatagtaggccatgccttatatatacatgagatgagattaaacctaagcacttacatataaattacacaattgtagttagactatataatatttgcacatatgacttacacaattgtacttagactatagtataatatttgcacatattgtgtattatgaatcattaatgatttataaattgtaatgcttaggaagtagattaatgtgaaattaaggtccatcttattactataaagtttttcaatattttcttttaaaaaaacgaaagcaaatatagtagacaaaatgattttacagaagtagagaaacccggaaaggaagagtgactgagaagtaatgagacatactataatttatgacctcccactagaacaaataaaattaactcaatgatcctaacttttcttttcatttgtttacaatgctaagccacataatctcatcatttaaaagaaggtctaaagaaaccgaaggagaaaagaaaagtaaacttaatacaagagaaagcgtgtttctcggatccgtgtgggatcagcgaagcgacaggagaaagaccgtgaaagattctcaggctcatcgtggtcgtgccatcctggaccttgatcaaaattcaaagagtaatcacaaggctcataagccacgaccttagtggaagaagcacgagaaggcaagagcttaagcttcatcaacaaaaccttccatttgggcaagagcctttctcttcgttggtgttgcttctgttctctgcaactcttgctatatcttccaagtacaattgtctctctgtgagatgaagctgatgataacacgttaacgttccatctctttttgcttgaagattctaacatcatttcttccttctgttctgttctgtctttgttttgttggttgaatatttcgtcttgtgtctttgtgaatatcttagctgtgttatttatattttgtagtagatggatggataaggagacgtaaaactgagactaattcaaagtcagctttgaaaggcttgtgaaactgcgttagccaacttgtatgaataattaattggtgaaagggagcattttaaatgccggtatctaatctgactactgaactacaaaacaatagtcaaagtagacgttgttttgtctttaaatctgacttcgttttgctggtgacaactaaatatacaattagtgaacattacagtaattagagtaactgagtttataactttataataaaattacattggtcttataaacgttttgtattttttctgcgtcttataactatgatatgtgtagacatatatttctgcggaaaacatccaaattcctgctgaaacattacgaaattttgtgacatacattctgttgaaatttctcaaccaacttgtgacaaatttatgacaaaactttaaatctgttgaaaattccagacaaaaataaatagtcaaaatgtatgtcgcaaatttttcgatgaacaaaagatgtcaagaaagaatcgtcaactgggcttctccaagaacatatctacttgggcctataactctttaaaaggtccatctgttaacttagcccacatacgaaattgagtcttatgactcataaggtatataatatacctttgttttttgggcaaaggtatataatattaccaaattctaaaaccgatcggatatttagaattatatttcaagtaatccaaatacataacggttcccgtatcgattccaattctataaagtttcatttgtcaccactagttactatctcttctcaattggagtttgactctatagatgtagaaaacggactaccggagtttggacccagtccttgtggcccggccgacaaaaaaaaaaaaaactcactttagaatacacagacacattttccttcagtctttcattttttccgccaatcctccaatacaaaccatggcaggtggtccgaatacggacatttgcttgtctaaataaaactataaagtacagataaaaaataaaaaagtaattgtattacgtcattacgtgatctagtgtgtgtcctaattgcatcatcaatgataacatcatacgcaatcactcgtcgtcttggcatttctcataaaacaaaaattcgagacctcctctccacttcgaaatttcattttttttttctcaacagagtaaatttggctcttatgcacctgtcgtgtgaatcctgatctcgctttagattgtggaagccttcgacacatttcccattttgaatttgtcttcttcttcttcttcctttagtttttggggatatttcaccatcctcgttgaaatcagtgtgattcttcttcgtataca

SEQ ID NO: 12467 - DNA, 3000 bp, Unknown
  misc_feature (1)..( 3000): cDNA_ID_2712136_gDNA_ID_2214553_Annot_ID_134717 3000 nt of promoter + ATG
attgttcttagggttctagaaacgtaaaaaaaatatgaagccaacagtttttccaaatggttctgatcccatttataaccgttctggtcttcatttaaaactaatttaatttggaggtcttggactgagacccataaatatttttaagcctcagttagttttttttttgctttctttggtgtagctttggagaaaacaaattattcaaggttcatgatcttacataaaaaaaattccatatatcttttgtattctttcgaggactggttcttatatgctttagcttatgttatcacatgtttatggagttgttcttttctctacatgaaattgcctatttatatgataagggatatatgttacccttatatggatattcttagtttatcagtctatttagggaggaagttggaattatttcattaaattaagggaagaaaacaaaaggaagagaacaagcgtggggtgggagaaagtgggcgtgtgggggaattgcaaaaccctagaaaatggaattaagcaaagcatgcccttccatgacaatgaccactctctgtatattctctccataaaattcattctttttgttttatggacccatttttcctttgcaattagttctcgatgtgcgttttggtggtacaactctattcataaactatacaatttcgatacgataactcaaaacgtttattttcttaccttccgggtggtacactcatagttttctcatcagaaataaaagcaattaaaatccattggaatttggttagaaatgctcttgttttatatatatatcatcaaaacaagagctataccagtgaaactaaactatataacgttggggtttaaatgtaagatgactcgttaaacagttatatatgttcagaaaacataatatatgttaatagaaaacattaggacgctctatgtttaagaaagatgatttggttaagcttgatgagagataaggtaactacgtagataagtcgtttaaaaaaagacatatgggttagaccacagaccactacatataccacataaattggaattaactcatcaagtttatgtgtgaagacatagtttatgtaaagtaggtgaaacatgattgggattgatatatagcatgacttagtctatgctaatatttggtctaagcttaggttatttaagccaagctgattagacaagaaccaagtggttatttttttatcaagtggaaaatatatagtagtatgagagctaattgaataaattagacatgaattgattatgtatttacctaggtagacgagattattatactcactaagcttaatagatcagaatcctgtttaattattaagacggctagtgagcgagaccaaagattcaataaagaaggacaatgaggataggtagtcaccgaatatagcacaatgttgtagcctaagaccattgcaaacattgtatttaaaaacaatggttaataaggaatgatttatcaataaagttctaaatttgagacttatatagtgcaaaattaaatttaagtacaacatgaatttaaacaaagaattggactcgaagtgaatctacatgaattactctataatacagtgattgacataggttatcacatttttacgtacatatatttatattcgtacaaattgttttgtagccaggatttgaatttctatttatataaatttatacttaaaaataacagaaatactatagagaaggtcaaattaactaggaaagatttaagtacaaaaaaatgattaagtgcgtagagtgggaaaatgcttttcaacgttcacataagatgtttagtcacaagaaaaagtgttttgattttcttcagtcaaaagaacatttcgatagtaagccgacaaacatctcagaggctttttgacgacatcaatcccatcctcatctgtccgtgttcaaatgtccgattacaaaagtgattgagaaagaaaagtaacagtgatatttctatgattactcgcattagttcttaccataacaattataatctgattagcttcccataacaactaatttatgatgcaagtgtttttaagcatgctatttttaagatttcttagctctctaatataaaattttattagcgtttttaacgtacaaaaaataaaatacgatgtcgaatataattatcctaaaacaaattaataagccacagaatgtttcttttttcctaaattaggtcttaatattaaatttactctaacatgcactaagttgaatacaattaacctaaaacaaattaataagccacaaagtgttttttttttctttctaaaatttggttttagtttttactgttgaagtaacactaagttgtgatagagtaggagtaccagccggtgattcaactaattcaattcggaaaagagaaaattatataacaacgtaaacaacattcttactttgtgttttgagggtaaacaaattagtttttgttctagttcataatctaaagaacgatttttgtttaacaaatgcttaattcaatattatttttctttatatttttactgaataatatctatattaaataaatcagccataatttaaggtgccaaagtgctcgacaccttttttgtttctttctattttaaaatttaaactttggtaatattcccctttttgtagcccatcctagcactttttatcccttttccatctagtacaaagaatagtgcacactgcctttcttatgaaactctctaagattttatacatgaaggaaaaaaaaattaaaagtctaatttgaaaaaaaaaaaaaaaagacaaagaagactattataatctttctaatcaaaggtcatcattgatccccctttaatttttttctttcttctgttttacagctaaggttcaaagcaaatcacagtccttaagagcaacacattcaacacaagagcatatatatacatatcaaataacctcatgtaataatagagcaaagccaaagaaacaaaagcaaac

SEQ ID NO: 12468 - DNA, 3000 bp, Unknown
  misc_feature (1)..( 3000): cDNA_ID_2712132_gDNA_ID_2214553_Annot_ID_134718 3000 nt of promoter + ATG
acaatgagggctttaatgcagtccggtttagccgcttcgctatggtgccctaactcgatcttcttcatggcttttgaatgaatttaaaagttctaatctaacgaaattttgatatatggtttagttgatgttgtgatttgtgcgtaatacaacgaagctacttataatgagtttttttttttaattgtaaggaaaagaaagtgaaaagaaaatggtaaggactaaggagcacatggaatgaaattaatgtatgatgatgagtgattgatttgagtttcgaaagttgacttgtattatgttctttagtgagttctgagatgtattactttatttgacatattgtttttggagattgggtaacaaatttgaaatatgcttacacagtacagtactctgatttgtgtccttcaatatcaaagaggtgttactggttggatacgtttaaattgtttccattggatataaagtagttcagattgttaaaaactaatttatttgtaatgatttgttattcattttcattttataatccactgcataagaatgatcatagtctcttacaatccaatccaatgtaacaacgatcaagaaaaatcattaatcaatagaggatgatgaattaacaaacgtaaatagaagaaaatcaagtagttgcataagagaaaatttaataggaatttttggactgcaaagaaggaaaacagatcaaggtatatgtatgtgatctttatcaaagaacttgtgttatgggatatatggtgaggcgatgaaagctttaacaatgtggagccatgttcgactccaaaggacaatcaaagcacatataagtgcaaaattgcttataaatgcaatcacgtaagttgacacgatactaatataaaaattagaacatcaacatgtcataagcaaattgtccattttcgaccatggattatgtgataaattggtcaaataatgggttagtaaaaaatttaacactttacgtaagaaaagttttactaattatcgaaaacatcttgacgactttatgaccattctaaaataactacaaacacttataatgtcagatatctatatatatatatatatatatattttactaaccattttttgattaaaacttgaattcgtcgtcaatttgttttgaccatttatctactcattatatgagtccaaaaaatttcaccaattactgatcatttcatatattcgtcttagtttgttcgaaagtttttcaataaaaagtttgaccattttgttggtaagaaaattggtcaaaatttgacattgtatatagcagctccatcggcttcttctccttctccattacctgattcctctgagttcttcctaccctcacaacttttgttggttaactacaagaaaacgtagatagacattttttggtccatttgcaaagtctcgatatatggaagaaaaatacttccatgctgtacccaaagtatgtgaaatctctcatgtgaatgcatgttctgcatgccgtcgtctcataccgccgttgtcctctcagactaatactattgcttcaatctatcaaataaaggcaaataccatatatgcttatatgttatcttacatagccacaatctccacaatcttagtattcactagttactataaaatcttgatgctgaaaaattcgtacattaccttcatgaatatgtgtaaaatggcctctttttttgtcgtttgtagccttgtaaaacataggaacggctctgcatttagacatgcagaatggacgagttattaaaaatcaacgaaactaaacaaaaaaaacaatgtcaatttttgtttaacctaaactaaaccgaatctaattttaaccgataatacctcttgatagacttttactaatcaattaaccttccttgtcttctaccttgatttggggaaagtgttgtcctagattcatgtagatcatcagtacatagaagaaagttacttgtaacataatctgaccaaacaaaactaaccacttaaatatcctaaatctctctttctaagcctatctaaatactttgaatttgtatcatcgtttgaaacaatttaatatagaaaagaaaaagtaaacaaatactagtatgtatttatttatatgtggtccaatttgcccacagaaaaaggatcatgagacataagcgtgagaccgtctccaagctgttcgtctctgatgctccagctccctttcccactttatttttatgttattttaagtttgaactacaatcaacttacatatatacccaaaaaatattaattactgtatacctattttcggatatttcatctattattgcatatattttgtcacaaattttgttttggctattttgtgtagatttgagtatatatagttatacaattataattttctaatattttggtttttttttttttgttacatgaagatacatttggattaaaaaaagtaaggaatatgaaccacatctaaattttgtttgtccatgagaccatcctcaacgtaaacactagaattgtcccaaacccaaaaaattgaaccaaccaaataaaagaaaattataatagccgaatgagacctaaatctctaaaaccaaaaacctcgtaattggaatagaaccgatctaaacttaaacgaatatccaatacgaaataaaaagccactatttaatagcaataaatcataaattcttttctttttttgtaaatcataaattcttacgtctatttttttacttattagttacctaattcactcattagcttgacttaatcgataattatatttatagatacagtatatggtaaacatcaaataactaacgcttattgaaaatttcctttaaaatgactaatgagacgaaaaaatcaaataattaaacaaaattacaaaactgccatttcttcttaaattatttcaagtaataactgtactaaaagctgtttttgttctttctctctctctctctctttcgctgctctcacacgcaaataatg

SEQ ID NO: 12469 - DNA, 3000 bp, Unknown
  misc_feature (1)..( 3000): cDNA_ID_2712120_gDNA_ID_2214553_Annot_ID_134721 3000 nt of promoter + ATG
attatctctttctccatacctcttttttcttgcctgaaacaatctgatatattgagaggagattgttgcattcaggtctctcagcattgtcaaattcaagcctgttggaacaacaagaagcagaagctttcaacattagatatctcaatttgaaaactgaaatggtaacaagaaaaaggaaaaaaaaaaaactttgtgcattgcaagaaattttttagcgacataagtagcgctcacccagcaaatgagtctgtcttgcaccgttttatcttgtccacaatcaactattttcgaaaggagggatgagaaatggatttagtagcagaacaagaacacatacaaagaacatgagtgagttcattttacttacatcttttgagtcaaggagattaatccgggactgatcagaaggggcagacttggacatctacaagattacatgacagtaagaccttagcgataagtataaaattcctcttgatcatttgaaaacaacaataagtaagcccaaaaattggattagttcaatatgatattctgaccacagttagggaggcaaatttccagaagtgtgttaatccttacaatttagagagaaactataaagaaacagactagctagtagtaaaactctatttgatgttaaataacatgaaggattatctcaatatatttccaataggatttgtgaacgttattcgtcttctctacaattttatctattgaagaccaatagtgacgcaactgctgaatgcagaaagaaaaaataaatgaccagaaaccttaaagtagctgtgaatgaaaacatactaccttggaaagaccatcagtaagagacataacacgagctccagcttgtggtatgagtggttctggtatctacaaacaagataaatatgaagaacaattaaccatctgtgataaataaaagctacgaggatagacaaaggatttcgaaagtctcaccttaaagagcgaaccaccgcggctgaaaatgaaaattgacaatgttatacggatgagggaatacaaatgaaggggaagttaaaccaataagaaacatgaaaatcatagatcataaagacttgtatgactggtatactcaacatactaaatgcacatacaaaatttcataccctccaagcttcttccacttctttccaccatataaatgattcacacgctgtgcaatttcacgggcaagttctatgtgctgcttctggtcctcaccaacagggacaaaatcagactgcagaggcatatggcagagaaccaaacaattcagtaaaatggtcatcccgcaagcaatcagcaggtatttctatgcactttttaacagaacaacgaaacaatcccaaaaatgatcgccgaaaaaatcttacatgagcttagctatataagatcattgttttacttgtgttccttcttcattacaataattgcaacacacttaaactactttaaagcatcacctgatacaagaggatatcagcagtcatcagatcaggataagtaaacaaaccgacactagcattctcaaccccctgccaaaaaagacgaaaatggaatcagtaaacagaattctaaatgtatgcccaatacattagaagattacatatgatatctaaacaagtatacaaagaaatcaacaacaaaccttaaatactattaagcaggatttcgctttcatttatttaaagcacataataatgtgataagaccatgaagcaaccatatacgcacctccttgcgtgatttctctttgaactgaatcattttctgtaaccacccaataggtgtggatgaacataaaagccacattaactcgacatgagcgggaacgtgagattgcacaaatactgaagccttagagacgtctataccacatgctagataaagtgctgcggtatccgttgttgcctttcctagttgacgtgtatcatatggaagtgttatctacatagatcaagcaagatatagataaacaccgcgagagatatatcaccaaacaagcttccgaaaggtagataactcataccgcgtgatggtctacgatgataaagagtgtttcatatgtatcctgcaaacatataaacacaaaacgcctgaaaaaaagattaaatttttgtagcaaccagaaaatataaaaactgaatccttttcctaaagtctttaactttacaacaaacaatctacttctcacacactagtgaatgaggaagtgattagaaaccagaaaaaaaaaactgaatccagttcttaaagtctttaactttacaagaaacaatcttaaagtgataaactttgcaaatgtctcataccattggtgaatcagtaagtgattagcataatggcaaaggagagagagagaacctgaagagcgacccagtttttgatagccccgagatagttgcctaagtgaactgaacctgtaggctggacaccagagaccacacgtttcctaccatcaaaatgggatcagaatgaattcaacagagaatgcatagctaagaagtaatagaaactagaagcaggtagaggccattactttacagaaggagaagtgtcatctgtggcgacggagcaacagcatcggaacccttgtccggtgaccgaaatggaagaaaaagagccggagagagaggtgggtttggagagtaatctagtgagagacccgagacgagagaacctggaggaagagaggatgaggaagtgagagagactcgtggcgtgtcccattgtcgttttcttctctttcactctctctctcgaagaagaagattggggtttataagcaaaggaaggattggtttttgagtccgtgagggtcacgcggctcaacaacagatttcaagtcaaaatcacaatcgcaactttttccaagcaaaaagaagttttttactcgcttatcctagtttcttaccttaaaccaatataacattgagaaatcgattgattacctcattccctctattctcaatccacaccaaagactatatg

SEQ ID NO: 12470 - DNA, 3000 bp, Unknown
  misc_feature (1)..( 3000): cDNA_ID_2712116_gDNA_ID_2214553_Annot_ID_134722 3000 nt of promoter + ATG
ttcctgtaatgtatattcttttcatttttggtcgatataaacagcatcaacatcatcaagttctagtagtttctgcattagctctttgttcaattccatggcctcatcatccacctgcaacaaccaacaacaatcccaagtgattacattttccaagtgaatcgttgatgaatactgataagggtgtgactcttatttgggcggaacaagaagttaaaattaacgaacgaagaacacaaacaaattttctataagtttattgccatttccaattatgcttatgtagcatatgcaatttacaatgtatttaacacgttaagagaagataaactacatgttgacgataaaaatagaatcaataagttaatattagacagggcacagaggttacagaacagagcgggagatttgatacctcaactgtagtcagagggagcagttcagagccattgtcaggctcgaagttcactccttcatcacgtagctttgataatattgttgagtagttctcattagaagttacaattttgtagtacctgaacagatatagagacaagaagctgatgaaacaaaaaaagagcataatagttatgagtcacctaggtatcatctcgtcttagattggcaagatggatttcttatttcaaatcgtttggtgtgaaacttttattgcaatttagctgtttatgagaagaaaatacactaggtctaccttcagtcgcttgattactttttcaattcaatcttgaaagaaatttctaacgcatttgaataagtgagtcgactatctctatcttccctaacttaggattcaccagcaacagaaaataataaatgtaatactgacaagaagaaaagaaatgcggaaagacattatattggttatatacctctcttccctgtcttcatcagtatcatcttcataagttgggggttcaataacatcctctgctccagcatctaaagcaataataaggagctgatctttgtcagcttcggtgacctttatattcactaccctaactcttttaaacttgaacatgacagatcctgaatcagccatttttcccccataatccttaacaaccgatctaatagctgccactgatcgattaattttgtctgttaagacctcgactaccatactaacaccaccgtagccatatacctaaagcattgaaaacaagtttattttagagtcatcaaatcttataattggacccaaagaaatgataacgaggaactggatttatggtcctgtaaattgaacaaggtgctgaggtagtgaagttatattagctacagtaaccacatacttggcctgatagagtgatgaactaaaacagattcataggttttaaattaccaggccatttccccaccttactaggatgattcaccataacggccccacttacaaacataaaactagaattgaagctcatgacctcacctcgtaaatcttctctataaaagcttcttgccccttctcagaagccctcttaatattacgctccacaatgtctttcggtacatccagttctttagctttgtcaagaatagtagctagagtcgtatttgaaactgggtttggaccccctttcttgacactgcatgatgataaacccacagatgatactttttctagtaagcatatgtccataacaaagtaagaagttgaatccaacaaactaaacaccatctatatctacaactaatgtgcaaaatttcatctcaaaaaaaaaagatgcaacattgtgaaaaaaatgttgaagacttacgcagatacaacctccttgccaattctacagtatagcttcgccttctttgaatcttgagcgccctgtaattcaccagaaacttcaatctcaaaagttcttaaatacaatcttcgtcttggaaaaagagttttatctttctgctctgctgtaatatgtaattctcatttacaaaaacaaaccacaactttcaagaggaagattgttattcacattctgaaattcatactacacgagcaagagaaacttccactataggcttcacaattcaaacatggtgaattagctaatagctttcaagagtgacataacactgaaagctagactctttacaataacacaattaattgatataaacccataatcaaaacaactctctctatctgaggcatttcatcaaacaggtgtttggcataaacaattacgagctctagactcatcaaaacctataaattttatatttttaaaacctagtaatagcaccaacgcacttctaatctatatgaacccacaaactcagaagcttaacgaacctttcgaccagcgattttggaagaacgacgacccatacaaagaggagttgaaatcgaaatctttctgagttgaagcttgcggaagcagttctggtcatctgattgttgtgacgcagccgtgaaatgcgaagtagtagtgtggggagagattgaggaaagagacgagagagtgttggtcatggtaagactaagaagacgatggttagtggagttgagaatggatctggaagagacgccattggagaatctgaggaggattactctcatggagcaatgggaggccatatagtctttggtgtggattgagaatagagggaatgaggtaatcaatcgatttctcaatgttatattggtttaaggtaagaaactaggataagcgagtaaaaaacttctttttgcttggaaaaagttgcgattgtgattttgacttgaaatctgttgttgagccgcgtgaccctcacggactcaaaaaccaatccttcctttgcttataaaccccaatcttcttcttcgagagagagagtgaaagagaagaaaacgacaatgggacacgccacgagtctctctcacttcctcatcctctcttcctccaggttctctcgtctcgggtctctcactagattactctccaaacccacctctctctccggctctttttcttccatttcggtcaccggacaagggttccg

SEQ ID NO: 12471 - DNA, 3000 bp, Unknown
  misc_feature (1)..( 3000): cDNA_ID_2712112_gDNA_ID_2214553_Annot_ID_134723 3000 nt of promoter + ATG
tcagttattcaatcacgatacacagggataataagttgagcactatcataggtacttaggtagctttttgctgcttaacatggtagagaattacatgatgcaaagagactgggttccagaattctaatgcatggtttgtgaactaagccgaggatgtgagaattaattctgtgagtcgttgtagtctaaatcctaagtggacttacctctctgcagacatctcggtctaagtttcctcgatacacttctttcccttgtctaccatagacaagtaatccctgtaattaaacagatatttagtgagactacattgatattggtgcacctcactagttccctgatgttagagcaagtaaacctgaacgaaaacgcctggagaggactctgagataatgccatcggatccagttagatcagccgtcttcaagattctgatcgcacctgggcgggactgtgataaataaataaatttaggaacatatcctatctccaaaacatttcaaagacaagcaaatattaaaaaataaggaaagatattgttggacagatcaaagaatagtccaaacatgaagtcattgtaaaactgctgtcttctcaccttccccgtagctatgactactttaagtcccctcagaagggcttcttttaaagcttttgcatttgcctccgaaatctgacttttactgttaagcagtgtacctaatagagttcacatcaaaatcccatgagaaagcgaagaaaaccgaaacaaacaactacacattattaaataagtaaccttaccatccatatcacagaatatataggagaactttggtttgtacaatcttaggccatccccttccttcctgtctaataacagtagtctgtaagtttatcttagcaagaacaagaagataatagggggagtgtaaatgatcgttacacagttgcaatttagtatacacaggaaaaataccatctgatttctccggctgaactgtagttgttttttgaatgtcatatgcactctgaatgagtccttttcctttccacccaaggttttttagcaacaactcctcttcctcttccatttcttgctcagcctcgtcgctgatttcatgatcaaatcccagtagatgtagcaacccatgaatctttgaaaaaacatttaaggtatcagcaaatagagactactacacaaaccatatgaaaccacctgaataaaaaaacaaaaattggctcctacccttctaatatctttctaaacattatggaaacacagtactgatttcttacatggttattgaaacaacaagaatcctaaaaacccgcctagaaacttcacattatacttcaatgttttggttcacagtaagtcagtaacggatacaaactccacaactattaatcttaccacaagaatgcgtatttcatcaagaagagtatgccctctctctgcagcttgccttgcagctgtctcaacagaaatgacgagatctcccatcataagctacaagaagaacgaccataatgagtaaccattggaaccatcctgttaaaaaccagtaaatcaaaaacaaacacttactactggaagcttcagttcagggacatgttgtgacatggaaagcacatcagtagcatgatcttcacctctccactctttgttgagtttacaaataaaatcatcattacaaagcatcaccgataattcaacagtttcatacccaccaagatcttctatatcagtctctcttgttttatactttgaatctttcaaaccattgaaagccaatgtcattgccataggtacattgagacgaagcatttctgcaatattctacattgattggaatttgataagaatctaaaacaacacaactagaaatggctaattgattccaaattcgattatcaaagaatactcaaacctgaatctcgagatcatcaggaagctgttcttcgatgcagatactaacactaagctccaattcctgtttcttcttcggagctctccttctaatcttcctgtattctctcctctccgcaaaaacctgacccggcggtttcggaagctttctccagtctcctacggtgctgcgtaaagcgtggaagctccgacggaacatggaagaaaactccgatgaagtaacatcgagacgattcacaagagcagttttgggggaagagtggaagaagttgggttggaggagaaggagggtggcgcgtggcatttcacgcgcatgagcagaccagatacgattatagcggagggttgggcagacacgagagagcattggagagacacggaggcgagagaaggaggcgtctctgcacttctggcttaaagggtggggagatacaaatactaaatcgaaccgagattattaaaatctaaaccgaaaatgatttttatcataaaccggatggtcaacatttttaccaggaccatatgagaaaaatgaattgggggctgggggataagaaagaaggggaaatcatgaaattcattgctttttaaaccggatcaacgatcgaaccggaaaaatccttgggtcgcattcgcatgtcaacacagttgggaccgggtttgaagatttttacctccaaaatcagatgaccaataaaacatattctgttgaattcgatttaaccaataaaaactattgtcctttgcttctccttctctcccttctttgaacaagtcaaaattgattttaatccgtatgatattttccgctttctttgacttccctttgaaaattccagtcgagagctttccctatccatcgatttagggtttccgatttcgttttcgagcttttctcgctcttctctcactttttctttcctcctttggctcttttctccttcttcaatctctctcccatgactctaaagtctccaattcctgttagattccgaattatcatgatctgggtgcttaatcagatcgagatatctatattttgtgcttgaatcgcctaggattttctagtgtttacgcgtcttgtcatg

SEQ ID NO: 12472 - DNA, 3000 bp, Unknown
  misc_feature (1)..( 3000): cDNA_ID_2712108_gDNA_ID_2214553_Annot_ID_134724 3000 nt of promoter + ATG
catgggtatgcaggagttattattggcataagatgatagcggtcacgatgattttttcgtgggtcccaaacaggaaagctaaggtcatcttcttctattgcacaaagcatgactggattcggccagcgccattgtgtatatactctaaaaaatcgagaaaccaacatactaggaatagcatttggataaaactggcaaaggcgtgcaaccagaagtgcccagtttacaccaccaagaaatccagtaacctgctcaatataacagagattacaagagctttaacctaagaatattgtcaacagatgtaatattcagaaagacaccaccttacatttgaatagaccccacgcttcttagcccagtacttcaggcatcttaatgttgtccggaagtgctacatttgcacatcacatcagagatggcttacatgattccttagtttataacataaacaactggcactcaacgactttacctcggaatttggaacaagtttaagaatctgatcagcaaccctacaaccattaagactgcggacagtttgttcatccacgtcacacagcacagaagagttggagatatccagatcctgttaataaattgattccagaaaaaaaggggatctgcctcagcaagaacttataaactttgtcgagaactcatctcagtactcatatataaatcaagcctgatggtgctaacacggcagttcaacatctccatgttcactaaggctaacaatttcttataagaagtttctttgacacctcaacccttggaggaagtgtataataatactatgtgaccatcaacacgcaatcaatacacgcaccaaacccaccaaatgaaatccaagataaacatacaggtatcatgaaccaccccctaactttcaacagaaactgaaaaaggctatattgatgttacctgtgggataactagaagcgatatgctagcatacagaagatcaattgatattccttggaacttaaatttcatgactgggacatgggcatcagtaacaggttgaagttcagtcacttcttccatttcagccaatatatcacggaagaaaatgaagaaatcctcctgtaaaaataacctgttagcaactaaactaacccaccagacctttacatcagtaagacgaaactcaatagttacctctcggttaacataagatgggccaacacacaaagtatcaatatcagccataggtccgtgaacctgcaaaccaacaaaataaaaatttcaccctcaactagtaatgtagagacgaatacaatgctacttctcttcatttcagtgataattcaagatactcacaaggctcaatagaaaatatatgatccaagtaaaacctttccccaaactgattagatgcagttgatcttttaactttaaacttaaaaagaacttactccaaggcggtaagatccaaaagtgaaaatgacagcatttgcatcctccaccatctgatcagtatagcccctctgacgagttaactgtttcacccagtgttttacaatctatacaagaagtttaaggaagaagatgtgttagattagatagttagtactgtaaacaaaacttgaccattatgcatttcagtaaacaccactgtgagcctctttgacatcgaagagaaagcagctaacccaaaatctacatttcagtaaagcagagtaaactatcaaacaaatgattagcgcctataagtcacttgtgttcacatggcaaatgagccaataggattaatagaaggactagactacatattgctacaatcatcttataattacggcatagaaatcgttggtctacaacactataaaaagaaaatgtgagaaccagtctaagcattatcatcatgagaaagcaataaaccagacgctcttaatcacctgatcaatgcgaaccacaacttcctctctccgcatagtttcttccttgctctcgtagagcccctcatcaaccagaaacttcacaataaatcagccaaaacgcaagtcaatatcacattgttcctgaaagcaatttttcattggaacaaaaaaacaaacaaacacaacgctaaccttctctagttccaaattacgcttaacatcagcagcagaaggtccagcaatagacagtggctccgtgatcccatagctcttaagagaagcttttaccggttgagaagagtcatcgtccgtgcgttgttgagtactcaccatgacaagacgcgtaaacactagaaaatcctaggcgattcaagcacaaaatatagatatctcgatctgattaagcacccagatcatgataattcggaatctaacaggaattggagactttagagtcatgggagagagattgaagaaggagaaaagagccaaaggaggaaagaaaaagtgagagaagagcgagaaaagctcgaaaacgaaatcggaaaccctaaatcgatggatagggaaagctctcgactggaattttcaaagggaagtcaaagaaagcggaaaatatcatacggattaaaatcaattttgacttgttcaaagaagggagagaaggagaagcaaaggacaatagtttttattggttaaatcgaattcaacagaatatgttttattggtcatctgattttggaggtaaaaatcttcaaacccggtcccaactgtgttgacatgcgaatgcgacccaaggatttttccggttcgatcgttgatccggtttaaaaagcaatgaatttcatgatttccccttctttcttatcccccagcccccaattcatttttctcatatggtcctggtaaaaatgttgaccatccggtttatgataaaaatcattttcggtttagattttaataatctcggttcgatttagtatttgtatctccccaccctttaagccagaagtgcagagacgcctccttctctcgcctccgtgtctctccaatgctctctcgtgtctgcccaaccctccgctataatcgtatctggtctgctcatgcgcgtgaa

SEQ ID NO: 12473 - DNA, 3000 bp, Unknown
  misc_feature (1)..( 3000): cDNA_ID_2712102_gDNA_ID_2214553_Annot_ID_134726 3000 nt of promoter + ATG
ctttctcattagaaagaaaacgtatcctaatttgttgttttctctatgaatgttaatatcatctaataagtccatatagactatatctaataaatccatatagactattgtctctgaatatcaatggatttgaatctttggccaaaaaattaaacaaagagacaaatgatgtagaagtcacattacatagtgggagttaaaattaaccagagtttgcattaggttgcaataacgcttgcatttacgtcttgcggtgcttacgttctgaatctctttgtcgatgagcttgaagatagttgatattgggatcgagacttggttgtgaaccacatcattcctttgcttccacatatatcctaacatttatctaaacaatctggtgctagaagaaagagattatcaaactgatgcaatgacaaactacgaaacaccactccataacaaaaaaacttaaccgtatatcgatcctcaactttaggaataatcctaacgccgcacccacccggcacctggcacccaccacttgaaaaattcatagctcatggccagtagggaaccgcggaggaaacttactcagtccattgcgaggataaggacaaaagtactccttcaattattctagaaaaccaatcagacgttgacaaagaacctcgtttgaaagtacaactgctctacaagactgcattgcccactacaagcagtgaatgttgtccaccctcagcttctttatacgttcgtgaagcatgcatgtgcattttgttggtgcgcgcatagtaagccatgccatgcaattcaatgccaatggtttacgaacatatagacaagtaaagttttcaattatttcatgagtacctaaaaaccacattcatagaacagtttgcaagtattcgaaatttgggaaaacatgcatacgacctcaccgcatctctcaaaggccgaatacaatttttgaggaatgattaaacaaagaaatatttttacaatcacactaactacaatacgttcatgaagacaacgtaaatgacacgagccatttagcgcagccttcgaaatttatttagcgagtatagataaagtggttcaagccttggtattgatacacaaaattcacaaaccttgcaattttctttttgaacataaaaacaacaatattatttcaaatcaaacggaccacactcaaaactacatttacatataccaagaaagccaccatataattctagaagccagacggtgaccaagtaattggcatttattaatttacttaattcgttatcatctttccttacactagctatttcacaatcataaaacagaaaataccgatcagcaattaaacacacaaaaaattgtatggaaaatagaaaataaaattttagatagatcttttcaaaaaggtaagaacagtattaaaaaaacatacgtaggataatcataaaacttaatacaacatatagatccatataattattaaactctaatgagtagttgttgtggtttggtgtgtttgttgtggctgcgagtgcgtataatgtcccaactctttggctttctccgctatcctcatcctcgcgtaatccaccttatccgctcccatcgggtgttttccggtaacgtacttataaatccacgttaacgccgtagctgctgccaccccacaaccaccggagaataggaatcccatcgtcaaaagccctatcgttatcactgccggtaccaacaccgggctgaacagaaccatcaacggcgtcgctacgatcaaaccgatcaccgttccggttagtgttagtcctgagagcacgaggagtgataggccgatcgtagctgccgttacgaatctcactatctgccgagtcgatggtgatgattcatggagactcctcattattggttgttgttgttgctgatgttgttgatgatccgccatttctttttttctttttctaagagagtatggatttaatgttctatgttgtttttgtagctttaataagcttaccatttgtgattattatgaagaatgaaaatagactagtatgaaggagaggctaaacttaaacgagacatgtgtcgaacgacgaggcgtgttaggcaatggagaagagtgtcacgcgggcgtgtcagttctgcatggagctactttgacgaggtactgacacgtggttacttagttccgaattaaaatctcatcgtcaaacgatcttgaagcttattgggctattatctgggcttgtagtgactgtatattatcctagtgattatgaagttggaataccgtgggcttaataatatctgggcctgtagcgactgtatcatctcgggagacaaattatttgaaaataaaaacctcgatgcagatgtatcaacacgtggcagcatctggattcgaccgttgctgctttgctggtggtttacgttttttcccctttttaaatttctcaatttggatctgttccctttgtgaaaattactctctcttctctctttctttcttctctttctctcgctatcttggctcatcaacgatctcttccatggggatttctacagagacgcagcaaattgtaagaaaataacttgttcttggtttcacaaattccaatttcatttggttcttttgtcgaatttgtttcaatttagggttttacttccttgttggtttgcgttttttctctgcgtttggtctgttctaatggaatgtgatctgggattatcgatttggttgcttgattttctttgcgccagaaagaatcttgtttcaatgttctctgtttaatttgagaaagacttgttggtatgattttgagaaatttcatgatatgattgtggatttattcgtttacagcgaggaccctagattaattgacaaatccgtggattagtgttaaggagctgttgattttatccttttatcttcaagttttaaagtatcaatgattgtttgtcgtttatgattaagtgtatctgagagttgattggatttcaatctttgtgataatg

SEQ ID NO: 12474 - DNA, 3000 bp, Unknown
  misc_feature (1)..( 3000): cDNA_ID_3025327_gDNA_ID_2214553_Annot_ID_185633 3000 nt of promoter + ATG
taatatgttgaatttaataatccaatttgacctctttcagatagggctttggggacaaatcttcttaaatcgcaccaaacttttattataagataatttttggttcgtggctattaaattaagcctgaaaatttaaacatatgtttcacttacaagcgtcaagtatggataaacaatgattaatcataagctatcataatgacaaaaagaagtatgatcgttatcagttctcttatgcataaactattgataaaattataatagtcacgagatgattgatcgagcacgataactattataatagtcacgagagaatgatgtgaaagtttaagaatgcgtctaaaccaacaataaaataatttaaatagttataattgaatacacattctatattagtaaacattcaaattatttaaaatatctacgagacacaatagcctcccaacaaccattcgtacattcactttctcattagaaagaaaacgtatcctaatttgttgttttctctatgaatgttaatatcatctaataagtccatatagactatatctaataaatccatatagactattgtctctgaatatcaatggatttgaatctttggccaaaaaattaaacaaagagacaaatgatgtagaagtcacattacatagtgggagttaaaattaaccagagtttgcattaggttgcaataacgcttgcatttacgtcttgcggtgcttacgttctgaatctctttgtcgatgagcttgaagatagttgatattgggatcgagacttggttgtgaaccacatcattcctttgcttccacatatatcctaacatttatctaaacaatctggtgctagaagaaagagattatcaaactgatgcaatgacaaactacgaaacaccactccataacaaaaaaacttaaccgtatatcgatcctcaactttaggaataatcctaacgccgcacccacccggcacctggcacccaccacttgaaaaattcatagctcatggccagtagggaaccgcggaggaaacttactcagtccattgcgaggataaggacaaaagtactccttcaattattctagaaaaccaatcagacgttgacaaagaacctcgtttgaaagtacaactgctctacaagactgcattgcccactacaagcagtgaatgttgtccaccctcagcttctttatacgttcgtgaagcatgcatgtgcattttgttggtgcgcgcatagtaagccatgccatgcaattcaatgccaatggtttacgaacatatagacaagtaaagttttcaattatttcatgagtacctaaaaaccacattcatagaacagtttgcaagtattcgaaatttgggaaaacatgcatacgacctcaccgcatctctcaaaggccgaatacaatttttgaggaatgattaaacaaagaaatatttttacaatcacactaactacaatacgttcatgaagacaacgtaaatgacacgagccatttagcgcagccttcgaaatttatttagcgagtatagataaagtggttcaagccttggtattgatacacaaaattcacaaaccttgcaattttctttttgaacataaaaacaacaatattatttcaaatcaaacggaccacactcaaaactacatttacatataccaagaaagccaccatataattctagaagccagacggtgaccaagtaattggcatttattaatttacttaattcgttatcatctttccttacactagctatttcacaatcataaaacagaaaataccgatcagcaattaaacacacaaaaaattgtatggaaaatagaaaataaaattttagatagatcttttcaaaaaggtaagaacagtattaaaaaaacatacgtaggataatcataaaacttaatacaacatatagatccatataattattaaactctaatgagtagttgttgtggtttggtgtgtttgttgtggctgcgagtgcgtataatgtcccaactctttggctttctccgctatcctcatcctcgcgtaatccaccttatccgctcccatcgggtgttttccggtaacgtacttataaatccacgttaacgccgtagctgctgccaccccacaaccaccggagaataggaatcccatcgtcaaaagccctatcgttatcactgccggtaccaacaccgggctgaacagaaccatcaacggcgtcgctacgatcaaaccgatcaccgttccggttagtgttagtcctgagagcacgaggagtgataggccgatcgtagctgccgttacgaatctcactatctgccgagtcgatggtgatgattcatggagactcctcattattggttgttgttgttgctgatgttgttgatgatccgccatttctttttttctttttctaagagagtatggatttaatgttctatgttgtttttgtagctttaataagcttaccatttgtgattattatgaagaatgaaaatagactagtatgaaggagaggctaaacttaaacgagacatgtgtcgaacgacgaggcgtgttaggcaatggagaagagtgtcacgcgggcgtgtcagttctgcatggagctactttgacgaggtactgacacgtggttacttagttccgaattaaaatctcatcgtcaaacgatcttgaagcttattgggctattatctgggcttgtagtgactgtatattatcctagtgattatgaagttggaataccgtgggcttaataatatctgggcctgtagcgactgtatcatctcgggagacaaattatttgaaaataaaaacctcgatgcagatgtatcaacacgtggcagcatctggattcgaccgttgctgctttgctggtggtttacgttttttcccctttttaaatttctcaatttggatctgttccctttgtgaaaattactctctcttctctctttctttcttctctttctctcgctatcttggctcatcaacgatctcttccatg

SEQ ID NO: 12475 - DNA, 3000 bp, Unknown; identical to SEQ ID NO: 12472
  misc_feature (1)..( 3000): cDNA_ID_2990871_gDNA_ID_2214553_Annot_ID_185632 3000 nt of promoter + ATG

SEQ ID NO: 12476 - DNA, 3000 bp, Unknown; identical to SEQ ID NO: 12471
  misc_feature (1)..( 3000): cDNA_ID_3025329_gDNA_ID_2214553_Annot_ID_185631 3000 nt of promoter + ATG

SEQ ID NO: 12477 - DNA, 3000 bp, Unknown
  misc_feature (1)..( 3000): cDNA_ID_2990145_gDNA_ID_2214553_Annot_ID_185630 3000 nt of promoter + ATG
tggaaactagaagaagtgaaatgtaagtgtctaccaaaaaccattattccttcttcagaatatatgcagagttcagcagaaccagttcagagattgacataataactttctcgtgagctgtgaattcacagatcttgaagtggagcttcctgtaatgtatattcttttcatttttggtcgatataaacagcatcaacatcatcaagttctagtagtttctgcattagctctttgttcaattccatggcctcatcatccacctgcaacaaccaacaacaatcccaagtgattacattttccaagtgaatcgttgatgaatactgataagggtgtgactcttatttgggcggaacaagaagttaaaattaacgaacgaagaacacaaacaaattttctataagtttattgccatttccaattatgcttatgtagcatatgcaatttacaatgtatttaacacgttaagagaagataaactacatgttgacgataaaaatagaatcaataagttaatattagacagggcacagaggttacagaacagagcgggagatttgatacctcaactgtagtcagagggagcagttcagagccattgtcaggctcgaagttcactccttcatcacgtagctttgataatattgttgagtagttctcattagaagttacaattttgtagtacctgaacagatatagagacaagaagctgatgaaacaaaaaaagagcataatagttatgagtcacctaggtatcatctcgtcttagattggcaagatggatttcttatttcaaatcgtttggtgtgaaacttttattgcaatttagctgtttatgagaagaaaatacactaggtctaccttcagtcgcttgattactttttcaattcaatcttgaaagaaatttctaacgcatttgaataagtgagtcgactatctctatcttccctaacttaggattcaccagcaacagaaaataataaatgtaatactgacaagaagaaaagaaatgcggaaagacattatattggttatatacctctcttccctgtcttcatcagtatcatcttcataagttgggggttcaataacatcctctgctccagcatctaaagcaataataaggagctgatctttgtcagcttcggtgacctttatattcactaccctaactcttttaaacttgaacatgacagatcctgaatcagccatttttcccccataatccttaacaaccgatctaatagctgccactgatcgattaattttgtctgttaagacctcgactaccatactaacaccaccgtagccatatacctaaagcattgaaaacaagtttattttagagtcatcaaatcttataattggacccaaagaaatgataacgaggaactggatttatggtcctgtaaattgaacaaggtgctgaggtagtgaagttatattagctacagtaaccacatacttggcctgatagagtgatgaactaaaacagattcataggttttaaattaccaggccatttccccaccttactaggatgattcaccataacggccccacttacaaacataaaactagaattgaagctcatgacctcacctcgtaaatcttctctataaaagcttcttgccccttctcagaagccctcttaatattacgctccacaatgtctttcggtacatccagttctttagctttgtcaagaatagtagctagagtcgtatttgaaactgggtttggaccccctttcttgacactgcatgatgataaacccacagatgatactttttctagtaagcatatgtccataacaaagtaagaagttgaatccaacaaactaaacaccatctatatctacaactaatgtgcaaaatttcatctcaaaaaaaaaagatgcaacattgtgaaaaaaatgttgaagacttacgcagatacaacctccttgccaattctacagtatagcttcgccttctttgaatcttgagcgccctgtaattcaccagaaacttcaatctcaaaagttcttaaatacaatcttcgtcttggaaaaagagttttatctttctgctctgctgtaatatgtaattctcatttacaaaaacaaaccacaactttcaagaggaagattgttattcacattctgaaattcatactacacgagcaagagaaacttccactataggcttcacaattcaaacatggtgaattagctaatagctttcaagagtgacataacactgaaagctagactctttacaataacacaattaattgatataaacccataatcaaaacaactctctctatctgaggcatttcatcaaacaggtgtttggcataaacaattacgagctctagactcatcaaaacctataaattttatatttttaaaacctagtaatagcaccaacgcacttctaatctatatgaacccacaaactcagaagcttaacgaacctttcgaccagcgattttggaagaacgacgacccatacaaagaggagttgaaatcgaaatctttctgagttgaagcttgcggaagcagttctggtcatctgattgttgtgacgcagccgtgaaatgcgaagtagtagtgtggggagagattgaggaaagagacgagagagtgttggtcatggtaagactaagaagacgatggttagtggagttgagaatggatctggaagagacgccattggagaatctgaggaggattactctcatggagcaatgggaggccatatagtctttggtgtggattgagaatagagggaatgaggtaatcaatcgatttctcaatgttatattggtttaaggtaagaaactaggataagcgagtaaaaaacttctttttgcttggaaaaagttgcgattgtgattttgacttgaaatctgttgttgagccgcgtgaccctcacggactcaaaaaccaatccttcctttgcttataaaccccaatcttcttcttcgagagagagagtgaaagagaagaaaacgaca

SEQ ID NO: 12478 - DNA, 3000 bp, Unknown; identical to SEQ ID NO: 12469
  misc_feature (1)..( 3000): cDNA_ID_3025333_gDNA_ID_2214553_Annot_ID_185629 3000 nt of promoter + ATG

SEQ ID NO: 12479 - DNA, 3000 bp, Unknown; identical to SEQ ID NO: 12468
  misc_feature (1)..( 3000): cDNA_ID_3025339_gDNA_ID_2214553_Annot_ID_185625 3000 nt of promoter + ATG

SEQ ID NO: 12480 - DNA, 3000 bp, Unknown; identical to SEQ ID NO: 12467
  misc_feature (1)..( 3000): cDNA_ID_2712136_gDNA_ID_2214553_Annot_ID_185624 3000 nt of promoter + ATG

SEQ ID NO: 12481 - DNA, 3000 bp, Unknown
  misc_feature (1)..( 3000): cDNA_ID_3025345_gDNA_ID_2214553_Annot_ID_185620 3000 nt of promoter + ATG
tggcagttttttctctctctacatactaaagaataactgaaaatttagtagtaaataaaataaaataggcattagttgaactcttttgtaaattatttcttaaacaagtatttattttgaaaacctcttaaattacagttattataaatctattcaagataacgatacaaatattcatggattttatagtttttttggtttttaataatgtaacgatttcaaaaatatcatggttaggagtaatttttagctattagaaatcacctaatcatattttaaattactctaatataccaaaagaaatgtcttcgaagtaaagtaacgatttaaaaaatatcatggttagaaataatttttagctaatagaaatcagctaatcgcaatgcacaataaacaaatttcgtataaatatttttttttgtttagggctgtatacatcaagcaaaacaaagtgtaaatcaatagttgtggtagctagtgttcatttatttgctgaaaccaaggcaaaaccgaccagacctcaataacactcccgagaaggacctggtgagggaaccaaaggaaacaacccaaattttcaaagagagcaaaatccgaactcatcttcttatagaagagggaaacatgtggaaggcattcagagagcctaacttgtagggatctctttatcttactatgttttaagagagtcctcatatgtcaaccagcaaaaggaatattcgtatgcgaggagaagaatgtagatcttacatgtagatgtgtgaattctgatggatcccaattacaggacaatcaatgttgatcaagacaaaaacactttggttctcaaagactttagaacaagttactacaatttttctcttcatattagattcgccacaacagaggatctttaaatacacaagaatataaactaactactaattaaagaacatgaaacatgggaaagaaaacacatttcggcaaactaattaaaataactaaaactcttggccacgtcatcttcttcctcaagttgcatctcatcattctcaagaaggtagaagcaaaatcacttttaatttactagaaagccttagggcaaggttacacacaaggtcacaaacaaagaagcaaaaataagaaagaacgaagacaagcaagttgatcgacgcaagacctaagaagtatttaagactaatcctagattcactacccagatattcacaaagtgagtgaacgtggaaagagaaagtacacgaagccaacgcctgccacaaagtggtgcattgagatagtcttactttgcgagaggagcatggagcccaatcacatgtttcctataagatatttgaatttttttcaacattttaatcatccatgcatacaaatgcgcttaaagagtttactgatggctattgtaaagatttttttagttgctacgttgtaccttgatacaaaagtattacccgtcgtttttggaaacgttccaggataatccatttttatacaatatcttaattggttttatacttaaaccatggaaaaatctcttagtatatcctatgattatgtaacgatgtcaataaaagatgatcatactccctaaagatactcccactgggtcgtgcaaagaaatatagtaactatgcatggccgcatgggtatgtgcatacccacgaatggtgacaaaagtaatggtatgctgaagtcttttatactttattccttttctgtccaaataccttttttatccttacgaagagctgagtgatcttaacagatacttgtgctagtgatatttagacgttggtgtaaacacaagagcagttttatcaacaatgcatttttaccttgagcataatccaatatctttgagcaacatccttaaattaattagcatcatccaatatcaccttgagatttcaatagagcatgttcctaagttacttacatgctctcctatatatcttttatacatacatcttttggataagaaaaaaatagacatacgacattaaatgtagaataacaagcgcaataaaaactcacttatcctttgattataaagttggctgaggacataagcaaaatgtgagacttgactacccttgtgttctcgtatttcgaataatttatctgtttacactcgctacaaaagttatcttttcaaaatagctgtgatttttttgaaattgatacactgacttgaaacattaccaaatgacaaatatctatcacttcaaagaaatccttgcatttattataagatactctccataaaaagagattgtcatctgcaaaattggtaggttagtccgaaatattttgaaaacatgttaaattattattttctcctatataaagatagttcaacccattctttagatgtttcatgttcacatctttccacgtattgcagattttttaagtttgatttgttcttctcaaaacatagttatgaatatatagtttatgatgcactattgtgacctcatcacatgatgcaaattgaacatctcttccaaacacaaatcgatgattaacattccaatggatgtgttcagcaaaagctttcctaatggtcaacccataaacaagatcatggtgaggaaatctagacgaacactcgaaccccaacattttgtcgtgatcattcatagccgagaagagatcatattccgagtcaaactttgaaaatttgacatttctcttttacaaaaaaaaaaaaaaaaaaagaagacaaaataactaaatggatcatttgcaaaaataaccatatttgataaactatttaagtatatagcactatatatgtataaattaaaaaactaacatagagggcaagtataatgaccaaatgtggtggtggtgatcaaaagtgatggtggtagtgactagtgaccaaagatggtgatgatggtggttattgtcacggtgctggtgggagtggcaaaaggttgtggtgctgatgggagagattaaaggtggtggtgatggtgatgatgattaaaggtgatg

SEQ ID NO: 12482 - DNA, 3000 bp, Unknown
  misc_feature (1)..( 3000): cDNA_ID_3025324_gDNA_ID_2214553_Annot_ID_185634 3000 nt of promoter + ATG
gaaggaaaatgattgattgcagagtgcgtctcttgttgttttgttcatgttcggttaatctttcattcgtttgcctttgcacctttgcatcttacaacataaaaaatgttccggatctcttgtgaacaaatccatctcatttggttacctgcagtaacatcagttaacgttaaccaatcaattggtgaataagttaccgatgaacaaaagctgttgtaagtttgaaaccattccgaacaatttttatttaaaaagtgatgtaggattcgaaaataattggagtaaagttacacgaatcttgtggctatataaacttcgtagaaaaatgtagtacaaatacttttggaacacagcaattacatatatagaactatgaaatggtcagactttttgcagtaagtggtgcaaagtgccaagaatgcaatcttaaatcttttcctagcttcatcgcttcatcctctgtaaaggcctgatgggtctgcgttttgcacaatccacgggtgttcaagaagcttgtgcaaggccaaacgttgcgtagactccttaaccaacatctgtttgatcagaaagtgtgaaaatcagaattcactcttcaaatgcacaaacacttagagagatttacgaggaatgcgagtagaaacctggctaatcaggtcctttgcagatgatgacacaatgggtttgggagggaacttgagatccacttgaacaatcctgtatcatttgtcgaacaaaacccttctttaatgtacattccactgaccaaacatcatatactaatcccattctacgcttaatgaacatgttaccttttgtatgtctctgaatgctccctggcctcaaaaggaggaacaccataaagaaattcgtagcagagaattcctagactccatatatcgacactcgcatcatgttcaacgctttccactgtgaatccaaaagcagaaaagtcaattagctggttgccgaagaaagtaatttagaatcacacaagagagagagagctttctcttacccatctcaggtggaaggtaatccaaagtgccacacatagtccttctacggttgaatgtgtgtactgaccatccaaaatctgcaatcttgagctcaccctgaaaacatatatccatgaatacataaacacataagctaactgcaatcacatggcgttgatggagaaagataaccagattcaatttgttacctgagcaccaatcaacagattttcaggttttatatctctgtgaattacatgctttccatggcaatagatgagggctctagccaatgacgcaacatactgccacaataaacgtaagggtatgactacacagattcacattaacatgctagaataagttcaattatcactaggacttacagttgctgctcgacgttcgctgaagtacttgcacttctgaagctctttataaagctcaccccttacagcatactccaaaatcaaataaactcttttctgcaacaacggtatcccaaaaactatgttaacctcacagagccaaacattgtatgtcaacaagaagttcttttacaagcacagataacacaaaacctgatcatagaagtaaccgtagagccgcagaatattgggatgccgaagatgagattgaatctctacttcccttcgtaactggtgttcaacttgagattgttgaagctgagccttaaaaagaacctttaaagccacaatgtgatcgctctgtttgcaaagacacatagaagacagcttggttaaaaaagacatcaaattaattctgcttgtttaacataattgtgaagaaacactaacccgtttctctcttgctagataaacatggccaaactttcctctaccaagtggctttccgatatcgaaatcgcttgtagtccatctcttttgtgcagcctctgaagccgcctgatacaacattatcacaaagattgaaatccaatcaactctcagatacacttaatcataaacgacaaacaatcattgatactttaaaacttgaagataaaaggataaaatcaacagctccttaacactaatccacggatttgtcaattaatctagggtcctcgctgtaaacgaataaatccacaatcatatcatgaaatttctcaaaatcataccaacaagtctttctcaaattaaacagagaacattgaaacaagattctttctggcgcaaagaaaatcaagcaaccaaatcgataatcccagatcacattccattagaacagaccaaacgcagagaaaaaacgcaaaccaacaaggaagtaaaaccctaaattgaaacaaattcgacaaaagaaccaaatgaaattggaatttgtgaaaccaagaacaagttattttcttacaatttgctgcgtctctgtagaaatccccatggaagagatcgttgatgagccaagatagcgagagaaagagaagaaagaaagagagaagagagagtaattttcacaaagggaacagatccaaattgagaaatttaaaaaggggaaaaaacgtaaaccaccagcaaagcagcaacggtcgaatccagatgctgccacgtgttgatacatctgcatcgaggtttttattttcaaataatttgtctcccgagatgatacagtcgctacaggcccagatattattaagcccacggtattccaacttcataatcactaggataatatacagtcactacaagcccagataatagcccaataagcttcaagatcgtttgacgatgagattttaattcggaactaagtaaccacgtgtcagtacctcgtcaaagtagctccatgcagaactgacacgcccgcgtgacactcttctccattgcctaacacgcctcgtcgttcgacacatgtctcgtttaagtttagcctctccttcatactagtctattttcattcttcataataatcacaaatggtaagcttattaaagctacaaaaacaacatagaacattaaatccatactctcttagaaaaagaaaaaaagaa

SEQ ID NO: 12483 - DNA, 3000 bp, Unknown
  misc_feature (1)..( 3000): cDNA_ID_2708989_gDNA_ID_2214553_Annot_ID_134729 3000 nt of promoter + ATG
agatcaaataggaaatttgtgacgtatgtttgagaacaaaaatgaatatgaaaaaatagaaagtctgcattttattacatgatattaaatttgtgttttttttttaattttagtacaatttaagtttgtaaaaaaaaaataaaggtcaaatggacccatagagtgagggggagcaaaacatagcttataactactttaacaatcaacgaaattttttttttctccgagaaactaaattaaaattataaaaaatgataattatttaaaataatgataaatgatgcatcgttatgaaagaaatttaccaattaaatgtttttttgtatataccttataaatataactaaattttttatgtacataatgtcatgagtattatttaattactaaaagaaaattgtaaagtagtttaataacaatgtcatgtgaattatttatttaaggaaaattagaaaataagtataagaaaacatgctaaagagagatgtaaaaatatgcaaatgaacactatttgaaattcctaaagcaaaacaatgtatttaaattaaaataatagtataaaataatatttgtgtggttgatataaaaaatttataataataatattataaaagaacgtggaaaatatgtataatttataggcaatgtgcttatgtcaaatatatattggaacctttgaaattttaaaattattataaatttttgagatatatatattgattaagaatgactaaaatcctaatacaacccaatccaaatatgaggataactttataaaaaacggtctatttccacacgagaactatcacatcatactagatagagcccattctttaactctggtctatatatccatgaaatcaaagttgtcttcttatttccctctgaattgaaagttctatagcttaatgtccctaaatctgggttatatcggtttgtgctttaaacccaaagtaaaccgaatatataaaccattaagtttgattctaaaccggtatcatcttcttcttcacccgattcttcaaacaatcaacaacaattgtgataaatttgatatcaaaattacaaaagctcattggagcttcttcactcgtcttcttcttcaacaacctccgtatctccgatggcgtcttcgccccacacaaacgacggcggtctcaacaaacgtaagaatatcttaaacaagatcagatcgttgatgaaacttatgtcatgggaaagaaaaatgagcttagcaatgattctagaagaatcgaatttttgattgcaggtcgagatggtggtaatgggatatgctctggttttttttattcgattgaatttgttcttgattgttttaaaagtatggctaatgattttgattttgtaaagacaaacaaaaacacatccctttaagaattgtttcgattgaattcggattattgattttgtttctatagctattgagaatctaaaagctctcagtgtttctgagatttgattaagaaatctgaatcataatcgagttatggttatgattatgaagtacaatttttcaattgtttataatcattttctacgtgatatgacgatggaacacatccgcaatgatatttgctgctcgcaagatctaaagctttgtttcttaattacaatctacaagaatgtttaaggggatgtatttttttgtttgtatttatagattttaagaaactcgtgcgttttattcttggtcaaattaataagtcaatgggtaaaattgggttcattccggttacaattaggtttagttggtttgtttatcggttttgtatatagtaaaccgattaaatctagcttcgtggggttttagctctcgaacatttagtacgggggcattaagctataaaactttctattcgaggggaaacaggaataaaactttgattttatagagatatagaccggaatcaaagaatgggctctatctggtatgatgtaatacttctcatggagaaatagaccgttttccggataaacacactaaaacaatagttacattggagacgaccaaatttaagaaggaaatgagctactttcattttttttactaactaaaaaaagttttacaaaaaagtttcttaaaaagcccaatcccaagcccaaataccatctcttttttttttttactaaacccgattccgtgggaacgaacccatccgttggtgaatctggacagtcccctcaaataaaagttgtgagagctgtttcgtcgctttgatcgaaatggcgtcgtcttctccaactcagctagctcacgtcccgattcctccagaaccaggtcccttcttctctttctgtttgcttctctatccctcaatttgctttgtgatcgtttcaccaagcttcgctactagttattatcttccttcattccattgcgatcgcttagcttcgctgtttttgatgttaccatattcgatctactaaaatccctcagattatccaatataattgtgtagtttccgcttttaatcaatttgattgaggataaaccgattagatgttcacgtcacttcgtttctgatcgaaaatgtgggtttagccatctattttcgctcgattcttgtggcgtatacatgcttaagttcttcgtgtatgagtttggatttgatcagttacaaaatctctgtttgcagctattagtgtatactaaaaagcgatttttcgtttgatttctggaatagcaaagattaagcgaaatgttgattgttagtttcattttcagcaatatgtttgtatttggtgtatgcaagtagtgggatattgtcatgaatctcttgtctcatgtttgagtttttcgcttcaggaggaaggtcgccgacacaagaagctaatgagccaccagttccgatttacattgtgacggatccgtttcaacttcctgctgatttcctaaacccttctcctgaaaagaaattggttatcggttttgactgtgagggtgttgacctctgccgacatgggaaactttgtatcatg

SEQ ID NO: 12484 - DNA, 3000 bp, Unknown
  misc_feature (1)..( 3000): cDNA_ID_2712165_gDNA_ID_2214554_Annot_ID_134738 3000 nt of promoter + ATG
aaagaaagtaaagaatggtcaaatctttttaacaatatactattagaagacactgaatgcgatcataccagcactaatgcaccggatctcatcagaactccgcagttaagcgtatcaagtgtcgttaaagactctaggcgaagcttagaggtcgccggttcgagtgacgcttgagacgaaactaatattacatgctgtagtttcgggcctggagggattacgggattcggcccaaaacctcctagtattcagaaaaaaaaaactattagaagacactatctcaacattaagactccatgtgatcgtagtcgtaggtgaggaagtgttgatgtttacaatatactagatccgtacgtgcgggattttatatttttaattcaatgtagattattttcttattttgtgatatatattatagtacaatgtattagatatctgaactcgcatatacgtacaaaatataattttttaatagattattaaaatatataatattttgttataagtaaactttgtaatagtatagatattataaagttaagagtaataatcaaaattcaattgtgttcctgtatagttatattttaagatccggactcacacagagaaataacccaaactaaaatcaaatttatatcctattttacactagtaattaaactgttataatgttttgattagtttagaaaataaaaacgtatacttgacttatatttcttggaatggaaaacctgtgatgtatctatcataaattcttcgtcacataacccgtctgtatatgtgaaataaaaatactaccaacctgtaaccatcacaaatagaatttgtgtcacaaaatacgtacatgcagggttatgtgtgtaaacaaatttattttatatagtgctcataacccaaactcataccagttagatatttaatttgatgtccagttggatttcaaattattttatatagtacttccgtttcttttcatgtcgtttgtgtctcataattcctattttcatttcgttccattaaaaatacgttccagaattcttatttgcttcctttaaataccaatgtatatatgactgagttttgcggattaacatataggatgttaaagtttacaaatatatcataaataaaaacacacaaatatattttcttgattttttttccttcttcaaactcaaaaatatgaatagcattataacatataattttgtaaaaaaaatatattttaacaaatgtaataatgtttatttccttagctacattttagatattcttctttcccttgtttaatcataattaattggagttttggaatataattaaaattttgaaatacacctataaaagcaatttattttgctggataattttttttgaatgaaaaatgtataattagtttacattatttctcaagtttgtttaataatatattatggatttatttaaaaaaagatctggttgaaaaaaataaaaaataaaacccaaaatatttggaaattagtatgtacaatttattgcttagatatttctaaatgtaaggcataatgataattacttgaaattaattatttttgttttatttatagtaaatataaatctttgtaacatataatctcgtttttagaaattttgaaataaattttcgttttatatttcaaaatacttaacccaaaattctaaaattaaatttatttatctatcacaaattatgattttttattcatggtatcaagcaagtgttatgatttaaaaaaattttaaaataaaaattaacttccaaaatgttagtttaataatatagtataatttgatatgaaatcttagtttttcaatttttattggttaagaaattttaagaaataaattttaatttttcgtccataattaataggaaatagaaagtgagtttaattttggaaaactaataattgcttaaaagaatattaccattttttatatttaaatctattaattttgtgattactattgtatctttaatgaatttatttaaaaacacttaaagtcaatagcattctatgtaatattttacccttcataaggttgtttattttcaatgattccgaattaatagtatagatacaatggactagatatatgtatacttgtctatacaatatttattcgtgacatgattggttgatatttgttagaaagttcaaatatcatgttataaaatacagtacgaaagccttcaaatattaagtctttgtttttcattttgggctaaaatccaataattgcaattttttaattttttttctgctggtgtacagtataaataaagactttgcggttgcaatatatcaaaatatatgaagcaaagcaaaacaaaacaacaacaaaaaaatgatagatgagaaagatattccaaagaacttgagggaagaagaagttagagacgataatgtagaatctttgaaaatagtggggcatgtagaaaatcaattatcgagtctaaaatttttcaaaaaatttggatgcatatcgagaagacgccactagaaatttttgatgcaataagaaaaattagagatgaatttcaacgagattcgagctttaagaaaagacaaacaatactatagttatattatattatattagcgtagaatgtatgcttaaaaattataattattaatttatgatattattgagatcatatttttatataagaatttcaaaaaaattataatcttattattttaacaatttcggttaatttttacattgaccccagcttgaaaccgataagatttattaatttatcatgtttattaatttatcgactattaatttatagagttgctacggtagtacgaaagcttcatatcttaagtctttgtttttcattttgggctaaaattaataattccaattttttttttttttttttgctggtgtgcagtatatataaagacattgcggttgcaatatatcaaaacatatgaagcaaagcaaaagaaaacaacaacaacaaaaata

SEQ ID NO: 12485 - DNA, 3000 bp, Unknown
  misc_feature (1)..( 3000): cDNA_ID_2712161_gDNA_ID_2214554_Annot_ID_134740 3000 nt of promoter + ATG
cacgtagatttattctatccatactaatgcatgtagcaactttgtatatttttttcattagctaggctaaggtgtgtatatatatgagttaaatctatttaacacgtcggctctggaccattgtaaaccataatcagtacggatcaatgctaagtcacaaattcatctttggcttttgagccataaaaattatatttagctgatatgagttaaattacctcaagtttaccgctacaaataaagagattgtcatttataattaaaaataggatttacaaagttattttattcacacataaatctaacagtttcgaaattaagctaaacagattaattgtgaattaaaacaagaagacgattaaagtttttgtcaattcagatggataaagagttaggtttaaaaaatttctaaaacaataccagaatcatagaaatagcaacattgttaggaattctattttaactgttctaaaactccattcacaaaacaatatttaatcaatctcatctgtactgattatctatgcttaataatcggaatcccaacttacgtatgtaaatttctaatactaaacaagcattaatgttcaagtttgatatattcacaaaagtatctaaacaaaacctatttgagaatagctactttttcctacttaagatagttcaagtactaataagcacactctcgtgtcaaacttattatcgtaagatcaaatattagttagctacactagaattagtattaagaaaaatcaaaagtgaagaactctatgtattttatcataacaggttatcgatctataaattcatctaaatctctatcgagaatccctaaacctaacaagaaaacgactcagacatgatcatgaaagcacaaaaaggatttgaatagaatcgcataaagaacataagaaataatagattttaaacagtttttttctatattgaaggttttgaagtctctgaaaagattcttcaaaactcttagagaattgcaaagtagaagaaaacttgataaaaaaaaagtgatatttgtaaacaatgacctgaaaaatctatttataagcaataaaacgttcagggactaagtggcaaataaggatattttcttggagcaaatttgttaatcttcaaaacttgtgctttacgtgtggcggtctatggttgcaaagagtgtcgaccaacattaatgagtgtcgatcaacacggatgtcatggtatgactccaaattcatttttttacctaaacttctttggtttcactctaaaatgctccataatctccaatctattccagatcgtgtaaacatctgaaaagactaaaaattaactctagaaataattaaaaaaaaaaactctaaaaataatatatataccatggttaaaaactgtaaaaaccataatatattacctttctaccctattaccttgatcattctaccaaatccatattcctagcaaatcacatcaaatcccaactaccatataattctctctaagtattcacaacattccaaattccaaaccaaattccacaactatatccaatcagcattaattgttggatcttatcaataaagctaatatccaagaaccttctacattcattcttgtaatgtactttaatactttaatactctttttttcccgagacttttttttcaaatcattctttcttttaatcaaaggattacttatatcatcagaaaagatcatcgacatccttccaacctctgtgtgatcaatccacttttacgtttagggtagaccataactctcacgttgagggtagaccattacaaatagtgtgtgtgttgtatttttgttgctttatttcaatttcttacagccgggccagatttttgatataatttgggagttagttcttatatctcgtgctcaataactctttatctctgataatgaaccgaagcatctacagaaatatataagggttttctgcaaaataaccttccaagtcgatctcgttgcaagtttaccctccaagtccgaattatataagtcaatcccaccatctctacagtcacccgcaatacaaccctccggtatatcgatgacgtggcactcgataactccgttgaaaaacataatgattttgtgcaaaaaaaacctcaatataatttttttttgcaaaataaaccttcatgtcaaataaatacaaaccacaatctgaaaaatctcctgcaacatagcccttccatgtatcgatgacgtgacagtcgataactcatttagagcatgtgcaatggatagagattttatgagtcatttatttaaggtgcaatgtgcaatgggtaaacactaaaacttaaataaatgataaccgtaattttaaataaaaaaacaaaattaaatttttgaatcaataactgtaattaggcctgggcataataaccggacccgatacccaaaccgatacccaaactgaaaaagctgggttggggcgggttagggtaaaaggatattacctcattgggtttggttttggttaacccgtgggttcgggttcgggtagggtattactcattacccattccgggtacccatacacccgattcttgtgcttatatagatatccctatatatcatatataacctatacacctatacaccactacttactttttgtcgattcagttttcttcacgaatcccttgaatatcggcttctcttgttaaattctctttgaaccatattctatcaaactggaaacccttgtcgaaacactctcggcgacctcaccgtcaccgacgatcctgttaaacccaccacagacagctcaatcgcgaaatcattctaaggtaagtacgttcatgcaatttcaattctaggtttcgattattgatctcaatctctgattagtttcaaactttcaagtttcaattctcgatttctcagttcctagtttcgattgttgtttgcttgtttcaattcaattctcgatttctcagttcctagctccgattgttgtttatgtag

SEQ ID NO: 12486 - DNA, 3000 bp, Unknown
  misc_feature (1)..( 3000): cDNA_ID_3025373_gDNA_ID_2214554_Annot_ID_185661 3000 nt of promoter + ATG
atccctaaattttttatatttattaattaagagaatgaatatagaaattacacctaaaattaaacccaagaattatgcgcaaataaaagtctcttactagtggttggttggattattctctaaatctcgattattgactttcttaattcagttttaaatgttttcaatgaaagtctattaattatcgactttttgaattgagttataagtacttaaaatgtttaataaaataaaagtagtataaaattttgagttttataaacgaaattatagttaaagtataaaaaagaagtggtgtattgaaattttggattttgttttcaatgtctaaaatctagaagtgataaagtaattatataaactttatgttttatatttattttctaaacataaactaaagtacaaagtaaaatttagaacctgacgtttcttatttaacgaggttgattttttctaacttcatttaatacacttagattcaatacctttatcaaatggattcaactatttaatcctttgttcaacacccattgtaactagttttaaaatcctacttttcaatattcacaaaccaggaaaaaatgatgaagaactcttctattatattggtactagttttctttttcttcatttcttcttcaggtatttttaataaaaattattcttattgtttgatatattagttttggttatttaacttgcaaaaatggcatgcaaatcttgttgttgtgttcttgtagtaaataatttttatattttcattttgatagtaggagaagcaaaaacgtgttctgatggatggacttgtgtaggagaagacaaatgcaaagtaaactgcatggctaaacacaaaggagttggaacatgtactttgtatattattccttctttccctgctccgataacttcttatatttgcgattgcatgtttgattgctaacctttctgttcaaactatctttgtaaactattaaatcttatgataaaggaataaattaaaaatattttttttaatcaccttttttgtatcatttatcttttatatattcaaggtgctattatataaaacttgatatttctcaaaagaattagacataaatcaagattataattaacaagattatcaagatacatgatttacttaagttgcatcatccttgatggagcaccggtcatcctccatgctaaaggtctttgaaattcaaagaaaattaagagtttttttattattattaaaatctcatattaatcaatataatattggaggattttcaaaagtaccatttttctattgttcttttgcaacaatatatatcttttcttgttggtcattttttgaaatatctcttttcttgaacaaaatgatcaaattacttatcattttatgagaacatgtgagtagaaactaaattttttagcgcaaaaaaattatttcctcgccaaaagaaattgcatttaaaagctcttgtaaatcctttaacaactcttaaaaaaatctttgctaagttttttaaaccaatttaaaagctttgtaaagttgtaaaaaatgcttgtaaatcatttgaaaacctattaaaaattttataaattctttaaatacacatgtaaaatacttgaaaaccccttctaaaacctttataaatatttaaaatccttgtaagtgttttaacaccattgtaaatgttttttaagggtttaaaaggctttaaaaaaatattaagactttaatagatatttacaagaactttttaagacttttttaaaggatttacaagagttttttaaagggttttaaaagaaactaggggaaaatccggactacgcccggtaaatgtttaaatattttttatatcttcatttatttaaactttttatatatttttatattaatataatgaaatactttacattaacaccatttacccttgtttttatatattacaatttacataatttcactttcaaaaatctaatttaagaagatgttaaaaaaatttctctttttttccaatccgtaattaatgtatactaacttgaatagttctaacttctaaactttgtatgtaacagtaaaagaaaaattaaaaaaatataagaaaagttgaagaagcattgtaactttgtacgataaattttaaaacttatctttttaaaacattgggagaatatgtatactatatacgttactaaatctcttagactaaataatttgattttttaacattttttgacagtatagtttatgaatcaaacatgacatgacaaccgaatacgaaggaggaaatattatttcaattgcttctttatttttttaccttcatttcattaaattttgtatcattctcaaatagatttttttaaagagatgtttaggtttttagaagggttaaatctaattcggcctaaaaattgttttttttaatctaaaacaatttatattttagatgtaatctaaaaggaaggacgactttctctcccaggcacggttttcgaagttctattttcggttaagagtttttgaaaactagatctaaaccacttcctcttaccaaaacagcaaaaaacaaccatccttatttccaaaactagacttttcggttgacttacagatctagattacaagcaaagtgttccctcaggggagaccggcataggggagaccgacataggagatgcccctcaccctgagcacttgatggttcttatctcaaatcttgtggttaaatctttcgaagaagtttcaagtgtttactaaggccagaacattaaattcaacctaccaaaggtacacttcgattctctctttatgacaacaattattaacctcttgaatgctctcacttttaagtgaagaatcttgttaaacttgtaaagagagatcttggtccacctcttaaaggacagatcttggtcaacgtataaaacctctcaccttgtgtgaagaacttttgaaacttttcgtcacaagcttctacttcaagccctccactccactcagct

SEQ ID NO: 12487 - DNA, 1208 bp, Unknown
  misc_feature (1)..( 1208): cDNA_ID_2712157_gDNA_ID_2214554_Annot_ID_185663 3000 nt of promoter + ATG
aacaaagcgtataataagctcttccacgaaccacattaactcaagagtaaaatagtcgctactaccactctccgaatttagtttctctctatggtaattcagctaagatgctattaaaacaaataaataaataaataaagaagaagttgggagagatgggaaacgcgtagaccaaagatggtgaggtggtataagctttacatggctatgacctaaccccacatgcgacctcctcctatcgtgccatgttgacgttctctcttggtcctacatgtctccttcatcttcaacatcccctcctttcttgcctcatttcttgtgtttctccattttcttatcactatttgtttagttttttatttccccacaacaaaattctccagcaagtgtctttccagtctccttcctgtcaaaagcccgactttaattcgtaattttacaaaaaaacaattatgtaatatttgagtttcacgtccaagctaacatttcatataaattattcacccagcaaattacccataaattctttgcaatttccttaccaaaaaaaaaaataattaaaattttatttaccacggtccgtggtctctttttgaagtttcaacactttcaaactttattcttaaattattacaatcacgattaaaatgtgaaagcaaagttaaacttttatttttatacaagtcatttacttcagtcaaattttcttcgcgtcaagttttccttgtaacttatttgtgactactattgttttgttcaaatcttctgtgcaatgtaaagttatcatttaagaattaagataatatgtactactacaaaatcataacaaaatgataaaacatcaattgttcatgaaggtgtattaactgcgttgaatttttactagctcatatttagtgtcttaaagagcgcatgcaatatcgtagttaagactgggaggtaataaacttagatcagttgatgttattgtccgaagctaatctttgtttggccgtctgacgtggcacgtaaaaaccaacttaaaagcttcctctatataaataccaacaagctcttcaatcccaaaacacatccattccattaccaaagtacaaaacataaactccttctgtctctctcctctctacctcaatttaattctcctgatttgtttttttttccaccaaaaaaaagagataacaaagaaaaacaaatagctaaaacatatg

SEQ ID NO: 12488 - DNA, 1208 bp, Unknown; identical to SEQ ID NO: 12487
  misc_feature (1)..( 1208): cDNA_ID_2712157_gDNA_ID_2214554_Annot_ID_134741 3000 nt of promoter + ATG

SEQ ID NO: 12489 - DNA, 3000 bp, Unknown
  misc_feature (1)..( 3000): cDNA_ID_1387805_gDNA_ID_2214555_Annot_ID_134745 3000 nt of promoter + ATG
aacgcctaaatgccagtatctgggctttgagaacatggagttgctgtttggtaaatcctgatcgctgctgtgcttgttgggtcccctgtccactctgaagggacgagttactgagtggaccagtatcagatggcgctactaaatttggagtcggtgtattcagttgcctaggctgctgcatttgcaaatgttcagcaggacctaaacttttttttgtagatgcattctgatccaaaacaggagtctcatttgcagaagtctgcaggggatttcctgagggcatcccatttgtaggctgaactaaatgtcgaggatacattggattctctctcccttggccggagaagggattcatagcaggattgaccattctgggactggaagtcgaggcaaatgagccagtagataatgcatgtctggccttcgctgatcctgactgcccagagatatcactagcagagttggcatgtggtgaattctcacctggaacaaccgaagatgaagccggctggctagagattggaatagatggtgactgtgaggccacattgccttcaccagctttctgttgagcagccattcttgcctgaaggatgtgtgccatttggctggcgttggcaggatgtgagagatcgatattacgctcacgcgcccatgcctgcattgcctgccactgttgtgcaaatgcgagttggttgtttcccatgttattgacaagctgctgagcctgtggtgcttgcattggccttatcatatttccaggcattagttgtccggtacccacctgctgctgaggatgagattttgtttcgttcctttgctgagaacttgattcagtctgcctttcaccgcgagcaaactgatcgcccgatggcttcgatgatgaggcctggggctgactagacggattcaagtcttgcatattcaacattcccattcgtgcatcttgatcctttcccacacttgatgaacccaccattcccatcctagcttgctgctgtgctttttgatgctgagcctgcatagcaaactgaatatacgcttgctgcattggattaaaattttgctggccctcttgggtagaagaaccctgttgttgttgttgttgttgttgctgaggagactcaaaaaaatttctagactgctgaggcatttgcatagagcccggagacgaagcaaagttgccaccgcccatcattccctgaaccccaccaggttgatatgcaaacatattttcgtttgtatctgagtttctgtgctgctgctgctgctgccatatcagaagcacgataataattagtaacaatcaaatgaacaataatccacaattcagagcaactatatatatatgtggaaatgaacaaaacatgttctccaagtggctaccattacacaacttcaatttaaagatattggttactttccttttacacagaattgataaacagtcaagtcccactaaaattgaatagccgcaagtttaacagacaaacattagccactacaaacaagcattttatccctcctaagtcataacgaaccaaacagagacttgagaatcctttacctgcctagacgccagctgctgttgctgttgctgctgttgctgttgctgttgctgctgctgcacagatgaagaggaagaagaaggagaagcagcggatgacgtggaagcagtccgaccagccggacccatggccggattccgagcgggccctccgccactgcctccagattgcatgcaattggtcgaagaatctgacagtcactacactggaaacaattaaacccaatgcacaacgaagctagtagaagaagacaaaaaaaaagtggaaaaaccctacccaataaatccctacaaaagaattcggacagcgagagcccccgaggcaaaggaaaaaacctcaaatagcaacagagagagagagagagagagagagagagagacactgagtcggttgaagcgcacacacctttctatttctctctcttcttagatttgcatcgaatttgggggaaatcggaaaacgaaagtcgcgggggatgcaacggtataaactcagatcctttgagatggcttctcgaaaaataaaaataaaaagggagggaaacgaaatccacggaatcgatgatcgattcctctctttgagaaattcacgcagatcagaaatttctcgcagtcaaaccctagctggcttcttacttccctttttcttttttttctctttctttttttttttggaaggggcattaattttattttatttttgattgtaggtcccacgcctcgatacagttggaacacggaaaatgcgtttcacgaggccacccctcggttttcgcttttattaccacaagtacccttccttatacaagtcagttgcacaaatgacgatgagacacgtgtgaatttaccaaacgttccttttgttaaccaaatggaatgacttttaatttttccatgtttatttcaaatatttgtttccgtattgggtaataagaatactaaaatgatactactataaacaaatttggaaatcaaaaaaagaaaaaaaaaaacaaatttggaaatcaaattagacttatgtttgttttacttgattaattaatttgaatttaaaattagacaaattttgacttttagttttaccttctgtagtgcagtagtagattagagagaatcatacaattacccttgttttatttacggtgcaacctcgtgtcgttttcatctttcagccttgatatgcttgccatctttacgtcaatagttggcacgcagttctattttaagatagaaaaacggcgaacagttttgaaccagcaggttcagtttatgtcgttaatagttttttttcccgaaacaagtaaaaagtcacattattatggttttgtgacttgtgtgcgagtttgtagaagctttactgatatagaaatgccgttgccgatgcagtctctcttcctctgtttctgattcctgaataaatttgttaaacgatg

SEQ ID NO: 12490 - DNA, 3000 bp, Unknown
  misc_feature (1)..( 3000): cDNA_ID_2708261_gDNA_ID_2214555_Annot_ID_134746 3000 nt of promoter + ATG
gtgcagtaatgattccaattctattcaaaactgtcctggatacacatactgtctgtcactataatgagctaaactttgttagtatgggtgggttaaattgcagggccgctttgcagaagcgttactgcgtgaaatagcaggtgtaatcataccatcagaaaggatttatggtttgggttcagggtcagtatcattatgaggtccaccaatgattttgtttctcatccagattctacccttaatctagttttattttctgtgtgatatcccatcaggccaaaggtggaagttctaaagctacttcaagataaaccagaacatcagggcttgacgctgcagtaactcacgttctatatatctatcaataattcttctatctgcatgacttggtaatggtcaccattagtttacaatccctatgcatttttaatttggccagtttcgtggaagacagactcgcaacgctgaaaaatgtcataaaagagcctgaattagacaaatggagtttatacctaggtggtctcttccctctcccatatcatcacttctggttccccttattggttattctgacaaaaacttatctcaaaacaggaacctggggatacaacactgagaaagagagagctgaagcagcaggcattcccaggattcaggttattgagctctccacgtttagcaataagcttaaatgagtgcatatactcattggaaaagaaacaaagctttcctctttattgtattctacggcattcaacggaaactaaaaaccaaacatgtttaggtaagattcagtaaaagagttgaactttcagtactacccattatagaagcttttctgtgacctataattcatccttagtaagatcattcttgttaccatcaccatcttcgtgatctttcctttgctcagcttgaaatttgtcaaagacatcttcaaatggaggatctccaggtcttctaaactcttgcttccctatcttgacctcgtaagcttcttcttggctcagcacgaattcccttagctaattgaaagatatgattgtgatgttagattttgactaatccactaaacaaagttttcagcattgtgtgttttctgtggcttttacctcagtcacaagcttcccattttgcatattgaacatcactgtgcttcgatctacagccatgaatcttactcctatccctcctgttcttaaaacttttgtccatttcatagcaatatcaatcaccacatcctgattgaaacatataaacagatcactattcaatcccctgaagcaactggacccatatcgaattcagagaattttgaacagtaactgaaactataacttaaggaccccaaattcacgattcgatttggattttagtttaccttggtacgggggacgcctaaccggagcttgacgaaaccgacgacggttccaaaagtccgtttagccatttcctcttggatctgatcgaatcccatattggtgaaatccggaggcggatcaaattccggggtcgttgctttcttcccccactctttccatgactcgtcttcttcattgtcttcaacgtcgtctaggtcatcggagatctcgatccgtcgcttcgttgcttcggcgatccggacaaatccgtgaaaattcataaaaagaaggaggccaacaagtagaatcagcgaagaagaacgaacgatcttctccatcgtttaacaaatttattcaggaatcagaaacagaggaagagagactgcatcggcaacggcatttctatatcagtaaagcttctacaaactcgcacacaagtcacaaaaccataataatgtgactttttacttgtttcgggaaaaaaaactattaacgacataaactgaacctgctggttcaaaactgttcgccgtttttctatcttaaaatagaactgcgtgccaactattgacgtaaagatggcaagcatatcaaggctgaaagatgaaaacgacacgaggttgcaccgtaaataaaacaagggtaattgtatgattctctctaatctactactgcactacagaaggtaaaactaaaagtcaaaatttgtctaattttaaattcaaattaattaatcaagtaaaacaaacataagtctaatttgatttccaaatttgtttttttttttctttttttgatttccaaatttgtttatagtagtatcattttagtattcttattacccaatacggaaacaaatatttgaaataaacatggaaaaattaaaagtcattccatttggttaacaaaaggaacgtttggtaaattcacacgtgtctcatcgtcatttgtgcaactgacttgtataaggaagggtacttgtggtaataaaagcgaaaaccgaggggtggcctcgtgaaacgcattttccgtgttccaactgtatcgaggcgtgggacctacaatcaaaaataaaataaaattaatgccccttccaaaaaaaaaaagaaagagaaaaaaaagaaaaagggaagtaagaagccagctagggtttgactgcgagaaatttctgatctgcgtgaatttctcaaagagaggaatcgatcatcgattccgtggatttcgtttccctccctttttatttttatttttcgagaagccatctcaaaggatctgagtttataccgttgcatcccccgcgactttcgttttccgatttcccccaaattcgatgcaaatctaagaagagagagaaatagaaaggtgtgtgcgcttcaaccgactcagtgtctctctctctctctctctctctctctctctgttgctatttgaggttttttcctttgcctcgggggctctcgctgtccgaattcttttgtagggatttattgggtagggtttttccactttttttttgtcttcttctactagcttcgttgtgcattgggtttaattgtttccagtgtagtgactgtcagattcttcgaccaattgcatgcaatctggaggcagtggcggagggcccgctcggaatccggcc

SEQ ID NO: 12491 - DNA, 3000 bp, Unknown
  misc_feature (1)..( 3000): cDNA_ID_2712230_gDNA_ID_2214555_Annot_ID_134747 3000 nt of promoter + ATG
agggttcttctacccaagagggccagcaaaattttaatccaatgcagcaagcgtatattcagtttgctatgcaggctcagcatcaaaaagcacagcagcaagctaggatgggaatggtgggttcatcaagtgtgggaaaggatcaagatgcacgaatgggaatgttgaatatgcaagacttgaatccgtctagtcagccccaggcctcatcatcgaagccatcgggcgatcagtttgctcgcggtgaaaggcagactgaatcaagttctcagcaaaggaacgaaacaaaatctcatcctcagcagcaggtgggtaccggacaactaatgcctggaaatatgataaggccaatgcaagcaccacaggctcagcagcttgtcaataacatgggaaacaaccaactcgcatttgcacaacagtggcaggcaatgcaggcatgggcgcgtgagcgtaatatcgatctctcacatcctgccaacgccagccaaatggcacacatccttcaggcaagaatggctgctcaacagaaagctggtgaaggcaatgtggcctcacagtcaccatctattccaatctctagccagccggcttcatcttcggttgttccaggtgagaattcaccacatgccaactctgctagtgatatctctgggcagtcaggatcagcgaaggccagacatgcattatctactggctcatttgcctcgacttccagtcccagaatggtcaatcctgctatgaatcccttctccggccaagggagagagaatccaatgtatcctcgacatttagttcagcctacaaatgggatgccctcaggaaatcccctgcagacttctgcaaatgagactcctgttttggatcagaatgcatctacaaaaaaaagtttaggtcctgctgaacatttgcaaatgcagcagcctaggcaactgaatacaccgactccaaatttagtagcgccatctgatactggtccactcagtaactcgtcccttcagagtggacaggggacccaacaagcacagcagcgatcaggatttaccaaacagcaactccatgttctcaaagcccagatactggcatttaggcgtttgaaggttttcagctctgactttttccttatgtcttcatttttattgtatgttttgctggagatgtatgcctataaataacgtgtctgcaagccaggttgaatgtttttaattgcttttttttgacagaaaggggaaggttctttgcctccggagcttcttcaagctatttctccaccaccgcttgaactacagacgcagaggcaaatatctcctgccatagggaaagttcaggatagatcttcagacaaaactggagaagaccaagcaaggtcgctagagtgtggcaaggagtctcaggctgctgcttcttcaaatggaccaattttttctaaagaggaagataatgttggagatacagaagtagctttgacgacaggccacagccaattatttcaaaacctgggaaaagaagctacttctactgacgtggctacgaaagaggagcaacagactgatgtattccctgttaagtcagaccaaggagcagattctagtactcaaaagaatcctagaagtgattctacagctgataagggaaaggctgttgcatctgatggaagccaatctaaggttcctccacaagcaaactctccccagccgcccaaggatacagcctctgccaggaaatattatggaccgttgtttgattttccctttttcactcgaaaacttgactcttatgggtctgcaacagccaatgccaataacaatctcacattagcatatgatattaaagatctgatttgtgaagaaggtgcagagttccttagtaagaaaagaacagacagtttgaagaagataaatggtctgctagcaaaaaatttagaaaggaaaaggattaggcctgatcttgttttacggcttcaaattgaagagaaaaagcttaggctatctgatcttcagtctcgtgttagagaggaagtagatcgacaacaacaggagataatgtccatgccggataggccgtaccgcaaatttgtgaggttatgcgaacggcaacgcctagaaatgaatagacaagtactggccaatcagaaagctgtcagagagaagcagctgaaaaccatttttcagtggcgtaagaaactccttgaggctcattgggctatacgtgatgcacgcactgctcgtaacaggggagtggccaaataccatgaaaagatgttgagagagttttcaaagagaaaagatgatggccgcaacaaaaggatggaggccttgaagaataatgatgtagaaagatacagggagatgttgctggaacagcaaactaatatgcctggtgatgctgctgaaagatatgctgttctctcttcatttttgacccaaaccgaagattatcttcataaacttggaggtaagattactgccacaaaaaatcaacaggaagtggaggaggcagcaaatgctgcagcagtagcagcgagattgcaggtatacatactgctttctctactccacagcgaatatccattacactctgtagataattcttcaaactttaacttaaatgttgacttttgcgtgtttcagaaaatagaactttttcttttcaaaggtatagtggatatatagtaccttacctgtttccgtttttgacgcaggggttgtcagaagaagaggtcagggcagcagctacttgtgctcgagaagaagttgtgatcagaaatagatttacggaaatgaatgcgccaaaagaaaattcatctgtcaacaagtaagggcattagtcacacaaaaaatgattaaaatagggaattagcaaagtactagttgtaactcataattaccaatgcagctgaatacttaaaaagtatgtgcttatctgtaaaatgctgataatcctgcacatccatatgtgagagaattctacagatcacaagattaggaataggcgccgtgggtg

SEQ ID NO: 12492 - DNA, 3000 bp, Unknown
  misc_feature (1)..( 3000): cDNA_ID_1807129_gDNA_ID_2214555_Annot_ID_134748 3000 nt of promoter + ATG
tatgatgatagtgctggagctagttacaatctaagagagagactgagttacgaggattacaagaggggaaagactgggaatggctcggatataggcagttcagatgaggaggatagaccatgtgctctagttgggtcaaagtttcaagctaaagtaccggagtggactggcataacccctgaaagtgattcaaagtggttgggcactcggatctggccactgaccaaagaacaaaccaaggctaatcttcttatcgaaagagatcgtattggaaaaggaagacaagatccttgtggctgccataatccaggatctattgaatgtgtcaagtttcatatcactgcaaaacgggataaactgaaacttgaacttggtccagctttctacatgtggtgttttgatgtcatgggtgaatgtactctccagtattggacagacttagaactgaagaagataaagtctttgatgagttctccaccgtcacttagcccagccttcatccatcaggccaagatgattcttccttcgaagagcagaggaaaaattgtgagctacttctacaacgtgacccttttgcagtacagagcaagtcagagtagaataacacctcacgatatagacagtgatactgatcaaatattcctccgcgcaacagagaatgaaaatccagcccccgaagcaaacacatttcagaaacccgccctgctttcgcctaataaaaaaagatgtcgatagagctatcacccggttgagattcaagtaggagcagctcttttagttttcttcgtttttggggcttctattgccattgaaactgctttagactctgtggggaaaaggcttcataatagcatcttcttagcaaattctggttttagttttgaggtaaatacttgcatctcttccttgatgatcctacagtaggattcctttttgttggcattgcttgaaatgctttgcggaaactggtgaatcagagagatgatttctatcagtacagtgagagaaatttggattagtttggtgaatacaacagaggcaaaatgtaattgctatatgtttttttttctgtttttttccaaggaaaatgaagaaatgagtaaatctctcttgttattaatcgagttctcagtttcatgatttcgactataaccccctcatcacaagataaatttaaacctttacacgagcaaagttaatcataaattcaaagattggtagcttattgggaggttatataacactactaaatgatttgctatttttacttagagaagcataaaccattttctgtatcaaataaatgatattttcttttgaaataatagtgttaaggattttgaagaaataaaaattaatttagttacattgtacaatgtgattttcttcaggaattcttattttttaaaaattaagttaaacaattaaattcagagatactaattagttcatattgtagtttagagagaatacaattgtatttaaaccaacaaaactatgataagatttgttgggtcagatattggaaaaaggactaaaaattgtcatgatgttttgggccaatgattcactcttcggcccataaaggaacccatgaaaaatccagatcatcatagttatcccacgcgcatgtaaatcgcgttgttaaaagcgcccgtttttcgcagtctaacccctacggaaattggcctaaaatcaactgaatccaataatttggagtccaagggcgcgtgagctaatattctcttcttttctttctttatcgtttttttttttttttttgcttaaacgatatttcatgcctaattactctttaaaacctttttccctccaattttctttaaattactgatcattattttatttgtcgcaactaaatttttatctactgaaattagtaatggtattattctataaagctaaaccgtgtatgttaagagattggatagggttaatgcatgtggacacgttactcatttttcatttaaaaaaaagacatgtaatttgttgtcctcacgtctactatagtcgtaactcccgtaagtttatggctcacgtttctcttaaaatcattcattcttttggttataaaatactattgagaaatgataattgtaggataagtcccaaccccaccatcattttccttacaatatcatccgttgttttattgtaataaatcatcgatgtccatttttatattttatcgtagtgtgttcatgtttggatttgaaaatggaatatttatgacgacaacaacaacaacaaaagaagaaaatgaaatatattagtcaatattaactaaatgttctttcacatagacttatattgaaaaatataatatatgtccattttgatttttaaaaaagtaactacagtatatggaaagtagattaaaggattaacaaaaagaaaagataaagataaagcaatgaatgaactcattttttggagaagattggagattggaaggtttcggaggaaaaggtcggttttaacaggggagcttttcttattgctcagagtgttgttaaaggagataggtttcaatcttatgcggcggttggacatccttggtggctccatcaactatttgagggtgagagaatctcttcctaggccttgtttctttgttttggtttgtttgaccattgtcaatcttcggtccttttggggaatggttgtttgcacgactattcttgtaaccttaattggtctttttgtaaaggttctgtatctcaaacaatattcatcaatatatcattatattggagaaaaaaaaaaaaaaaagataaagcaatgaatgaaagacaaaggcaaaagggtaaaaatggaattttgagggataaatgaaagtaaggcaaatgtccatttcattgatcttttcttataatatcatattttttctttcattttggaatctttctctctctctctctctaaaaccagattcttaatagaagaagaagaagaagaagaggaaaggagaaatctgccatg

SEQ ID NO: 12493 - DNA, 3000 bp, Unknown
  misc_feature (1)..( 3000): cDNA_ID_3025424_gDNA_ID_2214555_Annot_ID_185705 3000 nt of promoter + ATG
atcttcagtttcttagggtttgatgcgaatctttgaaacagatacgaaatcgaatcaatcaaaagacaagaaaaataattgaagaaacgattacggaaaacggctttcttcttcacctgttcacttgaagacgagagagacgacgaggaagaagtgcaaaaaccctaggaaatcaactttgtcctctcttttgacacttttacccttttgtaattttttaaattactcgagatgccacagtttagcaaagctcagtggcttcagcgtttttagcttcttccctatttgatgagttcgaacctcgcccgttgcgcctattttgtttttttcctttctcaaaagcagtttcatacgttttttttttgtgggtgcatatgtctatttgaaaagacaaacaacaagctttatcatcaaagtagtatattggtaatttggtagtacatcaattctgaaaatgttaaaaagagagaaaatattatgtggaatgatgaaaaaatggaaagacatgttcaaagaatctaaatcttgatgttgaagtaattggagtcaaaatgatgcagtctcacgtagccgtcttcacctccactagagaaactgaaaatacattccaaaaaacactcagcaacaaagcctaaaaaacactctcatcaactgaggattgtatcaatcaatcaaaatcaaattttgttagtttacctcttcccatcaggactgaatgccaaagcattaataggtccaaaatgacctttcacgccaccaatttcctcttgcagaatctatatattataagaccaaatacacagttacatatctctttccaggttacaagtttttaaataaaactgttttactgcaacactaaccgtgtcgtaaaacttagcttcaaacttcccagcacgatgatcagtggtagtcacagctgatgcatcttgaccacctccaagcacaacctaaaagagcgagagcagaaacattcacaaagataacatcaagacttgttgcttttgggaaccgaatttgaatttcaagaagcattagtgcatacatggttgagaagtggagacatggcgacagcatttacaggcaccacagtggtgtaagtcttaataagagtcagcgttctcatgtcccaaagctgaaagaatcaacaaaaagaacactctattagatgatttatctctatatgtaatatgtatagagcatatttttgaaacaagtaaaagaaagaagcacatgcctttgcagttttgtcatgtgaacctgtaaggaagtgagagtcatcagctgctttgcagagggatgtaatggcctccttgtgacccacttcctcatctgattgcttaagcaattttccagtctagtaacaatggcagtagcaccacataaggtttaagctaataaaaaaaaaaagagagatattgatagacaaaagaaaggccttaagaaagttgaaatacctctgcatcccagattctgatagcagcatcttcaccaccactaacaatggtttggttcaggggaccccaaacagctctattgatcttcttctttccatcaggactttgaaggacaagcacagaatcaccaacctctacatcaattacattaaatcaattccttttacccatacaaaaaagacataggctaaaaaacataagtagattttaacttagaattgacaacttacggtcttcgggatcttctgcaatgcgtttgacatgaatagcagaggaagttcccacgaagtgatcagtggtaatcactgcaagatgatcaccaacagagaaatccacagaccttgcaggggcaccaaacttgaaagtgaacaattctttgccagatttcacatcccacagctttgcagtctgatcagcactaccagtgatcaatctagacgagtctcctaagaaatcacaaacaaaacactaatcgttaagctatgaaagactaaaacaacaaagacaacgacttaaatcctaaactgaatccattccatccactatatactatttgaatttgagaggctgagaccacttactggagatatcacagcaccaaacagcaccactgtggccacggtaagtgccaagacgctcgccgttatcggcaaaccagactgtgggagtgtggtctttggcgcaggagaaaagcagatcaccatttctgttgtacctcaggaacgtcaatggacgttcatgtcccttcatcaaaatcggcctcatcctcgtttctagggtttgatgagaggagcttttcatcttgcaaacagatacgaaatcaattcaatagaaagaacaaaagataatacattaatcggaaacaagtacatgaccaaacggaggaagagatatgtgcacatacttggttgaatcgaagaccttcgggattaacgcactcaattgtcatgacggaggaggcgacggttgaaggacgacggatttgatcagcgagcgttctctgagattttgagggctttaagtggtgaatcgttaaaccggtgagcgtaccattggtaaataactccgaatagagccacgtggcagtaatgggctcgaaacagagtccacctggcctaaacatctaatctgtaggcccatgccactttggatgtatcaaactcaatatgattatcagttataaattaatcgactaatctaataactgaaatttgaatatttcaatgaatgtaggaagaagagaaaaaagagggaacacgtcagcaacaaaaacggcgcgcgtgagtctcgggcctaaaacgaaatcccttcctcacgtctcagccttcttccattaacgagagagaagagacaacgcaacacaaaaaaacattctcttctctctctctctcttccaaaaactcaaaatctcttagaaaccaagtttgcctgcaatcatcatcatcatagcatctctctctccattttgaagatttcgttttgatcttccttgatacgatttatcaggagatcgtcagagaggtgaataattaagagaaaaaag

SEQ ID NO: 12494 - DNA, 3000 bp, Unknown
  misc_feature (1)..( 3000): cDNA_ID_2994382_gDNA_ID_2214555_Annot_ID_185704 3000 nt of promoter + ATG
tcattgattgttattatttatctcctcttgatttgaattaagaatgtttttattttgggaaattatgatctgtttgcttggagatcaagtgattgcagacattatatattttgtttccttatactaatattaatcagctttgaaactggacactaaaaaggaaaaaaaaaacaaattttggataatttttctcaatatcttttgttttggcactttatcatgagaaataaaaaatatttaccacaaatttatagtggtattggatcatctgatataataaaagtcataaactagaaagacaaaaaaataatatagactcaatttctctttatttgttactgaatttctgaccaggtcaggttattgtgtatatttttatggggatctaggtggattcattttctttggtaagttgttgtaaaagaatctggggtcataatatataccaagtctttcgaagcagtttcggaagataatcaattcaaataattaagagattcgtagcgggaaataaataaggaatactataatcaaaaattaatttatatagtatgtggcgtgcattaacatgcattaatctattaatagaaagaaacaaaagatatgaaacaaaagagaaattggacttatcttattagggccacatgaacaaccttgaagacaaagcgataacaaaagaaattgccacgatatgcgttggacgttgaggcatgagatttatttgttgtaacctaattattatttgctttttggttatactacgaggtatgagttggtgtaggtaggaaacgagatggtctttgtattatcgtctacatgtttttctctctgttttattattgcatttagttgaagggaataaacatcgtgaacaatttacttcacatttgaagcagttcatgcatcatataaataaacaagataaaaacagtgatcgactctcttctccgacatttgatctagacatccatttttatcctaatcgtttctgtatagcgagaattttgcagaaacctgcagtcgtacgatagataataccaaaaatagtacattctcaactagactgtacatctaaaatattatctatcatttttacaaatcacattgaatgacagatacagctatctctctgtagtgatacacatgaggaaaaacagattaactgatataatggaattttgttatttttggacttcttatcctaattctgaaaaacaagccatttttttcgaattccacatttccacttgacattttaccaatttaggcccccaaaaatggcacaccatttcgatatctatatttttgtttacgaaacatttcagcccatatactttacgggcccattagtgtctaaagattcatacgccacctgaacaatattttcccaccaccattacacaaacatgtcgaaaatattcttaacataaaaatcaccacattacattatgtttactgcccaaataataacccacataaaatattacacacaaaataatctatctcacacaaaataataataaaacaaacactcgctaaatatgcccccctcagtgaatttgatcaaataccccaaaaataaaattaataacatgtgtggagtataaaacacgaaaaaataaaattacaaaagaaagaagataacatatctacagtaaagttacaagtatacagatgttagatcatcgtgtttttccaaatcctcgaatccttccgtcttgttactgtatagttaccctgcaacgtaataattaataatctcatataaaagtttagaaattttggatgtaattaacatcaaaaaccaaaatcctaattactgataattttgtaccatttgagtgtattgagaatgcatttaggtgaatcagtatcaagcttgttcaagctaacgccaccgcatctcaaattaacggcgagcattccgatcttaataccgccgacacctaatccaactttagtcttggcaacaacgttaatgaccaaatctttgctctgaaatttcgcagcgagtctcttagccaatcctctctccacgagctgattcttcaccgtcgtctccactttcacgctcgtcgagtttttgggaccttgtcggaatccattcatcgtcgtctctcccatcccggtctcatcgtttcccgaaccaacgctcaaatcaacggcagtgtttccgtagtaaaaaacgagtttcgagttcggattcttcatctcaacgcgggcaacggcggtggcggagagagacgcgccgtcgggatcgtcggcgagtttgaagccgtcgagacggaaggaagcgaggctgaaagtgggaagcttaggatcgaaccagaggtagaaaacagctgttccgaccaagaggaggaagatgaagagaacaagagtaatgcagatgcaacagcaacagaaacgacaacagcttctacgttttttctttggtcggtaagaagtaggcatagggacggcttttctcataggttgttgttgaatgggaggtggaggaggaggaggagaggacatgtttggatctctgtaacctggtggcttttgaagaaccgggttcatctgataatctgccatcttttttctcttaattattcacctctctgacgatctcctgataaatcgtatcaaggaagatcaaaacgaaatcttcaaaatggagagagagatgctatgatgatgatgattgcaggcaaacttggtttctaagagattttgagtttttggaagagagagagagagaagagaatgtttttttgtgttgcgttgtctcttctctctcgttaatggaagaaggctgagacgtgaggaagggatttcgttttaggcccgagactcacgcgcgccgtttttgttgctgacgtgttccctcttttttctcttcttcctacattcattgaaatattcaaatttcagttattagattagtcgattaatttataactgataatcatattgagtttgatacatccaaagtggcatgggcctacagattagatg

SEQ ID NO: 12495 - DNA, 3000 bp, Unknown
  misc_feature (1)..( 3000): cDNA_ID_1018052_gDNA_ID_2214555_Annot_ID_185703 3000 nt of promoter + ATG
ttttttctcttaattattcacctctctgacgatctcctgataaatcgtatcaaggaagatcaaaacgaaatcttcaaaatggagagagagatgctatgatgatgatgattgcaggcaaacttggtttctaagagattttgagtttttggaagagagagagagagaagagaatgtttttttgtgttgcgttgtctcttctctctcgttaatggaagaaggctgagacgtgaggaagggatttcgttttaggcccgagactcacgcgcgccgtttttgttgctgacgtgttccctcttttttctcttcttcctacattcattgaaatattcaaatttcagttattagattagtcgattaatttataactgataatcatattgagtttgatacatccaaagtggcatgggcctacagattagatgtttaggccaggtggactctgtttcgagcccattactgccacgtggctctattcggagttatttaccaatggtacgctcaccggtttaacgattcaccacttaaagccctcaaaatctcagagaacgctcgctgatcaaatccgtcgtccttcaaccgtcgcctcctccgtcatgacaattgagtgcgttaatcccgaaggtcttcgattcaaccaagtatgtgcacatatctcttcctccgtttggtcatgtacttgtttccgattaatgtattatcttttgttctttctattgaattgatttcgtatctgtttgcaagatgaaaagctcctctcatcaaaccctagaaacgaggatgaggccgattttgatgaagggacatgaacgtccattgacgttcctgaggtacaacagaaatggtgatctgcttttctcctgcgccaaagaccacactcccacagtctggtttgccgataacggcgagcgtcttggcacttaccgtggccacagtggtgctgtttggtgctgtgatatctccagtaagtggtctcagcctctcaaattcaaatagtatatagtggatggaatggattcagtttaggatttaagtcgttgtctttgttgttttagtctttcatagcttaacgattagtgttttgtttgtgatttcttaggagactcgtctagattgatcactggtagtgctgatcagactgcaaagctgtgggatgtgaaatctggcaaagaattgttcactttcaagtttggtgcccctgcaaggtctgtggatttctctgttggtgatcatcttgcagtgattaccactgatcacttcgtgggaacttcctctgctattcatgtcaaacgcattgcagaagatcccgaagaccgtaagttgtcaattctaagttaaaatctacttatgttttttagcctatgtcttttttgtatgggtaaaaggaattgatttaatgtaattgatgtagaggttggtgattctgtgcttgtccttcaaagtcctgatggaaagaagaagatcaatagagctgtttggggtcccctgaaccaaaccattgttagtggtggtgaagatgctgctatcagaatctgggatgcagaggtatttcaactttcttaaggcctttcttttgtctatcaatatctctctttttttttttattagcttaaaccttatgtggtgctactgccattgttactagactggaaaattgcttaagcaatcagatgaggaagtgggtcacaaggaggccattacatccctctgcaaagcagctgatgactctcacttccttacaggttcacatgacaaaactgcaaaggcatgtgcttctttcttttacttgtttcaaaaatatgctctatacatattacatatagagataaatcatctaatagagtgttctttttgttgattctttcagctttgggacatgagaacgctgactcttattaagacttacaccactgtggtgcctgtaaatgctgtcgccatgtctccacttctcaaccatgtatgcactaatgcttcttgaaattcaaattcggttcccaaaagcaacaagtcttgatgttatctttgtgaatgtttctgctctcgctcttttaggttgtgcttggaggtggtcaagatgcatcagctgtgactaccactgatcatcgtgctgggaagtttgaagctaagttttacgacacggttagtgttgcagtaaaacagttttatttaaaaacttgtaacctggaaagagatatgtaactgtgtatttggtcttataatatatagattctgcaagaggaaattggtggcgtgaaaggtcattttggacctattaatgctttggcattcagtcctgatgggaagaggtaaactaacaaaatttgattttgattgattgatacaatcctcagttgatgagagtgttttttaggctttgttgctgagtgttttttggaatgtattttcagtttctctagtggaggtgaagacggctacgtgagactgcatcattttgactccaattacttcaacatcaagatttagattctttgaacatgtctttccattttttcatcattccacataatattttctctctttttaacattttcagaattgatgtactaccaaattaccaatatactactttgatgataaagcttgttgtttgtcttttcaaatagacatatgcacccacaaaaaaaaaacgtatgaaactgcttttgagaaaggaaaaaaacaaaataggcgcaacgggcgaggttcgaactcatcaaatagggaagaagctaaaaacgctgaagccactgagctttgctaaactgtggcatctcgagtaatttaaaaaattacaaaagggtaaaagtgtcaaaagagaggacaaagttgatttcctagggtttttgcacttcttcctcgtcgtctctctcgtcttcaagtgaacaggtgaagaagaaagccgttttccgtaatcgtttcttcaattatttttcttgtcttttgattgattcgatttcgtatctgtttcaaagattcgcatcaaaccctaagaaactgaagatg

SEQ ID NO: 12496 - DNA, 3000 bp, Unknown
  misc_feature (1)..( 3000): cDNA_ID_1807355_gDNA_ID_2214555_Annot_ID_185702 3000 nt of promoter + ATG
gcagtgattttgagcatgaagtagcatcaaagcaagtattagaagcgctcttcttcaaagcagaagccccacacaggcaacgcatcctcgcagctgaaggatcggactccatgaaccgccgtttcatagagagggcttacaaatacagacccgtaaaagtggtggagtttgagcttcctcgcccgcaatgtgtagtgtacctggacttgaagcgagaggaatgcgcaggactattcccttcaggaagagtctattctcaggctttccacttaggaggtcaaggtttcttcctctcagcacactgcaacatggaccagcaaagctcgttccactgctttgggctattcctcggaatgcaagagaaaggggctgtgagttttggtgtggactacgaatttgcggcaagagataaaagtacaaaggaagaatacgtaagcaaatacaaaggaaactacacattcacaggggggaaagcggttggttacagaaaccttttcgggattccatggacttcgttcatagccgaggacagtcaacatttcatcaatggcattctccatctcagagccgagctcaccattaaacgttcctcagacctgcactgactgttttcttctctctctctctctatgtcgtcacatttaagttgtataatctcgttatgtagcagctctaaccacgagtgtcctttgtacaataattgcctaaggagcaaaagtatggcttaaagagtacctcattctgtaaattctttgattggatttttttacttttctatatgggtctttataaatagtccaagatagaatttgggcctagcttttgaggttagtcttaaaatatgggctcaaggcctactacgatgcgtaatgatgaagctaaattgcctatagtgtgaacattaggcttttatattcaaagttcaaacaatgcggctatagcaatggtacatcgaggaaatagaatgaagtgacaaggataatttaggaaatgaggatagaggaattgagtcctcgtcacatggggcccacataaatgcgtaagtaagactatccgcttaccagacggacacgtcattttgtcgggacacgtttgagccgttggatgattaatctccttttctgacttatcgaccccactttttttttccactacaaaatattgatggccacgtcagatgattcgaagttatataaaacacacgtttttattgcagcttaaccgtcgatttttttctaatcgagaaaccgagatcaacggtctatattcaaagctgatgtggtctgtacctttgcttacgtcaccgaaaacctaagttgaataatactagtactagtattatgctctctgatttctttctacagtacacaaaataaaaataaacaaaaatagagagcccagacaatatttactacatcacccaatggataaccgacacgtagatacatccatgtgagtcgcattttgtaatgtagggaccacttcgtggatagaagctcttttacgccaacgcaaaaaaaaaaagcctcgttggccctttagcctctaaatgccaataactatctactggcgtggcttagtttataccgttggatcatttgtttatcccagccgttggattcgaagcagttgtcgggcttgtgggccttttctttattgttttgttttcataataatgaaagaaaataaactaaaaaagtattttttatttttccttttatggtgattccatgatggcaaaaacgtggccatacacgtgggtcgtctcgtggcacctttggaagatacgaatcggtagtgaataatggacggttcggatctttagttttgtcgacagaagtgctctccgcgtcggagatactactagtcaaaggtcttttcttccttcgtattttaccataatgtcccttctttctaatcaaatttttatcatgtatccaaattattcgaagcaatattctatataataaacaaatatgcccatcggtaagtagcaaaagttaaattgtgtttattttcatgccatacaaaaataatgattctgaaaattcgttggaaagattgtttagttttcttatttttatgttgcacatgacttcactgacgtgtgaatgtgatgacggattttgaagaggattatacactatggtaaatatcgactataaaaataatctaaacatgagggaagcgtagagcgactagaaatcgaacacgtgtacggtagagatgacataagaaatggctggcactaaactcgatgagccaactcatcaaacaccaccgtagtttacgctgttatatattctcatgacacgtgtctgatgacgtggtcatcgtcttggcgctccgttttttttctctctctctcgcgtctcccttccctcaaaaaaaaaaactgaactctttttcgctctggtttttttagagagagagaaagatgaaaatgcgtttaattgctgtttaggtttcgaattcgcgatttaaatttctgggtttctctctgtttaagcttcttcttcttcatcttctgcttacgtttcttcttcaaggagctttcggattcttgtaggtattgcgtaacttaaatggttcaaatagagattgtttggtcgaatagttttgtgatttggtttctctatcattcattgatcttctaagttttgtgaaaattttgccatttttgatcgtttgcttttgcatttacttgaattgaatgaaaaattataagttttgaatttgaacaaaaacagctaaagcgtagagaagaacagagtttctttttttgggtgcatgtgattgtttcaggggtagaattgtccagtagtgtctactttgttgattccttttgtcttcctgaaagttttctgaacataggatgtgagagagaaatactattttacccttctctgtctctatatttctcacacaacaacacccatccccatgattttgcagaaagagtcattgttctcttgagtgggaaaccttgaaaccattcct

SEQ ID NO: 12497 - DNA, 3000 bp, Unknown
  misc_feature (1)..( 3000): cDNA_ID_2994378_gDNA_ID_2214555_Annot_ID_185700 3000 nt of promoter + ATG
cagggaagataatcatcgtactctcaaggataagctgatggaagctcgtgtagaaagtcgacgtttacgttcttctttgaaaccagagtgataattccggttcgagcaaataattaactcgtgtcttctcatgtatgttggattaattatttggttgtggttaatattaatgctcgttagtcgttaaaaaaactaaatattttaattgtcccagtgacagaaaccaatttcacatgaaaaaaggaaaaagctaattttgtcaacagttcacatatattgacattgaacacaactccggttcgacaaaaaaaaagaacacaactccggtcaactatttttggcagttgtaattaagaacaaaaagatgtaacttaaagaagagacaatttaaccgattagttcaaatctttggtcatcaaaaattccacaagttttaagaagactgattggtgattaataaacgttaaaaaaaaaaaaaaagccaagtcaaagatgtgtcggtaatagcgattgaccaaactctatctgttttagagcatcattaatggtagtttcttagcataattttaatatagtttttatgaatatttttataattgattttgaaaattctgaagttaaaaacttggttaagagattgaaatttaggcaatatgcaatggtggaatcttaacttggagttcttaaaaagaaaatttgaaaaaaaaaatagaaacattataattttaaaaaacttaatagttattacaactcataaaatttaaaacatacatgacataaaattttaaacaaatatgacaaacaattctatttaatacttaagttatctaaaaattaagattaattaaattaaaatattatatttaagacctaatttatctaagaattaacttaaaaaacattagatttggctcttatataagagctattcttaaccattaattgaattataacattaaatttaagatctactttatctaaaaactaacctaaaaaactatcaataatgatggtcttacgaatgcctagattctcttcaatatacaaaaagtacggtttagttattgtttggacatttgaaatctaactaattctctttttagtcttaatgcaatggaattgcaaatactccataaaccatagtgttgcaccctaaccgtatctctctctaaaagagaatctagtcaacaagattatgtttaatctctaattaatgacaataagatttactgccaaaataaataaataaataataataataagatttactgccatttattcttctatatttttcaattttttatttacacttgttccataatcgtcccaaggagtagactagggttgatgctctttcatctataaaacgacttaacacaacatgttctttcacatcatcatcataagcctcaacaatccatcaccatacatattagattctccctctttccatagtttatttttggttcgttttattgtaaaaagatatcaaactctttttgggggacattcgttcttcaagtgtaacagaaggagctcccttcctccaaaacgaagaggacaagatttgaggaactaaaatgcagaatctaagagttcatgtcttcctcatagagagtgcgcggtgttaaaagcttgaagaaagcacactttaaggggattgcacgacctcttagattctccctctttctctacatatcattctcttctcttcgtttggattgaagggagctccttttcttcttctcttaattagtctctgttcttcaaaacttggtttcgatctaacttgttttctttttctctagtgcattttttttttcaggttgtcatgtttatttgcaggtgtttgtggttgatgcttgcatggaagcaatattaatgttgtttatttacgagaagacgttcgtgtgccaatttgaaaatatgatattaatggaaatacagattaaaactgacaaatgtataaatatttcttgttccttgttttaattttaacattagtcgtgtgtttgtcgtaaatacgaaggggacatttcacctaaaaaaagaaaaaaatatattcatcaaaactggtcttggatacgtttttagttaaaacaagaacaataataaagttaggtttaacttcgatcagatcgaaacaagtacactataattgttttggtttgagaaaatataccatcgatggtttcaagaaataatagcagctgggttgcttgtagtcgatacgttaagtcgtatcatctcaaatgatccctagtagtacacaacatagtcaactggtttgtcatgtgttggcctacgaagaaatgtataccggccggatttcaatttataaattagtccttttttttttgtcaagttatcattgcatagccaagtttcactcggtcaaaatctaattaacaaagtctgtaaaacgttgaagtaattgtattttattaaaagaaaactccaaattagactttgattccaacgaatatttaacgacataaaaggcattgccgtttgttgaacgagttgtcttcttaccaaatttgacgctttccaactaaatacactcctaattttgcctattacctttttcctcctctaattaagtaaatgctaaatttcccccaaatactaaaaatcgaatccgataagtcaaaatcaaaatcgtacctacgcgatttatgcaaaataccggaaaaagaaccaaagtgcttattacaatcaaaagaccaaaccggttaaacaattagttaggctggcattaacgaacctctttgtctttaattagcctttatccgtcaccgccctgttaccataaccgttcaacgtcgacccgctctttgtttcagaaaaaaaaaacagagaaagacttttttagtgtttctttgtcattttcgttcctcaaaaaaaccttttcgaatttgacccttattgttatcctgattcttctgctcggttctcgccggagagaagacacggagaagagggttttcgaaaaggagg

SEQ ID NO: 12498 - DNA, 3000 bp, Unknown
  misc_feature (1)..( 3000): cDNA_ID_3025428_gDNA_ID_2214555_Annot_ID_185699 3000 nt of promoter + ATG
tggaaaaatctaaggagactaagatcgcggctccactgtcctccaagaaggctgaatcaaggactgttcctgaggcttgtaatgtaaaatgtgaagacgcaaacgcagaaatgaagatggctgagggaagcctaaacgcattaagaacagaaaaaggatcagttgagagcaattctaatcttcaagaagaatcaaacggtgagattattaaaccttgtgaagctaaggagaatagagaacagcctgcaaagaagagctttacagaagaggaagctgctagaattatccaatctatgtaccgtggatatgacgtgagaagatgggagccaattaagaaattgaaggagatagccactgtccgtgagcagatgggagatgttaaaaagcgtattgaggcgctagaagcttctactgatcagcacattgaagagaaggagattgttgttaatggagaactggtgatgaaccttcttttgaaattggatgctgtcgaggtaatgcatgaaagactaatttcattggttggccgagatagtttatctcagtatgtactgctgtgtaggatttttgctgacagtttcctatactgatgtttatcttccagggattgcatcctagtataagagagttcaggaaagctttggccacagagctctcaagcattcaagacaagcttgactccttgaaaaatagttgcgccagtgcagagaaagaggctgtaaaggaacaagtggaaattaaatctcagcctagtgactctccagtgaacttggagcactcccagctcacagaagagaacaaaatggtatctgacacgaatttagagaaggtacttcgtctgtctcccgaggaacatcctatgagcgtcttgaatagaacagatgaaaaacaggctgaatcggctgctgaaacagaagagggatatggattgtttgaaaccctggcaacggattctaagcaagctactgaaaatgcagcggctgcttcctcgacaacaattccagagaaaattggagaggttgagactgttgttccgggtaatccaccgtcagctgatggaaacggaatgacagtgaccaacgtagaggaaaacaaagccatggtggtggaaagtttggaggagccaataaacgaattgccgcaaatggtggaagagactgaaacaaactccatacgggacccggagaatgctagtgaagtctctgaagccgaaaccaactcatcagaaaatgaaaaccgaaaaggagaagatgatattgtattgcattcagaaaaaaatgtcgagctctcagagctacctgttggagtgattgacgaggaaacacagcctctttcgcaagatccatcgtcatcatatactcgtgaagggaatatgactgcaatggaccctaaaacagcgagccaggaggaaacagaagttgatcactcacccaacaactccaaaggcattggccaacagacttctgagccacaagatgaaaaagaacagtctccagagaccgaagtcattgtgaaagaacagcctctagagacagaagttattttgaacgaacaggctccggaaccggaaatcactgaacctgggatatcaaaagaaaccaaaaagctgatggaggagaaccagcgattcaaggaaacgatggagacgttggttaaggcaggcagagaacaactagaagtcatatcgaaattaaccagtcgggtcaaaagccttgagaagaaactgtcacataagaaaaagacacagatcagacgtcgtgcaagcaaaccaatgtccgtaagtccaaccgatgccgtattatgacccccataaacattgatatgtctcaattcctcatatattgtatccatctccatcctattgagtacagaaaagagaacgagaactcaaaaattgtcttaacgaaaatccaaatatttgcctctctgttttcttcgacgttcatggataacctccttaaacgacccattcgctctgacagattcgactaaattttgtgtcaaggcccaatatataactatataaggcccatacaatgatcaacccattagttatttcaaatgtttttattatttatttcaaatttttgctataggtgtaaatttcatgtattattactttaattacatttaaaatttgtatctttcaaatttgttatgggagaaagaaagagaatgattgtgtggtttgtgcggacatagtgatccttttcatgccataactcactcttcgttttcttctttctcatcgtcacgttaggttgtctctgagccgccaaatattcatctcttgtggtcccgttcacgtcccaacgccatttacactcatctccgtaacctctctcttatgtgctttctcattacaaacaactaaaattctcaaagattaacatgtgcaagagaaataacaagtaatgatatgatctcattctcacctaatctatggttgaaaaaaaggaaatggtgtcagtattagtcataataaagccttggagttgtagactatagcatgaaaggaccaggaatcttcaagcatggttattttctgatacgaatgatttatattttaatcgtttattaacacccatttaacctcataatgactctattagcctactctcaatccccaaatttactagcataattaactaattcaagggattatcttcacccacttgtgtgcatccatcaaaagttaatttcttatcttagaaatacatttcatctaaaccaaacaaatgatatacactctcatttctattcattagtgtcatttctacaattgtagcagtatgttaactactgtaactattgtgatccaaatatacagtaaaaggttgcacctctactgtaactattttaacaagttcgcaaaatgtacataggagaaataggttgatttccatggagaaaagaaaatagtaaaaggtgaaaaaggttcactcacacgcatcctctgtctctgagagatatatttccccttgcagtaaataaaaatct

SEQ ID NO: 12499 - DNA, 3000 bp, Unknown
  misc_feature (1)..( 3000): cDNA_ID_2712184_gDNA_ID_2214555_Annot_ID_185698 3000 nt of promoter + ATG
atctggagtgttccatctcttaggtacgagaaacagggagtcggggaagtatcaaacatagcatttcttcttagacaactcttgccaagagattgatgatatacattgaaactcatgcaggtgatgatgaaaacatagcaaacaagaagcctttggctggttctcaggtctcaggtgttcctgctgcatccactgcccataaggtaaaaaaatttagaacacatgaaactaatctttcatgaatcgggcagttcatgtagaaaaatgcaactggattagtaagctgtgtatttgtaatcatggttttgatgagacaagtttgtgattcaacaggatttggaggttccgaaacttctaactgcacacaggtcacttgataacaacccgcgacgagagatcattcaagctcctgtccggacaaagagtgttctttctgcgttctttgttaaacagaaaactccaaagctcaaagctggctatgtctcgtgaaaacaccaactctttgtactgagaaggaaatttcaatctcataccacgtttcttttaccttatataataacatgttgattttcatgtaattatcttaatcaccacatcaacgtacgaagtccagtaagacatgattttggtctatcattaacaaaactgtgtaatagattaagaatgtgtttttagaatgtaaaagcttaataaagatttctgttgagttattaattaacattgtatcaaattaacaacagagaaaccaacatagagaacaaaatggctcacaacatagccattccaactcagttgattcagcgcgtaaaccgataccaactcaggcttgaggcttcagggcttcatggaattcataaggtctctaataaattatcagtaccttggagctgcaccaaaaaaaaacagccaaaggttacaaaagcgaattcacatagtctaataccatagtagcagtagattcagatgtctcagccggaagatacatacctccaccaagtgtagcttcaggcaacttctctattgagtacttgcgattagtcacatacatgatgggcacaccaggaatctgcaaacaaacatagaaaaaagttgataatatccaaagacttcagccatggatataaacaagagcactgatacaacaaactatctttacctttcgaatccttcgctttaagtctctatcacatgtagccactatgaagcatttatgctgtatattatgagaaatgaatattacagaaacatacaaaagataaaatgtatacaccaagaaccatgggaccagagcatcggtatatcatttcagagtcttgaatacaaagttcaacaagccgggaacgatgtattacctgagtaactctgtcaacgagacagtcatcagcatatgtccctttgtgtatacaaggtagtctttcgaagtgaggatctttcgcaatcctaccaaatattatagtaaaccaattacgaatccacgaaacaaaaccataaacagaaaagccttgttcaaaaagtctaaaagatttaccttagagctacacgatacttctgacctaacttctctaactcagccatgacacaatccgtgatacaaggagtgccttcaaaccagaaacaattacaggtggttaacaagagagagaacctatatagacctatcaaaatctttaagtaactcacaatttgcgtacagacagtctctcattcccttctcaagatcgatctattagatacaccagagcaaaataagtcaaaaaggatttcaaacaatgagagattccaatcaggttcaccaagactataaactctacaaagatcgatacacattctgattatagctctgtgatagagaaatgcaattgaagatgaaccgaccttattctggatagagaagttgatgaagttagtatccaccaaaacacggtaaggaggaaccaatgtagagttgtaagaaaagaaaagccctgcaggaacactcggtctgatccaaaaacaaatcaaacgaaacccaaataattacaacttggcaacgaaagctaacagtggtaggaagcttacacgtttctcggaagttccgtgaggtccttcttgtttggattcagaacctcttccttgtaactatataaataaaaacaaaactaagaatctctttaaaaaaggatcaaatttgaaggaagacgaatcgtttactcactgcttcaaagctttgtggctaatcatcttcttcacgacagcaaacttttgaggtttctttgcctttcccatcttcgaagcaaagagtaacaaaaaccctagaacgacgcagagagaaagactgggaagctgaatatgcgaggtctgaatcggcggaggctgagaagtggttttcgaattgggtatcagagacggagactaacgctcaatatacagcctaattataagcccaataataaaataaatgggcctaatttatatggcccataagcgaagcgagtttcttaaatcacgtgttagtaaaggttaagaaacgaagagaaaattccagatttttcaaagtgatgcgagaatgatctggagagcagaagaaatatcttttccctctgaacgttgttgttcgtctttctataaatcaagaaatgtctttggattgttcactacccatagaaaaagctgcaatcatctgaatcagaaagtaattcgaagaagaaatctgctttttttaattggtggagagagtgagagagcttcgcaggaactgagtcatcggaatttacggatcgtttctgtttcgtgtaagctccgtcattttcccttcttagtttaatgaatagctttgagaatcttgagttcattgctcttagtttaatgaagatgcgattgatttagtttggcagattttggtgattgtggtaacgaaataattctgaatgaaccaaattcacattgtatttttctaatgatatatggatttgggtatttgctgcagttttactggaattggttaagtgatcttgattaaag

SEQ ID NO: 12500 - DNA, 3000 bp, Unknown
  misc_feature (1)..( 3000): cDNA_ID_1031360_gDNA_ID_2214555_Annot_ID_185696 3000 nt of promoter + ATG
actccaccgaaaaacccgagcttttgaaccaaattgtttgagttcacgtcaatgtaaagttttatctggaagggttcatgcttattatacaacaaatgaaagaacattttgccaaatgaatttggagtttaggaagaaaacaaaaaactagttgggcctctttgaaaccgtttcatacacacagatataagtgaggcttcctataattatttttgtaatcaaattataataatgaatgggctttacttaaaggtacgtgaagccctaaccataaatggaccgtcatataatttcaattttgggataatcatcagaaccttcaacgagtcattgtcgttgaagaattgaagatgacaagtccgagaatcgttatccatgcggacttgaaaaattatccttaggagatttttcctgacctatcctcgcgtcgcgccttcttgtcttctctctcaatccagcatattcctacgcaaatcccttatcgttttcatgtttgtcctggtttaaatcttcaatctcctacccggtcttttcatcctccgatggcattccttgttcgttcgccggagatacccaccgtctcggcgagaatcttctccgatgcgaattcgagtgttattagtcatgtgtttatgaggaggaaggctacggtttcggcgattgacgccagagatttgcctggtgttaagaatccgaaatcgagattgtactggcaattctcagctccggtgaaagaagactacaagattagcagagaggaggaagaagaagaagaagaagataagcagagttactacgtgaatatgggtcacgccgttcgtagtatcagagaagagtttcctttgttgttctacaaagagcttaattttgacatttacaggtttgatgaagattctcgatttaaattgaactgctctttgattagctttctcaaagaatctttttgcttcagagtcatgcttatatcccaaatttgatctgttcttggttaggtttcttagagaatgatctgttttatcagttggtgattagctctttctcttgtctaatttcgcagggatgatattgttttcaaagaccctatgaacactttcatgggaattgataactacaaatccatatttggggccttacgtttccatggaaggatcttcttcagagcactatgtgtggacattgttagtgtttggcaacccacagagaacactctgatgatacgatggactgttcatggaattcctcgtggtccgtgggagactcgtggtcgattcgatggtacttctgagtataaattcgataagaatggcaagatttatgagcataaagtcgataacatagccattaattcgcctccaaagtttcaaatgctcactgttcaagagcttgttgaagccattagctgcccttcgactcccaagccgacctactttgagttcggagattgattcatcatcatcgtctgaaacatcatgctggtgttatgtatactagtagtcttttgtgtggttataaatagagtggtactgtaatatagatgaagaaggaacgatttaaaataaacccaatagcatgaatacattacacgctttttttgcgtataataatcaataaaacgcctatatgtacataaatttgtaaaataacagtatagcatcatgatacataaatatgttgactttgattactattatattttgattcaaaaatattgacaagtcactgcaactccatgaggcaccgaaactagtaagcctggttgtggaacttggtccacgaagtcgtgttgacggtagatgtcaaaaagagttgacaaggcagttaagcaaggtgtgaagaagttgaatttcaagactaaatgtaagtacaaccatagctactttgaacatttcttgcctttaccgcaatctcctcaagcgactgagctacaggcttgaaattaaattcgagcaactcgtacatttgtgtatatccatactttgacaaaagctttttatttatagaatatgatttatacagcctacatttgtgtatatccataatttaatcttaaaaaaaacgcatatttttctaaatagaaattcgaattatataacatgaagacaacattggcacaaaccaaagaaaaaaacttgtttggtcatttacggctgtcttttaattcacctgaacagaatcattgaaagcaaatggcaaaaatgatttgtaagactaaagttggggccaatgatttttgcccagtaaaaccatgatggacccatgggcctttgcacgtgcaggtccgttttgacagctagtccacacgtgtggatctcatgtgaatgaagctggcttaatgctgacgtgtccgccagcgttactttttcatgcaacttgccggagtcaattataaaatccagttgaccggtccttttggcaaggctagttccgtcatttcaaatcctatagatccacctccgtttactttaaatgcttgcatagaatctaaccacaaacacataaataatttaatgtgttatcaacaaccgcaattaaagcagcatatacaaagacatgtgattttttttacgggagtatttttaatgtatactcgacaaaaatattaagttaatgtcctttcaaattatgctgtattaattttgtaattcagaggtatcttatagtatgatcaaattattaattaatcttgtttttttatgtgttcataataacttatttaagagaattatattcaaaaaaaaaaaaaacatagtgcgtctttcccaaagtcgttttcttctatacaccttttttaataactctggaagcaaaaatggcataagagtcctttggatttggaatcgcttctacttcactctcaccttcctcctattctctctctctttctatgtcaagttagcttagccgtctcaccagaaagctaaccttacctcacaaacattgattgtgttacactaatctcttaaatagagagccgtaatttctacacactctgatcgctag

SEQ ID NO: 12501 - DNA, 3000 bp, Unknown
  misc_feature (1)..( 3000): cDNA_ID_3025436_gDNA_ID_2214555_Annot_ID_185695 3000 nt of promoter + ATG
ccctcttaccagaaaaccccaaaatccagcgatttcagttccacaacctaatgtgagactcagcaacgaaaacaaaaaatatggatatatggaagttagcttatagattaaaaaatcactaccaacatggaagttgataatcgtgagactaactgagacttacagatagataatttctacggaggagactttgccgagatccgacgccggcaaaagcaaaacagagcgcgcgaggttgagaagatgcttatgaaataattgggctttaaatttatacactttggcccattaggaaaaatataagcccatttaaaaggttttgtatccgccactaaagttcattgaatcacaaaaataggatgctaatttttaaagtttagaactaacagtacttttccactttttcctgcttttgtgattttattctgttattgacaactttaaagttgctcttgaggatactctagtttttctgagtcaaccactaaaagaaattgatagacccacccaaactaatgacaaattgacatattaacatgtaagacaaccttgtcaaatgtcactggagttttcctctaatcaacaattccatttatagagttaaaaggtaattaaaaccagtggattttttattgcttaaccatttaaaacggttctaaaaataaaacacaagtgtcaaagattcgaacatcgattccaaaacagtaaacaaacaaaaaacacacacacaaatataaggaagagaaggcgtagaatcgattcagaatctgtgaattacgaatccatagagagaaaggttttgcatttgcaacctttctcaaattgggttctgtgcatttccttgcactttggataataggaactaaatctctttctctggttcatcaatggcggatcaaacgaagaagagatacgttacaagcgaggatttgaaaaaacacaacaaacctggagatttatggatttcgattcaaggtaaagtttacgacgtttccgattgggttaaatctcatcccggaggcgaagcagcgattctcaatctcgccggccaagacgtcaccgacgcgttcatcgcttaccatcccggaaccgcatggcaccacttagaaaagcttcacaatggctatcacgtgagagaccaccacgtgtcagacgtctcacgtgactaccgtcgtttagccgccgagttctccaaacgcggcctcttcgacaaaaaaggtcacgtgactctttacacactcacgtgcgtcggcgtcatgctcgcggcggttctctacggcgttttggcgtgtaccagcatctgggctcacctcatctccgccgttttactcggtctcctctggatccaaagcgcttacgtcggccacgattccggtcactacacggtgacgtcaaccaaaccgtgtaacaaactaatccagcttctctccggtaactgtctcaccggcatctcaatcgcgtggtggaaatggacgcacaacgctcaccacatcgcttgtaacagccttgaccacgatccggatctacaacacatcccgatcttcgccgtctctacaaaattcttcaattcgatgacgtcacgtttctatggcaggaaattaacattcgatcctctagctcgattcttaatcagctaccaacactggacattttacccagtaatgtgcgtcggaagaatcaacctcttcatccaaacattcctattgctattctcgaaacgccacgtcccagatcgggccttgaacatcgccggaattttagttttctggacatggttccctctcttagtctcgttccttccgaattggcaagagagattcatcttcgtcttcgtgagcttcgccgtcacggcgattcaacatgttcagttctgtttaaaccatttcgcagcagatgtgtataccggtccaccaaacggaaacgattggtttgagaaacaaaccgccggtacgcttgatatatcgtgtagatcgtttatggattggttctttggtggattgcagtttcagttagagcatcatttgtttcctcggcttcctcgttgtcatctccggacagtatcgccggtggttaaggagctttgtaagaagcataatctaccgtataggagtctttcgtggtgggaagctaatgtgtggacgattaggactttgaagaacgcggcgattcaagctagagatgcgactaatcctgtgttgaagaacttgctttgggaagctgtgaacacgcatggctaaaaaggtgtttcgtttgtcgagtactttttaattagattgaactgttttaggtgtaactctaccgtgataaaaaactacatatttattttgattttctgctgagtttataattttctaatcgctaagcctaagaatctatttttgataaacaaatttgtcagacatgcgtgcttgttctacgtttaagacggatcgtgcgggtctaatatacatgacaaagtactccaccgaaaaacccgagcttttgaaccaaattgtttgagttcacgtcaatgtaaagttttatctggaagggttcatgcttattatacaacaaatgaaagaacattttgccaaatgaatttggagtttaggaagaaaacaaaaaactagttgggcctctttgaaaccgtttcatacacacagatataagtgaggcttcctataattatttttgtaatcaaattataataatgaatgggctttacttaaaggtacgtgaagccctaaccataaatggaccgtcatataatttcaattttgggataatcatcagaaccttcaacgagtcattgtcgttgaagaattgaagatgacaagtccgagaatcgttatccatgcggacttgaaaaattatccttaggagatttttcctgacctatcctcgcgtcgcgccttcttgtcttctctctcaatccagcatattcctacgcaaatcccttatcgttttcatgtttgtcctggtttaaatcttcaatctcctacccggtcttttcatcctccg

SEQ ID NO: 12502 - DNA, 3000 bp, Unknown
  misc_feature (1)..( 3000): cDNA_ID_3025450_gDNA_ID_2214555_Annot_ID_185690 3000 nt of promoter + ATG
gaaaagtgcatttgaacgcactaagccgatacacacatatctctgcttttggaattttcaacagtggtgttgaagttcaagtagatcattataagttcaaaacatcacagataacttgcaacaattgctaaattcacaaatttccccgtcaaaatgtatatctaatctaactaatacaattagagtaaagttgaatcaaacgaattgtggggaagatgattgttgagctattcaattgacattgaatcacaactgcccatctgccccaaattaatgtcgcagagaaatctttcgtacaaagcgcattacatcgcactaagccgatacacacaatctctgcatttaaacaaaaccaacactgaaacttcatatgaaactagctatacaccaaaaaacacaagagaacccacgaaaacgtagatcatcaaagagctcttggagattcaatctacgaaggttaaataaattgttagagaagcctcatttcatgagtttactcgcttccctgctgggtccttcgcttttgcttctaatcacattctcatatcacaagaatttaatcgaaaaccaaatccataagggatgaaaaaccgaaatccggaattgaaaacacagatctcggataaatccaccaatctccgattatgaatttccgaaggtaaacttggcttgaatacgcattgattaaagcgtttcacccataggtccttcgttgcctaatttctaaacatgctacaacgaatacgatgctcagcgaatacgaaccataatattatcggacatcaactcgcgagacgagatttgtcccacgatctgtttatttccgatattaactcttcatcgcatcgctcgataatcaaagatatttataaaaaaaaacgtatttgaaagctaagtaaagttgccgaaacggcgaggaagaagatgagctataaaccctagatgagctgtggaagtaatagaaaatttagataagtttatatagagcatctattatttagggttaatgcgacgtatcatagccgttagaattctaaatcaacggatgtggattaggcccatctttgtgatctggacgtttattcaaaaagcctatctttgtgcaatgaatctcattgtgtgagtgaggcctatattgggccttaatggtaaaaaaatgtcatggagaattcacaatcgattttaaacatttttcaacaagtaacaaatcatatataggttagtgccatgactactagttactaactagtacctctggtgatgggttatttcactcgtcgttttatttttggatttgagtttgggaaactaaaagtgaataataccaaactcgcatctgaactccaaagtcattaccatatatataaattctcaaaaagacactgcaaaatgcttaaacacatgtgaaagattttatgattctcttcaagtatcgtcgaaatcaattaagctttcattcctccaaaaacttcttaagatgtttcaaccataccacgtactttcgcgtgcctgtcgtcatgtacttgtacaaggcaaattttgggctataatcaaatatcatacgcaaataactgtgtctgtaatccacgtttctgcaaaaggccatgaaagaaagaaagaaagaaagaaagaaagaaaacaagattaattataacatttctgctgtgctcatgcctatctgactatatatacaaacattatggtgttttcttattcacaaagcttacttggaattagacaacaaatcacacggccgttgatcctcccaataattcccccgactaatcacagatacaccattcatggaagtaccattaagaggaaaagccgtgcacctaaactcgaggctgaggccactgatcttcttggtaaaattcacagttagtggaaaacataatccatcatattcttcatagggcatacctgctacaactacaatatattcctcttggtagtctctagtcaatgtcacagtcttacctccatcatcttcaattgtgtaagggtttattcctggagtcggctcatcatcctggaagcatattaattatcagtaaacttagatacttttattgcaatgtaagaaaggagcagagtccaacgctagtgggaataataacatatatgattatagaatgaacaactttaggtggtataaagccagagcagagcatataaagaaacctaaaccattactattagttttggaaggaaagcaaaatgcagaaatatttacaaaagcgagatcatggagttgcaaagcagaatagatctcggagtcaaatcaatcggagaagcatttggttggagctctggcgatcatcaatagccgtcgaggaaagaaagccacgagagaccatgggacgcggcggagccaaactcacaacggcggagatagataggaatcgaccacaaacggaagcaagcttagatgctgacctgcaccaagcgaaaaccatggtcggcgattgatttctctctacgaaaatggagttttaaggttttttagttccaaataaatatttatattcttatgattatttagttccaagccaacatgtcatcacttatagtgttgaagttgaatttctatcataaggaaacaaaagattttagggctgcaatcacttgatctccaagctaacgtatcatttcgtgaagtttagatagagcatgcattaatgagacgtaatcatagccgttagaattctaaatcaacggatacggactaggcccatatgtttgatctggacgtttactaaaggcccatctttgtgcaatgaatctcagtgagtgagattgggccttagttataaaatagagccacaggtaacccgacccgtccgataagttgacccgacaattgaaatcatgaaaatcatattggtgttgttgttactccgatctacgataataatcttacagaggaagattcttgtctctttgataaattctcggagtaggaggaatctctgactccttcgggcgagttgagctatg

SEQ ID NO: 12503 - DNA, 3000 bp, Unknown
  misc_feature (1)..( 3000): cDNA_ID_1807601_gDNA_ID_2214555_Annot_ID_185689 3000 nt of promoter + ATG
atcatatgtactaaaccgactcgttgtagattagttagtacgcgttggctaactggtcgatttaacaatttcattcatacaattttgctagtttaaccataacccattgtttgctttagttgtaattttgtatgatctagatacaagaaatacatcgttttcctacgatcttcgtgattagtttacatactcattaatcgtgaccattatcagtttttcaaacctcgggtccttagttagtacgaaccccgagccaagagtgtttagtaaattgtagtgggaagccttgaattactcaaatgtaaccaaaacgaatatcaacgaaacatgacaacgaataagtgtaaaatattttcaaagaggacccatcaaacgaatattgttaaacagtcaacgttacatggctcgaacacattttatacaataaacaaaaaaaattacaaagtaaaacaagaaaatatattattccttggggttgggccacttaattaataaaaacctaacttactaataaatgcaaatttcagtttccaaacaatattaaatgcatcagctgcaattcccacccacctctttttctcttcccctaactaaattaattaaaattaaattttcaaaaaaataaaaaaataaaaatctctatcactctcttctctctctctcccacatggacccagtcttcttcttctttaccatcaaatgtcaacactcgcctcctccgcctccgtcttcctagtccaccctccccttccaccgtcgccaccacaagcaggcaaccactcttacctcacaactctaggctttggctactccatagccatagctctcggttttctcgtccttctctcgaccgtccttttatcctcatacatctgttgccgtgactctcgccgccgcacaaccgccgtggaatccacaggcgatcgtggcggaagtgtaatcctcccccgcataatctttgtcgccgaggaagacaatgaagatctcgaagcaggtgatgtcgtggtgggacttgatcaagccgtcatcaactcataccctaagttccacttttccaaagatacctccgccgcgtcctcagatggctttggtggcggaggagacacaacgtgctcgatctgtttatgtgagtataaagaagcggagatgctgaggatgatgccggagtgtaaacactacttccatttgtgttgccttgatgcgtggcttaaactcaacggatcttgtcccgtttgtcggaactcgccgcttccaacgccgacttcaacgcctctgtcaacgcctttgtcagaagttgtgcctctctcccagtacgcggccgatcggaggagagcaagaagatgatattattattacatagatccattcgcctaaattagggtaattcctatttattatttttgctccgtttcattacaactttactgatttgtaattaaaaaaaatccgtcaaaagtggagtttgccattaatttcatcgaaatgaaatctagtttgaatcgtttactaaccttacaaaatttatccttttctattggcgtttttgaacgtttttttccgtttcccctatcaatatgagcggttcaaaataaaatacgcgtccgtgttgtgtaacttaaataaaagagtttgagtttgaacaaggcaacttacttttagttttttgttgttttttggtcaagggtcggaaactaagtttagttaaaatattagatttgttgaatgtcggaaatagatgtttctaaagttgggaacaaaaagagttacgacttaagatagtatagttttttttattgcatagcgagtacagaagatgaattcaacgtcgtaaactcgtaggtccaaatgttggtcgagttaaagtgtactctaggacaacttttctaaatgaaattaacatttttatagataaaatgtttttgtttatatatatcacatgtgatttttgtttcaaactaaccgatcacaacatacctatgtttgaagaagcgttgccttcaagcaattctgcatttcttctacgtgacctggatgtttctggttcgatgatagccgaaaactgttatatttttcgtaaggcgcacgttagtcacacgaatcctaaggaaggttggttggtgtgaacactttatattaatacatttgaaaattatggttagtcaatatatagtcataatgaaatgcgaatgtgttatttgacttacactagtccacaaattcgctttttcctacacggcactatcctgtggagcgtagtggtaatatgtttttgtaattaagtaattaacctcgctttgattttgatttattctctttctagcaacttgtatataggatacataattagatgtatatcacctacggaatgtaatagagtttagcattattacattacatctgaataataaaaaaagcagtagtagattaatacatgttaaaacttaaaataactcgacctatcaaagccgcttacttaaagagagagttacgtcgtgagcttgtatttttatttttttgacggcccagtaatatattaaaagcccaaaggcaaacattatagaaggccctcttaaggggatacaagcgaaattacgtcgtgagctttaatgcttcatcataattaagtttgagccgtaaatttcgctatacgatatgggacacgtgtcgtgaatctactcgtggtatcggttacttaatgaaaaggcaccattcaacgttttcttccttatcgttgcctacacgtttcaaggctctgcttctccgtcaattaacgtccgttttcgtcatcaaaatactaacgccgttgatgaccttatttaaaaattaactccgaaccacgacgttcgggttttggaacctcaggctcgtggttataaaagtcttgtgtgaaacctattatatttgccattgcttaatcctctcctctccttcacgttgagatatttttgagttttctgtgttgaattttggggaatcgaagaaattgaatttcaaaaatca

SEQ ID NO: 12504 - DNA, 3000 bp, Unknown
  misc_feature (1)..( 3000): cDNA_ID_1807856_gDNA_ID_2214555_Annot_ID_185683 3000 nt of promoter + ATG
ggcactcttgaggatgtaagagatctggcagatagggatggattgagagtaaggattcttgacggagaccttggcgtgataatctactccatcacgtgtcacgcctttgaaatcaacgtcgtccacggttgcttccggcgtcggaatattcgccagcttctccgcaaagaaacctttggctttgtccaacaagcttgaaatcaccgaagccttctcttccaccaccttttcatccgctgatgccattcttttttttttttttttggtgttgtttcttcaaaggatcagatctctctttgtctctctctctcttttctaaagtttatggcgctgtcggttctatatattttggtacctcttttaaggatgataaataccttaattgccggagcgtgacatttttgatttttctttggttgttggaaaaggaataatataataatttttccatcattagaaaaggaataagatcctttttttagagcatcatggtcataacgtgcgttcttacttctttgctcgtccgaaaaaaagatgaaacatgtttattatagaatatactacaattatattttgtatattatgacttttaaattagcaatatgttttaacttttaagcaatatcctaaaaaattaattattagttgttttactattatgaccaattatttttaatagattttaacattatcaaaacttaaactttaaagatatttaacaactacatgttgagtagtactactttctaaacattaatttttggtaaataatcccaagaagatgaaaatataagagattattttatcttcctaaaattagtcaaaacatatatattttataattttaaagattatttgagatttagaggtatacatacttaccttcccattgattgcatttgcttaagttgaaaagtggatttatatatggaagaagaaaaaaaatatgaaaatgtagtttttttgtttcttcttttaattcggcaatccatatttattagtacactttgtggcttcaacttcgccaagacttgttcgcttcttattttcggtgactatttaaggatgctgatcaaaacttgaaagcaattcatgtaatatatcggaactgacttcgtacatgtgacatgtctcattgacattgttcatcgtgtaaataaacaaaacaataatcactcacgataagccaataggtttattcaaacgaaaggaaactgatttggcttgagaaaaatctatggaaaccaaatccggttttattcagtttaccagacgatattgctctatgcctctctataatcatcacgtggtaatcgttttaccggaatattacaattgatttgtttttttattttggttatatgcttaaaactgatttataatcaaaacgagattgcaactatgaacatgcaaacatatatgattacaatgctttaatttgctccgttatatgaaccatggaacattagaccatctccaccagtaaaaataaagaaagtttctcaaaaacatattaattaatattttaatcaaaacagatacattaattattatttaatagttgaactaatagtgtgattacacctgtccaatcatccgagaaatttaactctccttctctcctactttttctcccttctctcatattttttttttaattttttttcttttgttaggtatctcattgagatacttccattggagatgctcttagaacgttaatatatatacaaacataattaggtgaacttagagaggaactgcaattgatgaagaagaggagttagggtttgcatgagctcctcacaaggatggttatggattccttcataagttgtctccacaatgctcgtctccttcgacagcctctgaacttgcttcttcacgttacacatgtgttgtgtgcatctataatagctccttttgatgatcataagtgagaagaaacacacaaaaaaacaatctttttaaaaacaatttcagattatttatgttaaaaagtttacctgggatacaagctgttcttgacggatttctgaccgtactttctccatcgataaccatcatcgagaatatctgcatcactctttgtgcgaaacgaaaatcgcggatttttcatcttcttatctcgagaagagtcgacgaggccattcattaatgaagaggagatatgatgaatcaacgaattgtgtgttagaattcttcgtgtgatttatattgaagagatatataaaaaggtttagaagccaactacattcaactacttcagaccaacaacaacaaaaaattccttcacgtcatctcacacgtgtgtgacttaaaaaacagagacatggtttggtctttacttgaactcctggaaactgtaaacagtagaatccggttttggtatcacaatgcgcaatctcataaaaaagaaccgaagctacgatcttaaaggagctcgtgcagaaccctcggatgctctccaactccaagagagttccaactagtaaccgcgatctcaatctctacatttctctatctaaacccagaaacggaaaaataaaaaaggaatcgcctttggaacagaagttcaataagatcgaaacagagactgggttaggctagagcctagagagaaacagagactgggttaacataaccagactgaaccaaaatccggtttaatatagtaaagatattttaaaactatctccgttgccgggactcgaacccgggtctctcgggtgagagccgagtatcctgaccagctagactacaacggatcttgttgatttcgttaaaatattgaatttatagttaagctatcacaattcctaacagtgtcattgctatgcttgatttgtgtgtgaaacccagaactgaatcgccacttgccagaatctaaacagcgtcctcactcactaggaattgaatcttcttaaaagtaaaattccttgttcttgtaaacacagacacagtcacagataagagggtttcttcatcttcacaacaatg

SEQ ID NO: 12505 - DNA, 3000 bp, Unknown
  misc_feature (1)..( 3000): cDNA_ID_2712215_gDNA_ID_2214555_Annot_ID_185681 3000 nt of promoter + ATG
ccgtgaatctaaagatcatgaaagattacatacgtgtatggtaacaagaagcagagtcactcgatattagctcaatattgcatttttcatttgttactactaattgcacttaactatagatcaaagcctctgatttgttcctttgattgaaacaggtttagaaagattggatcactacaaagagagcagtgattttttcaagccaaacagatgtattctatatttatattttattgcagaattgatttcatacagtcacacatacaagaccaacacacctaaacggaagagacaagctcgacagatggactcaaaacaaagaaaaaagagaaaacactatttatagaacctaaagctgccttttgtaagggttaaacttgtttgtttacctcactattttagtctacatcttctccaactgcattgccagagattgagtcacttgacctaagattacagagcaacacatcgcgccctctcaaagtcagtttaaagaaactatcaacttcctccagtaactgatccaacccttgagacaatttctcagcttgtgtccccaattccataacattatctttgaagaattcaacttcgacaggatcaacgccatcttggatcatcgggtatagcttctcgacactagcatcaacgctctccagctctttgagaatcgtggttctaccggaagacaacatgtctctgatctcagcatttacaacactctgcatatcagtaaagacctttgcccataatggtttttcagagacaggtaaatcgaaaagatccttggtggaatcagaccaggctgcggtaaatacactgcagatataaactgtttgaaccttcacaccataaaaagctcgcatcagaacctttcctttaggcgagttcttgactttaggcagactcagagatttaacaagactgtctagaaccgcacggcagttttcaattctagggttgtttgtattaacatgttgcctccagctatcaagcgaagatcgagcctggagatacttctccccagaatccgattgtaaattgtgcagaacacacttgaggaagagatctccctggttgagacgtgtgagctcagagctaaaggcattacagagatctagtaacctaacgcttatgttgaggtaaacatcaacccatttctcttcccaatcagagacaggaagctggagatcagtaatgagagtgttaatgttcttatgagtctcgcagagtgactccatagctagcttcatccaggataaagtgaggatgtcatctttgttcttaggcataagtttcttcagtctctcttccaaacgtagctcaaagccgttcaatagagaaagtagccatggcgataaatctgatccctttgatgataacatccgaaagggatttccaaatgggaagaaacctcggggtggatcttgtggtcggctcattttgctagacacctgaaaatgaaaagagaaatattgttagaataatgataatgattaatcatacaaaccgatttgctgtgaactcaatgtatcttctgtgttgttgccacacatagaaggactaatcgaggaacaatacaatcccaagtcccaaccttaagagtcccaaaaagctgacaacttttgagatcttgaaaaaaaagaagttaccacctttattgaaatgatgtaaaatcaaaatttgaagatgaaaacaaacacataatcaattgttctaagccataatctacacttgaagatgtccagaaccaaggaattaggataaaagtttcaatctttccaaaattagaagaaccctaggagttaattatctacacggaagttttgaacacagaagttcggtacaaactcttcatcgaacagtaaaatctatcttagaactaaacacacaaacttcgatttacagaagaacacacacaataaaaggagaattatagataacaaaaaaaaactcaatttccacgaaacttaccgttttaagtcgccggaaatgaagaaatcacagggaaaatcgtgtggaaatgattcttctaatgcttcattgaattttctgagtcgatcggctgagaaaaatgtctggcggaggtcgagtttgataaagctacggcccgtcacataaaaactagttacaaccttacaagtataccattagtgaatggctgttacgttttaattggtcacagccttgtgtgtagttaaattcttagcggaaagtggacggctataaaataattaaaagttttatcgaagggccaaaaatgagacgatttcgtgggattataaaataagtcattggtcgattggcgtagtctttgtttattttaattattataaccaaatctaacggctaactaatacataccacgtcctacagactcctgttattacttttaaaaataaaaactgagaagatttaatcgaaaattaattttgacgattcattattatttttggtagtactttgctttttaaaaaattgtaaaatcctcatcaaaaaaatttcagcaactgtgaatattttttaaaaggcataacaactttatttgttttacgtaacgaattccttggatttgcgtaaaacatgggcctcaaagcccaaatgacagctgtcaaggaacaaatcggtcgacaaaagtatggaccccacttttaatttacatccggacaaagactaaagagctgtctttatctcaatcgtttttcttgtttctttaagcccattaggtatagctacctcaatttatgggccatcaggtccaaagggcatttttcccaaaagattcctaatcgaattacgtcgatattgaataccttattgactttgagacaactccaccattgtgctagataaaataggcctttttaaaactttgaagataaaaaacggcccataaacgttgtgaaaaagcctctcgctgaaacagaaggtctctgtaagtgtctaatcgcgcgatgaacttgataacggcgatgaccggagctaaattgcggccataca

SEQ ID NO: 12506 - DNA, 3000 bp, Unknown
  misc_feature (1)..( 3000): cDNA_ID_2709020_gDNA_ID_2214555_Annot_ID_185679 3000 nt of promoter + ATG
gcgattagacacttacagagaccttctgtttcagcgagaggctttttcacaacgtttatgggccgttttttatcttcaaagttttaaaaaggcctattttatctagcacaatggtggagttgtctcaaagtcaataaggtattcaatatcgacgtaattcgattaggaatcttttgggaaaaatgccctttggacctgatggcccataaattgaggtagctatacctaatgggcttaaagaaacaagaaaaacgattgagataaagacagctctttagtctttgtccggatgtaaattaaaagtggggtccatacttttgtcgaccgatttgttccttgacagctgtcatttgggctttgaggcccatgttttacgcaaatccaaggaattcgttacgtaaaacaaataaagttgttatgccttttaaaaaatattcacagttgctgaaatttttttgatgaggattttacaattttttaaaaagcaaagtactaccaaaaataataatgaatcgtcaaaattaattttcgattaaatcttctcagtttttatttttaaaagtaataacaggagtctgtaggacgtggtatgtattagttagccgttagatttggttataataattaaaataaacaaagactacgccaatcgaccaatgacttattttataatcccacgaaatcgtctcatttttggcccttcgataaaacttttaattattttatagccgtccactttccgctaagaatttaactacacacaaggctgtgaccaattaaaacgtaacagccattcactaatggtatacttgtaaggttgtaactagtttttatgtgacgggccgtagctttatcaaactcgacctccgccagacatttttctcagccgatcgactcagaaaattcaatgaagcattagaagaatcatttccacacgattttccctgtgatttcttcatttccggcgacttaaaacggtaagtttcgtggaaattgagtttttttttgttatctataattctccttttattgtgtgtgttcttctgtaaatcgaagtttgtgtgtttagttctaagatagattttactgttcgatgaagagtttgtaccgaacttctgtgttcaaaacttccgtgtagataattaactcctagggttcttctaattttggaaagattgaaacttttatcctaattccttggttctggacatcttcaagtgtagattatggcttagaacaattgattatgtgtttgttttcatcttcaaattttgattttacatcatttcaataaaggtggtaacttcttttttttcaagatctcaaaagttgtcagctttttgggactcttaaggttgggacttgggattgtattgttcctcgattagtccttctatgtgtggcaacaacacagaagatacattgagttcacagcaaatcggtttgtatgattaatcattatcattattctaacaatatttctcttttcattttcaggtgtctagcaaaatgagccgaccacaagatccaccccgaggtttcttcccatttggaaatccctttcggatgttatcatcaaagggatcagatttatcgccatggctactttctctattgaacggctttgagctacgtttggaagagagactgaagaaacttatgcctaagaacaaagatgacatcctcactttatcctggatgaagctagctatggagtcactctgcgagactcataagaacattaacactctcattactgatctccagcttcctgtctctgattgggaagagaaatgggttgatgtttacctcaacataagcgttaggttactagatctctgtaatgcctttagctctgagctcacacgtctcaaccagggagatctcttcctcaagtgtgttctgcacaatttacaatcggattctggggagaagtatctccaggctcgatcttcgcttgatagctggaggcaacatgttaatacaaacaaccctagaattgaaaactgccgtgcggttctagacagtcttgttaaatctctgagtctgcctaaagtcaagaactcgcctaaaggaaaggttctgatgcgagctttttatggtgtgaaggttcaaacagtttatatctgcagtgtatttaccgcagcctggtctgattccaccaaggatcttttcgatttacctgtctctgaaaaaccattatgggcaaaggtctttactgatatgcagagtgttgtaaatgctgagatcagagacatgttgtcttccggtagaaccacgattctcaaagagctggagagcgttgatgctagtgtcgagaagctatacccgatgatccaagatggcgttgatcctgtcgaagttgaattcttcaaagataatgttatggaattggggacacaagctgagaaattgtctcaagggttggatcagttactggaggaagttgatagtttctttaaactgactttgagagggcgcgatgtgttgctctgtaatcttaggtcaagtgactcaatctctggcaatgcagttggagaagatgtagactaaaatagtgaggtaaacaaacaagtttaacccttacaaaaggcagctttaggttctataaatagtgttttctcttttttctttgttttgagtccatctgtcgagcttgtctcttccgtttaggtgtgttggtcttgtatgtgtgactgtatgaaatcaattctgcaataaaatataaatatagaatacatctgtttggcttgaaaaaatcactgctctctttgtagtgatccaatctttctaaacctgtttcaatcaaaggaacaaatcagaggctttgatctatagttaagtgcaattagtagtaacaaatgaaaaatgcaatattgagctaatatcgagtgactctgcttcttgttaccatacacgtatgtaatctttcatgatctttagattcacgggtcccttgagagatcttttacagttgaaaaaagcttctctcttcacatg

SEQ ID NO: 12507 - DNA, 3000 bp, Unknown
  misc_feature (1)..( 3000): cDNA_ID_2712226_gDNA_ID_2214555_Annot_ID_185676 3000 nt of promoter + ATG
ctgccaaagcatgtgtgcttggttctgtgggcattgaatttaaaacatcagaagcctcgtcgatgaaacctgctcgaccaagaagatcgatcagacacgtgtagtgttcatcctctgcttctatcttgtaaaactcagtcattcgtttgaagcaacggagcccttcttgaactaatcctccatggctacaagcagacagaacctctaaaaaagtgatcttgtctggttgaagtttctgcagcatactttcaaacatttgcaagctttcttctgcgaatccatgagaagccaaagctcctatcactgaagtccatgaaacaagatcaggttctcggatcgaatgaaaacataaaagtgcttcagataaatttccattcctggagtaggaacttatcagagaattagcgaccgacaaaaaatctgctgagccctttttagtaaccatcgcttgcacttgcttaatctcccaaattgcagaaaatttggcgcaggaacttagaacacttgcaaaggtaagctcatctggttgaagattctcaaggagcatttgaccaaaaagtctcatagcttctcttccttctccattttgtgcaaaacctacaatcatcgcattccaagacactacatttctcacaaccatcgattcaaaacactcccgagcatcactcaaatggttactcttagcatacatattcagcaatgcagtcgccaccggaatgtcgaattgatatgacactttgaagagaatggcgtgaatctgcttcccttgttcgatcctgcatgcactgagaagactcgagaaagtaaaataatcacccctgaatctgtttttgtcagaacccatcagcttgagtaaaccaaaagcttcatcaatcataccgttaagaacatacgacgaaactaaagcgttccatagcactaaatctctatccaaaaccgcctcaaaaactcgtcttgcttctacaatgagaccacatttcccatagaaatgaactagactagtactcggaaagcaactcgattcaagaccttgtttcaccatcagacagtgtaattggataccagctttcatattggtcgaatcagtacacaaccgtatcaaccccatgaacgacacatgatccaaactcacatcagtgaaaagaatccgactcaaataacaaaaacctagatgagctctgtggttggtgtcaccgtctcgttgaatgaccccgtgaatcagtatgttccaagtaacaatatttctcaaaggcatttcgtcgaagagcttatctgcatcatcgaattctctgattttcgtgtaagcttgcaagagcttgttttgaagaaacagagaattgtaaatcccttgttttaccatgaaaccatgttcttgtttcacgtcagagagatgatccaagctagcagataacttcgatacagaggatatagctacaggtgaagaagaagaagaaggaatggttctaatgttttgcaaggatgataagtggttctgatggttcgcaaggaagatccgagttgatcggaggaatgtaaaacgcatctctcaaacaaaaaaaaagagacggcgtggcgggaaaattggttttacatcactgtaataataagtgactctatctatattctataagagttgaatttttttatatctattttcataactgatgatataaattttgcattagttaatataattgacgttaatatttacatcatttgtaaataattgatgttaaaattagtatcaatttaattaagtgatttttaatattaagataaattagacgattaaatcttttagaagtacatttgaagttgtaaaagcattgaaacttgatttgataaaattaatcaaactgaaagtttcttaagctatcatcacttcttagcgagttaaaaagaatatattaattatccaataattatatttaagactttaacagtattttttcagaaattaagaagtaaattaaatattctattattattcttctaaagaagcagtcttaaatgactattcaaattttccattattgattaatagccactcgaacccagagctagctggttctccccgaaatgcgttgatttaaataaaatagaattaattttatattaaaaatgtacatcaaaatcttaaaataaaacttattttgcattataaaaataatctaaacatgttacaaggccccaaaaagagccaataaaaccacaaggtgcaacctctcaatgtctcttgctttttggtttgcaaaaaaaaattaactcaaccagtggtgggttaaataattaactagagttaaaacgtcatatgacagctaatatatatttgatggtatgggtctctctctctttcattttccaatgagtctctttatatataaaccgtcgtgctgcttcattcaataaaacccattttgtctacattttcttaataccagcagaaactacagaaagaagatttatataaataaaaaaattactagacaaaaaggttagtgattccgcaatattataatctaatcctcttcgtttgcaagtttcgtattttcacattgtttagtaaccctaattttgggggaaaattagtttattcgattttttgaggaataagggtctgtatctgtgggaaatttgatttttgaccctaaacttcttcttcggtcaccatccatcgaaacccaaacctcgaaagagagagagagaaatggcgggccaaggggaagtggggaagccggtatagggttttgccaaagggaaaaaacttccttaaaatttcgattttttttatgtttcccgcttaaaaaaaccctaattccgccatggaatctctgaggtcttaatcgtaagttcgtgattctttagttccttgatcttcttgggatttcatttttcgtttctctttagattactgcttcttcttttttttgttaggtttgttagagataacgagaaatgggatctgttaattgttgtagggttcgtagttcgttgttaatg

SEQ ID NO: 12508 - DNA, 3000 bp, Unknown
  misc_feature (1)..( 3000): cDNA_ID_3025463_gDNA_ID_2214555_Annot_ID_185675 3000 nt of promoter + ATG
gatcagagtgggtatcttatggaagtgaagagccatggaaacaacttcttctgtttagggcctcaagaacaaacaatgattcagcttgtgaaaagacttggcaggtgggtatataggtacagttattccataatctgcagttactggtattaaaaaaaaaaagcctataggtagatgcaccaactttcctccttctatgtcgatttgaaaattcgttattgattttaactgtggtgatgtgaacttttgcctgtagaatcatgaattgcatgtgtcattgaagcattctaagaagttactagtagaaaattctccatcagattttagcagaagaaactcgattcttcataatgtccgcttccctgtatccaacaatgaactttctcgatactgtctcactgtacttagactgtgaaccatgtgattgaaatagaatctaattagtctgatggtgattgtttgtcagtactctctgatttaaccactgttcttccatgtttatgccattcaagtcttgataaattgctcatgtgtttcagaaagtccagaagatgcacccatgcctgtatgatgatagtgctggagctagttacaatctaagagagagactgagttacgaggattacaagaggggaaagactgggaatggctcggatataggcagttcagatgaggaggatagaccatgtgctctagttgggtcaaagtttcaagctaaagtaccggagtggactggcataacccctgaaagtgattcaaagtggttgggcactcggatctggccactgaccaaagaacaaaccaaggctaatcttcttatcgaaagagatcgtattggaaaaggaagacaagatccttgtggctgccataatccaggatctattgaatgtgtcaagtttcatatcactgcaaaacgggataaactgaaacttgaacttggtccagctttctacatgtggtgttttgatgtcatgggtgaatgtactctccagtattggacagacttagaactgaagaagataaagtctttgatgagttctccaccgtcacttagcccagccttcatccatcaggccaagatgattcttccttcgaagagcagaggaaaaattgtgagctacttctacaacgtgacccttttgcagtacagagcaagtcagagtagaataacacctcacgatatagacagtgatactgatcaaatattcctccgcgcaacagagaatgaaaatccagcccccgaagcaaacacatttcagaaacccgccctgctttcgcctaataaaaaaagatgtcgatagagctatcacccggttgagattcaagtaggagcagctcttttagttttcttcgtttttggggcttctattgccattgaaactgctttagactctgtggggaaaaggcttcataatagcatcttcttagcaaattctggttttagttttgaggtaaatacttgcatctcttccttgatgatcctacagtaggattcctttttgttggcattgcttgaaatgctttgcggaaactggtgaatcagagagatgatttctatcagtacagtgagagaaatttggattagtttggtgaatacaacagaggcaaaatgtaattgctatatgtttttttttctgtttttttccaaggaaaatgaagaaatgagtaaatctctcttgttattaatcgagttctcagtttcatgatttcgactataaccccctcatcacaagataaatttaaacctttacacgagcaaagttaatcataaattcaaagattggtagcttattgggaggttatataacactactaaatgatttgctatttttacttagagaagcataaaccattttctgtatcaaataaatgatattttcttttgaaataatagtgttaaggattttgaagaaataaaaattaatttagttacattgtacaatgtgattttcttcaggaattcttattttttaaaaattaagttaaacaattaaattcagagatactaattagttcatattgtagtttagagagaatacaattgtatttaaaccaacaaaactatgataagatttgttgggtcagatattggaaaaaggactaaaaattgtcatgatgttttgggccaatgattcactcttcggcccataaaggaacccatgaaaaatccagatcatcatagttatcccacgcgcatgtaaatcgcgttgttaaaagcgcccgtttttcgcagtctaacccctacggaaattggcctaaaatcaactgaatccaataatttggagtccaagggcgcgtgagctaatattctcttcttttctttctttatcgtttttttttttttttttgcttaaacgatatttcatgcctaattactctttaaaacctttttccctccaattttctttaaattactgatcattattttatttgtcgcaactaaatttttatctactgaaattagtaatggtattattctataaagctaaaccgtgtatgttaagagattggatagggttaatgcatgtggacacgttactcatttttcatttaaaaaaaagacatgtaatttgttgtcctcacgtctactatagtcgtaactcccgtaagtttatggctcacgtttctcttaaaatcattcattcttttggttataaaatactattgagaaatgataattgtaggataagtcccaaccccaccatcattttccttacaatatcatccgttgttttattgtaataaatcatcgatgtccatttttatattttatcgtagtgtgttcatgtttggatttgaaaatggaatatttatgacgacaacaacaacaacaaaagaagaaaatgaaatatattagtcaatattaactaaatgttctttcacatagacttatattgaaaaatataatatatgtccattttgatttttaaaaaagtaactacagtatatggaaagtagattaaaggattaacaaaaagaaaagataaagataaagcaatg

SEQ ID NO: 12509 - DNA, 3000 bp, Unknown; identical to SEQ ID NO: 12489
  misc_feature (1)..( 3000): cDNA_ID_1387805_gDNA_ID_2214555_Annot_ID_185672 3000 nt of promoter + ATG

SEQ ID NO: 12510 - DNA, 3000 bp, Unknown
  misc_feature (1)..( 3000): cDNA_ID_2712226_gDNA_ID_2214555_Annot_ID_134749 3000 nt of promoter + ATG
tggattctcttttctcatggatgttacatcctcctgtgaaagctgccaaagcatgtgtgcttggttctgtgggcattgaatttaaaacatcagaagcctcgtcgatgaaacctgctcgaccaagaagatcgatcagacacgtgtagtgttcatcctctgcttctatcttgtaaaactcagtcattcgtttgaagcaacggagcccttcttgaactaatcctccatggctacaagcagacagaacctctaaaaaagtgatcttgtctggttgaagtttctgcagcatactttcaaacatttgcaagctttcttctgcgaatccatgagaagccaaagctcctatcactgaagtccatgaaacaagatcaggttctcggatcgaatgaaaacataaaagtgcttcagataaatttccattcctggagtaggaacttatcagagaattagcgaccgacaaaaaatctgctgagccctttttagtaaccatcgcttgcacttgcttaatctcccaaattgcagaaaatttggcgcaggaacttagaacacttgcaaaggtaagctcatctggttgaagattctcaaggagcatttgaccaaaaagtctcatagcttctcttccttctccattttgtgcaaaacctacaatcatcgcattccaagacactacatttctcacaaccatcgattcaaaacactcccgagcatcactcaaatggttactcttagcatacatattcagcaatgcagtcgccaccggaatgtcgaattgatatgacactttgaagagaatggcgtgaatctgcttcccttgttcgatcctgcatgcactgagaagactcgagaaagtaaaataatcacccctgaatctgtttttgtcagaacccatcagcttgagtaaaccaaaagcttcatcaatcataccgttaagaacatacgacgaaactaaagcgttccatagcactaaatctctatccaaaaccgcctcaaaaactcgtcttgcttctacaatgagaccacatttcccatagaaatgaactagactagtactcggaaagcaactcgattcaagaccttgtttcaccatcagacagtgtaattggataccagctttcatattggtcgaatcagtacacaaccgtatcaaccccatgaacgacacatgatccaaactcacatcagtgaaaagaatccgactcaaataacaaaaacctagatgagctctgtggttggtgtcaccgtctcgttgaatgaccccgtgaatcagtatgttccaagtaacaatatttctcaaaggcatttcgtcgaagagcttatctgcatcatcgaattctctgattttcgtgtaagcttgcaagagcttgttttgaagaaacagagaattgtaaatcccttgttttaccatgaaaccatgttcttgtttcacgtcagagagatgatccaagctagcagataacttcgatacagaggatatagctacaggtgaagaagaagaagaaggaatggttctaatgttttgcaaggatgataagtggttctgatggttcgcaaggaagatccgagttgatcggaggaatgtaaaacgcatctctcaaacaaaaaaaaagagacggcgtggcgggaaaattggttttacatcactgtaataataagtgactctatctatattctataagagttgaatttttttatatctattttcataactgatgatataaattttgcattagttaatataattgacgttaatatttacatcatttgtaaataattgatgttaaaattagtatcaatttaattaagtgatttttaatattaagataaattagacgattaaatcttttagaagtacatttgaagttgtaaaagcattgaaacttgatttgataaaattaatcaaactgaaagtttcttaagctatcatcacttcttagcgagttaaaaagaatatattaattatccaataattatatttaagactttaacagtattttttcagaaattaagaagtaaattaaatattctattattattcttctaaagaagcagtcttaaatgactattcaaattttccattattgattaatagccactcgaacccagagctagctggttctccccgaaatgcgttgatttaaataaaatagaattaattttatattaaaaatgtacatcaaaatcttaaaataaaacttattttgcattataaaaataatctaaacatgttacaaggccccaaaaagagccaataaaaccacaaggtgcaacctctcaatgtctcttgctttttggtttgcaaaaaaaaattaactcaaccagtggtgggttaaataattaactagagttaaaacgtcatatgacagctaatatatatttgatggtatgggtctctctctctttcattttccaatgagtctctttatatataaaccgtcgtgctgcttcattcaataaaacccattttgtctacattttcttaataccagcagaaactacagaaagaagatttatataaataaaaaaattactagacaaaaaggttagtgattccgcaatattataatctaatcctcttcgtttgcaagtttcgtattttcacattgtttagtaaccctaattttgggggaaaattagtttattcgattttttgaggaataagggtctgtatctgtgggaaatttgatttttgaccctaaacttcttcttcggtcaccatccatcgaaacccaaacctcgaaagagagagagagaaatggcgggccaaggggaagtggggaagccggtatagggttttgccaaagggaaaaaacttccttaaaatttcgattttttttatgtttcccgcttaaaaaaaccctaattccgccatggaatctctgaggtcttaatcgtaagttcgtgattctttagttccttgatcttcttgggatttcatttttcgtttctctttagattactgcttcttcttttttttgttaggtttgttagagataacgagaaatg

SEQ ID NO: 12511 - DNA, 3000 bp, Unknown; identical to SEQ ID NO: 12506
  misc_feature (1)..( 3000): cDNA_ID_2709020_gDNA_ID_2214555_Annot_ID_134752 3000 nt of promoter + ATG

SEQ ID NO: 12512 - DNA, 3000 bp, Unknown; identical to SEQ ID NO: 12505
  misc_feature (1)..( 3000): cDNA_ID_2712215_gDNA_ID_2214555_Annot_ID_134754 3000 nt of promoter + ATG

SEQ ID NO: 12513 - DNA, 3000 bp, Unknown
  misc_feature (1)..( 3000): cDNA_ID_2712213_gDNA_ID_2214555_Annot_ID_134755 3000 nt of promoter + ATG
gagaagatttaatcgaaaattaattttgacgattcattattatttttggtagtactttgctttttaaaaaattgtaaaatcctcatcaaaaaaatttcagcaactgtgaatattttttaaaaggcataacaactttatttgttttacgtaacgaattccttggatttgcgtaaaacatgggcctcaaagcccaaatgacagctgtcaaggaacaaatcggtcgacaaaagtatggaccccacttttaatttacatccggacaaagactaaagagctgtctttatctcaatcgtttttcttgtttctttaagcccattaggtatagctacctcaatttatgggccatcaggtccaaagggcatttttcccaaaagattcctaatcgaattacgtcgatattgaataccttattgactttgagacaactccaccattgtgctagataaaataggcctttttaaaactttgaagataaaaaacggcccataaacgttgtgaaaaagcctctcgctgaaacagaaggtctctgtaagtgtctaatcgcgcgatgaacttgataacggcgatgaccggagctaaattgcggccatacaatgctacgatccacttgctgcactccactttgccctttcacggcgaaacaaccttctttccttaggaaacagcaacgtattacctctgatcgcttcacctttcgcggtggtggtggtggcgatgccgccgccgtcgtctcctcctccggcctccgtgatctcgttttcgtcgtaaaccctcaaggtgtgtttgcccttttactcactggatgaaaaaaaactgagattcgaaattcattggatttaaaaatgatgtttttaatatgagaatcaatctcgatgtggaattgaggtttagtattatcgtctcttgattcttttcaatgtcttttatatgagtctaggtgctaatggtagaacagctaaagaatggaagaagttgcttcctcaccttcgatctcgtcttggtaaagactgtaatgtgagtttttgattcacttgcctttttgtgcccctgtgttagtgatgccatctcctttcgctttcttcagttccttcaactgagtttacgtgtcttcttgtttgtttctccaggtaagtgaattattaacatcgggtccttctcatgccattgacattacaagagaggtaaggagtagtgaaagtaatatactactttgctgggtacagtattctctgtcttgtcgatttggttttatgatgatcctctgttgcttctaattatcctctcaggctataagggatggtgcagatgctgtcattgcggttggaggtgatggaacacttcatgaggtaggaattgccatttttggttgctagaactgcgctctggagattcttagctccactcattctgtcctttttttttttatctacaggttgttaatggtttcttttgggaggggaaacctgtcggttatctcagtggggaagctagtcgatcgactgcacttggtgtgagtagcttgagttgactttttgacttgtttttgtgtatatctcttgtggagttacaacatacaatcttagtccatcctttttattttgcagctgattcccttaggtactggctcagattttgctagaacatttggttggttagtttttgcaacttctgtttgttgtgtttttttgaaacttatgttgagccatatgttaagtgtatcctgcattctttaggaacaatgatccttgtgaagcagtggagcgcattgctagaggtatgtcactgaattcatttgaggagttaggacttagttactactgaactgtctatctatgtctcatatatcacataaccagcattttctcagggatgcgatcacggattgatgttggtgttatcgacaaggaaggaaaggatttgcattacttcatcaatgtagctgatgttcatttgtaagcatatcgtggaaattttcatctgtgattgatccctaatgatgcaaggttgtaaatctgtccttttgttgctcattacttgcaggagcgcaaaggcaggattttacgcttcaaaatacaagaaatttggaaacttgtgctacgtaattggtgccctacaagcgttcatgggccatcataaccaagatatgagaatcagagtaagcaaatttttttctgcgaaatcccttctgcaccgtagcaagtaacttaaaagcattctgttattttctcaggtcaatggaggcgaatgggaaatatatccccaggtcactgctctctgcgttggaaacgcaaaatactttggtggtggaatgaaaatcacacccaacgccatccctggaaatggaaatcttgaggtgcaactattcgttttcttcaatctcaaatcctatgttgggaatatggtagctcttgagtcttgacttcttccctgtaggttgtggttcttcaaaacttcaaatggtatgatttcgtacttaaacttcataagctgtacaacgggactcatctttcggttaacaatgtgacttcaagaaggtaatatttttctttggcttcttctcattttgtcctttaaacgaccttagcactagaaaagtcaccacctttatgctacctctcttgtagtgtacaaagcatcgaagttgaagagattacagacagtggaagtatctatgtgcagtcagatggagaacatcttggattcctacctagaaagtttcaggtgttacccggtgccatagacataatcagctgatcaaaaccgcagatttcttaggataaacttgtcaagtaaagtgtagaatacttcaactttatattcttcctgtaatatgattcattgtttagcgaatcagatttatgctcgtgttacttgtgtaactcgttactatcactatttattgtgtggtctctgttaaccacaaatagatactttaaaacattttaaagcaaaaagtcgcatctcctaaatcaatcaatcacacaaaattgaatcctaaaa

SEQ ID NO: 12514 - DNA, 3000 bp, Unknown; identical to SEQ ID NO: 12504
  misc_feature (1)..( 3000): cDNA_ID_1807856_gDNA_ID_2214555_Annot_ID_134756 3000 nt of promoter + ATG

SEQ ID NO: 12515 - DNA, 3000 bp, Unknown; identical to SEQ ID NO: 12503
  misc_feature (1)..( 3000): cDNA_ID_1807601_gDNA_ID_2214555_Annot_ID_134761 3000 nt of promoter + ATG

SEQ ID NO: 12516 - DNA, 3000 bp, Unknown; identical to SEQ ID NO: 12501
  misc_feature (1)..( 3000): cDNA_ID_2712188_gDNA_ID_2214555_Annot_ID_134766 3000 nt of promoter + ATG

SEQ ID NO: 12517 - DNA, 3000 bp, Unknown; identical to SEQ ID NO: 12499
  misc_feature (1)..( 3000): cDNA_ID_2712184_gDNA_ID_2214555_Annot_ID_134768 3000 nt of promoter + ATG

SEQ ID NO: 12518 - DNA, 3000 bp, Unknown
  misc_feature (1)..( 3000): cDNA_ID_1985415_gDNA_ID_2214555_Annot_ID_134769 3000 nt of promoter + ATG
gagcagatgggagatgttaaaaagcgtattgaggcgctagaagcttctactgatcagcacattgaagagaaggagattgttgttaatggagaactggtgatgaaccttcttttgaaattggatgctgtcgaggtaatgcatgaaagactaatttcattggttggccgagatagtttatctcagtatgtactgctgtgtaggatttttgctgacagtttcctatactgatgtttatcttccagggattgcatcctagtataagagagttcaggaaagctttggccacagagctctcaagcattcaagacaagcttgactccttgaaaaatagttgcgccagtgcagagaaagaggctgtaaaggaacaagtggaaattaaatctcagcctagtgactctccagtgaacttggagcactcccagctcacagaagagaacaaaatggtatctgacacgaatttagagaaggtacttcgtctgtctcccgaggaacatcctatgagcgtcttgaatagaacagatgaaaaacaggctgaatcggctgctgaaacagaagagggatatggattgtttgaaaccctggcaacggattctaagcaagctactgaaaatgcagcggctgcttcctcgacaacaattccagagaaaattggagaggttgagactgttgttccgggtaatccaccgtcagctgatggaaacggaatgacagtgaccaacgtagaggaaaacaaagccatggtggtggaaagtttggaggagccaataaacgaattgccgcaaatggtggaagagactgaaacaaactccatacgggacccggagaatgctagtgaagtctctgaagccgaaaccaactcatcagaaaatgaaaaccgaaaaggagaagatgatattgtattgcattcagaaaaaaatgtcgagctctcagagctacctgttggagtgattgacgaggaaacacagcctctttcgcaagatccatcgtcatcatatactcgtgaagggaatatgactgcaatggaccctaaaacagcgagccaggaggaaacagaagttgatcactcacccaacaactccaaaggcattggccaacagacttctgagccacaagatgaaaaagaacagtctccagagaccgaagtcattgtgaaagaacagcctctagagacagaagttattttgaacgaacaggctccggaaccggaaatcactgaacctgggatatcaaaagaaaccaaaaagctgatggaggagaaccagcgattcaaggaaacgatggagacgttggttaaggcaggcagagaacaactagaagtcatatcgaaattaaccagtcgggtcaaaagccttgagaagaaactgtcacataagaaaaagacacagatcagacgtcgtgcaagcaaaccaatgtccgtaagtccaaccgatgccgtattatgacccccataaacattgatatgtctcaattcctcatatattgtatccatctccatcctattgagtacagaaaagagaacgagaactcaaaaattgtcttaacgaaaatccaaatatttgcctctctgttttcttcgacgttcatggataacctccttaaacgacccattcgctctgacagattcgactaaattttgtgtcaaggcccaatatataactatataaggcccatacaatgatcaacccattagttatttcaaatgtttttattatttatttcaaatttttgctataggtgtaaatttcatgtattattactttaattacatttaaaatttgtatctttcaaatttgttatgggagaaagaaagagaatgattgtgtggtttgtgcggacatagtgatccttttcatgccataactcactcttcgttttcttctttctcatcgtcacgttaggttgtctctgagccgccaaatattcatctcttgtggtcccgttcacgtcccaacgccatttacactcatctccgtaacctctctcttatgtgctttctcattacaaacaactaaaattctcaaagattaacatgtgcaagagaaataacaagtaatgatatgatctcattctcacctaatctatggttgaaaaaaaggaaatggtgtcagtattagtcataataaagccttggagttgtagactatagcatgaaaggaccaggaatcttcaagcatggttattttctgatacgaatgatttatattttaatcgtttattaacacccatttaacctcataatgactctattagcctactctcaatccccaaatttactagcataattaactaattcaagggattatcttcacccacttgtgtgcatccatcaaaagttaatttcttatcttagaaatacatttcatctaaaccaaacaaatgatatacactctcatttctattcattagtgtcatttctacaattgtagcagtatgttaactactgtaactattgtgatccaaatatacagtaaaaggttgcacctctactgtaactattttaacaagttcgcaaaatgtacataggagaaataggttgatttccatggagaaaagaaaatagtaaaaggtgaaaaaggttcactcacacgcatcctctgtctctgagagatatatttccccttgcagtaaataaaaatctatggctttgttgggaagaagaaaaagtcagagtaaactcgtaatctttgtcgggagagagtaacaggcttttgatgttgtaacattatactactattgttttaaaaagcaaagaattgtagtagtaagaattacaatcatacttaacaacaaatcacgtttttcgggtttttgtataaataaatgataaagcaagatggacaaattttaaggataagccattaataagtgatctgtgaatttttaaggaaaagacgaaagaaacagagagagtcgagacacaactgtctccaagaagacaaccttccacagcttaagggaaacagaggtggaaacagaggtgaaaacagagcgagtaaagag

SEQ ID NO: 12519 - DNA, 3000 bp, Unknown
  misc_feature (1)..( 3000): cDNA_ID_2994378_gDNA_ID_2214555_Annot_ID_134770 3000 nt of promoter + ATG
tcgtgtagaaagtcgacgtttacgttcttctttgaaaccagagtgataattccggttcgagcaaataattaactcgtgtcttctcatgtatgttggattaattatttggttgtggttaatattaatgctcgttagtcgttaaaaaaactaaatattttaattgtcccagtgacagaaaccaatttcacatgaaaaaaggaaaaagctaattttgtcaacagttcacatatattgacattgaacacaactccggttcgacaaaaaaaaagaacacaactccggtcaactatttttggcagttgtaattaagaacaaaaagatgtaacttaaagaagagacaatttaaccgattagttcaaatctttggtcatcaaaaattccacaagttttaagaagactgattggtgattaataaacgttaaaaaaaaaaaaaaagccaagtcaaagatgtgtcggtaatagcgattgaccaaactctatctgttttagagcatcattaatggtagtttcttagcataattttaatatagtttttatgaatatttttataattgattttgaaaattctgaagttaaaaacttggttaagagattgaaatttaggcaatatgcaatggtggaatcttaacttggagttcttaaaaagaaaatttgaaaaaaaaaatagaaacattataattttaaaaaacttaatagttattacaactcataaaatttaaaacatacatgacataaaattttaaacaaatatgacaaacaattctatttaatacttaagttatctaaaaattaagattaattaaattaaaatattatatttaagacctaatttatctaagaattaacttaaaaaacattagatttggctcttatataagagctattcttaaccattaattgaattataacattaaatttaagatctactttatctaaaaactaacctaaaaaactatcaataatgatggtcttacgaatgcctagattctcttcaatatacaaaaagtacggtttagttattgtttggacatttgaaatctaactaattctctttttagtcttaatgcaatggaattgcaaatactccataaaccatagtgttgcaccctaaccgtatctctctctaaaagagaatctagtcaacaagattatgtttaatctctaattaatgacaataagatttactgccaaaataaataaataaataataataataagatttactgccatttattcttctatatttttcaattttttatttacacttgttccataatcgtcccaaggagtagactagggttgatgctctttcatctataaaacgacttaacacaacatgttctttcacatcatcatcataagcctcaacaatccatcaccatacatattagattctccctctttccatagtttatttttggttcgttttattgtaaaaagatatcaaactctttttgggggacattcgttcttcaagtgtaacagaaggagctcccttcctccaaaacgaagaggacaagatttgaggaactaaaatgcagaatctaagagttcatgtcttcctcatagagagtgcgcggtgttaaaagcttgaagaaagcacactttaaggggattgcacgacctcttagattctccctctttctctacatatcattctcttctcttcgtttggattgaagggagctccttttcttcttctcttaattagtctctgttcttcaaaacttggtttcgatctaacttgttttctttttctctagtgcattttttttttcaggttgtcatgtttatttgcaggtgtttgtggttgatgcttgcatggaagcaatattaatgttgtttatttacgagaagacgttcgtgtgccaatttgaaaatatgatattaatggaaatacagattaaaactgacaaatgtataaatatttcttgttccttgttttaattttaacattagtcgtgtgtttgtcgtaaatacgaaggggacatttcacctaaaaaaagaaaaaaatatattcatcaaaactggtcttggatacgtttttagttaaaacaagaacaataataaagttaggtttaacttcgatcagatcgaaacaagtacactataattgttttggtttgagaaaatataccatcgatggtttcaagaaataatagcagctgggttgcttgtagtcgatacgttaagtcgtatcatctcaaatgatccctagtagtacacaacatagtcaactggtttgtcatgtgttggcctacgaagaaatgtataccggccggatttcaatttataaattagtccttttttttttgtcaagttatcattgcatagccaagtttcactcggtcaaaatctaattaacaaagtctgtaaaacgttgaagtaattgtattttattaaaagaaaactccaaattagactttgattccaacgaatatttaacgacataaaaggcattgccgtttgttgaacgagttgtcttcttaccaaatttgacgctttccaactaaatacactcctaattttgcctattacctttttcctcctctaattaagtaaatgctaaatttcccccaaatactaaaaatcgaatccgataagtcaaaatcaaaatcgtacctacgcgatttatgcaaaataccggaaaaagaaccaaagtgcttattacaatcaaaagaccaaaccggttaaacaattagttaggctggcattaacgaacctctttgtctttaattagcctttatccgtcaccgccctgttaccataaccgttcaacgtcgacccgctctttgtttcagaaaaaaaaaacagagaaagacttttttagtgtttctttgtcattttcgttcctcaaaaaaaccttttcgaatttgacccttattgttatcctgattcttctgctcggttctcgccggagagaagacacggagaagagggttttcgaaaaggaggatgagaggttccaataacaccgatctatttgaccctaagacggag

SEQ ID NO: 12520 - DNA, 3000 bp, Unknown; identical to SEQ ID NO: 12496
  misc_feature (1)..( 3000): cDNA_ID_1807355_gDNA_ID_2214555_Annot_ID_134771 3000 nt of promoter + ATG

SEQ ID NO: 12521 - DNA, 3000 bp, Unknown; identical to SEQ ID NO: 12495
  misc_feature (1)..( 3000): cDNA_ID_1018052_gDNA_ID_2214555_Annot_ID_134772 3000 nt of promoter + ATG

SEQ ID NO: 12522 - DNA, 3000 bp, Unknown
  misc_feature (1)..( 3000): cDNA_ID_2994382_gDNA_ID_2214555_Annot_ID_134773 3000 nt of promoter + ATG
ggttattgtgtatatttttatggggatctaggtggattcattttctttggtaagttgttgtaaaagaatctggggtcataatatataccaagtctttcgaagcagtttcggaagataatcaattcaaataattaagagattcgtagcgggaaataaataaggaatactataatcaaaaattaatttatatagtatgtggcgtgcattaacatgcattaatctattaatagaaagaaacaaaagatatgaaacaaaagagaaattggacttatcttattagggccacatgaacaaccttgaagacaaagcgataacaaaagaaattgccacgatatgcgttggacgttgaggcatgagatttatttgttgtaacctaattattatttgctttttggttatactacgaggtatgagttggtgtaggtaggaaacgagatggtctttgtattatcgtctacatgtttttctctctgttttattattgcatttagttgaagggaataaacatcgtgaacaatttacttcacatttgaagcagttcatgcatcatataaataaacaagataaaaacagtgatcgactctcttctccgacatttgatctagacatccatttttatcctaatcgtttctgtatagcgagaattttgcagaaacctgcagtcgtacgatagataataccaaaaatagtacattctcaactagactgtacatctaaaatattatctatcatttttacaaatcacattgaatgacagatacagctatctctctgtagtgatacacatgaggaaaaacagattaactgatataatggaattttgttatttttggacttcttatcctaattctgaaaaacaagccatttttttcgaattccacatttccacttgacattttaccaatttaggcccccaaaaatggcacaccatttcgatatctatatttttgtttacgaaacatttcagcccatatactttacgggcccattagtgtctaaagattcatacgccacctgaacaatattttcccaccaccattacacaaacatgtcgaaaatattcttaacataaaaatcaccacattacattatgtttactgcccaaataataacccacataaaatattacacacaaaataatctatctcacacaaaataataataaaacaaacactcgctaaatatgcccccctcagtgaatttgatcaaataccccaaaaataaaattaataacatgtgtggagtataaaacacgaaaaaataaaattacaaaagaaagaagataacatatctacagtaaagttacaagtatacagatgttagatcatcgtgtttttccaaatcctcgaatccttccgtcttgttactgtatagttaccctgcaacgtaataattaataatctcatataaaagtttagaaattttggatgtaattaacatcaaaaaccaaaatcctaattactgataattttgtaccatttgagtgtattgagaatgcatttaggtgaatcagtatcaagcttgttcaagctaacgccaccgcatctcaaattaacggcgagcattccgatcttaataccgccgacacctaatccaactttagtcttggcaacaacgttaatgaccaaatctttgctctgaaatttcgcagcgagtctcttagccaatcctctctccacgagctgattcttcaccgtcgtctccactttcacgctcgtcgagtttttgggaccttgtcggaatccattcatcgtcgtctctcccatcccggtctcatcgtttcccgaaccaacgctcaaatcaacggcagtgtttccgtagtaaaaaacgagtttcgagttcggattcttcatctcaacgcgggcaacggcggtggcggagagagacgcgccgtcgggatcgtcggcgagtttgaagccgtcgagacggaaggaagcgaggctgaaagtgggaagcttaggatcgaaccagaggtagaaaacagctgttccgaccaagaggaggaagatgaagagaacaagagtaatgcagatgcaacagcaacagaaacgacaacagcttctacgttttttctttggtcggtaagaagtaggcatagggacggcttttctcataggttgttgttgaatgggaggtggaggaggaggaggagaggacatgtttggatctctgtaacctggtggcttttgaagaaccgggttcatctgataatctgccatcttttttctcttaattattcacctctctgacgatctcctgataaatcgtatcaaggaagatcaaaacgaaatcttcaaaatggagagagagatgctatgatgatgatgattgcaggcaaacttggtttctaagagattttgagtttttggaagagagagagagagaagagaatgtttttttgtgttgcgttgtctcttctctctcgttaatggaagaaggctgagacgtgaggaagggatttcgttttaggcccgagactcacgcgcgccgtttttgttgctgacgtgttccctcttttttctcttcttcctacattcattgaaatattcaaatttcagttattagattagtcgattaatttataactgataatcatattgagtttgatacatccaaagtggcatgggcctacagattagatgtttaggccaggtggactctgtttcgagcccattactgccacgtggctctattcggagttatttaccaatggtacgctcaccggtttaacgattcaccacttaaagccctcaaaatctcagagaacgctcgctgatcaaatccgtcgtccttcaaccgtcgcctcctccgtcatgacaattgagtgcgttaatcccgaaggtcttcgattcaaccaagtatgtgcacatatctcttcctccgtttggtcatgtacttgtttccgattaatgtattatcttttgttctttctattgaattgatttcgtatctgtttgcaagatgaaaagctcctctcatcaaaccctagaaacgaggatg

SEQ ID NO: 12523 - DNA, 3000 bp, Unknown
  misc_feature (1)..( 3000): cDNA_ID_2712266_gDNA_ID_2214556_Annot_ID_134781 3000 nt of promoter + ATG
atacatatacacgtcctttatgtacgtgtgtatgcatgatcacatcattacttcattagtatggcttctcgttcacataattcccacgaggatcatagttgcaactgattatggttccaccattgttacacctcactttggcacatccgagtctcactgactttctccaaacaacttgagtgtagtgaccacaaactccattgcacgtgttcgcagcgtagttgtagttagccttctcgctaacccacatgttcacggcggagacgccagacaagtcaccgctaccccaggctaagttttccccgtaaggcccaccagagtgtatgagtctgcagttgcctcttagttgttctgcgtagctccgagcataggctgcaaccctctcgtcccactgcatgggacctacgcctaccgctcctcgtgcctggttgtgaacccttagataatcttgtgggctatcttgagctttcgagggaagaacaagagcacctacaagagctacaaagacgattaaaaatcgagaatagccagtaaaattcatttttctaagttgataatggttattgttgtgttatgattttggggttcgtaaacatcgcttatatagagatttgaaaactatttttttctttttttttttgttaactatagatctcacgtttttgtaaatacatggtccatgtgtgagtattttagtaatattcattgcaattgtccaaatgaatagaagttgttttcgtaactatttttttgtcaatcttgtccttacacacatttttcctaatattgtttcgtatcggtagctttgccattgttgatatatttttttagtatatatgtaagtataccctaaatgaagtttattaagaaacattgtatatagttgtttcatgtcattcagttgttttgtgttttttttttcttcatgattctaatttaagtcttctatttcaaatttgaatttcatatattacttcattcaaaatgttttgaagatatcttcctgtaaataatacagaaaaatcgtatcggacagtttggcaattaagattatatttacagtcagaaaaaataaaagtttatatctacagtcaattttcaaataaaagaaaaaaagtcaagaattatttgtttcttagtgtttcatgcatatgagtatctctatcactcttgcctatggctgaaaagtcctgaagaatatatgccgccacatctatgacgtaagtaaaatagtgacgtagagaaacagtcaatagatcacccattgagatttatccaaaaagaaaaaaaaaaaaaaaaaaaaaaaaaaagatcaccgattgacattgtatacactttgttttttttttccaaacactaatacgcagtttaaattgaaaaactctaggtgaccgatctacttttgtgttcttctatcttcagtatacctaattttgtaccgccttcgtatatcatttaccaattttgactactgatatgcactggctttaaaattttccaatcctgatatgaatctgtgattctaagcaataacatatactccctccgaatcagaaaaattgattttttaaagtttttttgtattaaaaagattgagtttatgtatatttttatcaatcaatattaaaaggttatgaatttcaagaatcaattaattgagaattttaaaatttgatgaattactattggttaatagttacgagaaatagtttagcatgaataaatagtaatttataactaagcattattatttttttaatcggtataaacattctataaaatcaaacttttttatatggagggagaatcattttataagttaaaacaagcttgtgctaacttataaaatgacaccataggatattattacgtaataatatcctatgatatcctattcaatattatatgttattaaaatataaagtaatttaagtagaataacatgttacattaggtaaacaacgtttcaatattttcaaaaaaaaactgttatcagtccaaaaattaacaaaatagtttaaatttaaactctaagttccgatcataaaccttaaactctcaaaactagaaaagactattgtacttttcttttgcaactaacaattacattttttttttgtcatcacactatagaaaagcttttaaaaagatagttgtctcctttcgaaaaaacacgaaaccaatgtaaattagaagatagttcgcatattgatttggaaaagtcagtcctaagattgatgaagcaaattagagtgagtgtttcatgaagcaaagtcagtttttggaagcttttctttggattgaataaatccccacgcgatgatatgttatctctctgcatgaaagtaatgaataaaccttttcaacaatctattaacaatgcaaagacttctaagcaagaaaagtcgtataagttttttctttttggtaaaatttagtttaaaatcgtgtccgttgtttatttgccagatggcattttctattagatttaaaatatgtcagcaatctatttaactttaatgcgaacggataaaatgagattttagcggttaacttgatcaaaatctaataaaaagttacaaactaaaatgaatgataaatgaaggttacatgcatggagaaattttttactttgtaaatgacttgctgcctaataaaaattagttatttttaatatttaaaagaaaacataatatgtaagttaataagtatgaattgtaaggaagcaaacattcttacgttttgaaaaaagaaaacaaaaagattcctacgtaagtatgtattctctttgcttctccacaaagatattctttgtataggacacaatttactttaaacacacaatacaatatgtatatatactaatcaatgatcgttatatatattctttgtataggacacaatttactttaaacacttttcatgcaatacaatatgtatatatactaatcaatgatcgttatatatgtccatcgtactcaacctcaaacatcttaaata

SEQ ID NO: 12524 - DNA, 3000 bp, Unknown
  misc_feature (1)..( 3000): cDNA_ID_2712250_gDNA_ID_2214556_Annot_ID_134786 3000 nt of promoter + ATG
aattagtatgaaatgagagagacctttgctacttctccagcatgtaaatctgctaactgagcctgaagagacagcttgtaaacatttgcttcggaacatttttaaaatcaaaatccttttattttaaaagcttcaaagaaactgactttcacacggtaagcttctgcaagctcctcttgaagattgtgtttctcccttgtgcaagcagccaacttcagttttaagctctctatttcctgctccaagctagctgtcctaatagtattacccaatatcatttaatataattgttagcaacaaggctcttattttacacatctatgaggtaaaataagttatgaagtatctttcattggctaaataacgaacttaagtcaaaccataagatacctctggaaatgcatccgagcagccacaccaagaatgctaggtccaccttgttgcatgcacaactgttcaatatctttctgtagttcattacgctctggtgataaaaaataaaaaaaaatactatgttcatactcaacatacatcaggtaatcaacctgcagatataacatggagtctcaacaaccttgatacataatatcttcaaacaagcataacgcacacagtagcaaaagacatatgatataagtacataacccaaaagagaatgagaacaacttctacaagtgatgtcttcaaatgtttcttaactcatccccatttgctaaagataactcatttctaagattataagaagaagaaataactaaaaggaatcatcttttgcatctgagaaggcagggaaatgggaaaagctaagtggtcatgagaataagaaatagctatcgtatgaaatagattggactagatgacaaactaatggagcagaatacacttcaagaaggcttcagagaagcaaatgtaagactttagaaacccatttctataagcttataaacatgtccagggtctaaataactaccacatagagacttgtagagaaaacgtaccatgttcaagttgtttgatccgagcctttagattctcattttcatctaaattaagatccataatttgatctgcagaagatcaaatcaacactatgaaaaagtaaacaacttgcttggaaatttacagactttttgagcagattttggtgcttagaagacataaaaacaaatccttagcaaaaacccagaactcatctcaaatcaacaaagaattcagatgagaccctgaaattagtttacagatcaaagcgaagtcttaaaattcaacattccaagggcaattccaaaccctaatcgagaagattgaaattgagaaaaagaaattaaaaaaaaaggatcagagagaaagtgtttgtacctttttgttcttcttcgttttgaccaaaaatgactcctttcgtcagattattatgttcgttgggatattcctcgtaattttttcaaaaccgaatttctccttaaccgaggatcaatccggtttagtaagtgttttctatcttattctttttcctaccttatctattaaaaaaagtgagatttatacacaaaacttttgattagactatttattacgtaacctataattagttctatgttaaccattatgtcattttcagttaattccctaattttttaaaaaaaaaattgtacaaaaaaattcagtgtagctatagacttatgcaaatttcttattcaagtgacagagctttgtggatttgtttggatttcttttcttatttaagagagattttgcattaataatctgatattttggttgtaaacgattgtcaaatatgtatttgttttgactaactctaatcttaggaagatatatagaagaatagttctctatctagtaatgacgttaaaatcaaacgatcatatattaatgttagaataagattaaagaaaaaaaatgttagaatatgattaagaaataagaacttaatataaaagcttgagattagaacttttgagataagcttgtgtatgataaggatttaagagaccggtgaaaggtgttagtgttttggcaattggttctatctttgcttcggttttgtcattggcaaatattgtcggactacggaccagtcagtgagtctgtaaccgtaagagtttaaaaaggctaagagaggggcaatcatgaacgtgatcaaaatatggtaccatttgagctgatggaagatgtgtggaatgataatgattgttaaaatgacttttaaacgattaaatcttacaaattcgaaatgtttctctaagcttttcatacaactcataaaatgttaagtttacatttaacaaaaaaaatattatgtttacttagaccaatacttttttgcaacccttaaataatgagaatactataataaaacctaaaatcaaagcataaaccataaactcttaaccttaaaccttaaacccttctcttgaattctttcgcgaagagaaaactctaaatcttgttattatattttgtttgtcgattaacatctgatttctttagattttgttttatgttttagccttttaggggggtgtattgaattaagaattttagaagattttggtttttatttgaaatctcttgatttcaaaatatttttccaaataatctgttattgaacatggaatttacctaaaataagtcaaaatcatttacaacttgttgtcatttataaaagtcatacattacagaaacaagaaattgaaaaatctgtcacgatctcaaaataaattatataaagataagataataaaccgatttctgttatattaacgttagtcttgtcattattacaacaatcctataaggatatatgcgttatagccttactataaaagatttaccttcaaaactattgaaacacagaatcaaaacatttagatatataagtctcattcctcttcttcaccttgtctctaagagacaagccttgtttctttcatctcatccatcaccaacaccaaacacaacctctaagacaaagtgaagaagatg

SEQ ID NO: 12525 - DNA, 3000 bp, Unknown; identical to SEQ ID NO: 12523
  misc_feature (1)..( 3000): cDNA_ID_2712266_gDNA_ID_2214556_Annot_ID_185731 3000 nt of promoter + ATG

SEQ ID NO: 12526 - DNA, 3000 bp, Unknown
  misc_feature (1)..( 3000): cDNA_ID_3025540_gDNA_ID_2214556_Annot_ID_185727 3000 nt of promoter + ATG
cgcaaactccgttgcacgtgtttgtatcgtagttgtagttagccttctcgttaacccacaagttcacggcagcaacaccagacaagtcaccgccactctttgccaagttctccccgtaaggcccacgggaatgtacgagtctgcagtctccttttagttggtttgcgtagttccgagcgtaggctgcaagtccttcgtcccactgcatggggcctacgcctatctgcgatcgtgcctggttgtgagcatttacatagtcttgctggctgtcttgagccttcaagggaacaacaagagcacccacaagtgctgccaagattattagaattcgagagtagcttgtgactttcatttttcttagttgaaataatggctatttccaagctttgtttgtgttatgattttggggtttgtaaacattgtttatatagagatttgaaaactatctttcgttttgtttgccataataaataaacaaagtcttgctgaacatttaaacctcttttatgggtttaatctttcacctttggataggagataggagataaaataaacccaacatttaatacggtagctagtcgggaaccccctaacccataggtctaaatttcttctcacatcttcatatgaaaacaatttttaaaaagaaacataagaaagtaccaaaaatatataacagcctaaacaaaataacaaacaaatttaaaccaagattatcgaaatttttggttcaattcggcaagggatatctaactacaaccaaaccaaatttttataattttgaatttagttaagcgaagattttgttcagtctaactctggatacccttctttcaaattgaataactgaagttcataaattttgtgaacatgacttataagccccaatgcctaaccataattatctcttcaatcttgtaaatagtctgaactaaaattgccaaaatatttattacaacctaaattttagatatgggcatatatcgtattataaagtgattatctatgtggtgttggagattaatattataatgaaaacagttaaaacaaatcataagcaccctaaaaattcttacttgtggtttttatctctgatttaacaaaatcgatcatatcttcaacattctttaatgttgtagtttattttttgttttcctgcaaaagtaagaatttttcaaatctattaaaaaataaaattttcaaaatgctatttttacgaaaatctgacgaatttgccatttttaacatttaaaaatatatgtatttatgattttattttggaaaaatacgtacttatatcaaatactaaactctaaaaacaaatgaaagagaataaactcaaacataatgagtaaaatgtacgttaaattacatttttatattatgaaaaaaggcaaaatcaaactatttaaaagaagaaaaaatccacaaatgtcaataaaaaaaatggcgaatccataattaattcgatttttaaagcatttttgagaaaagtggaagcttattttctttattcattttccagtctccattgtattacaaaactttttgcctcactgctaaaatatgaattaatattgtccgtggacatatttaataccccattagaaaatcaaataattatgagaaaagatacatgcaattatttaaaagaaaatatttacaagtgaaatgttatgaaaatagtgtttcatgcatgtatttctttcctacggtcttgcttatgtttgtaacatggagccatgagggaataaaacaagaagtctttctttatgatttataaaaaaaaaggaaggaaaaaataaggaaaaaagatagtcagctacaccaagtatgacgaaatacatgatcacacataccaagtttaaaaatgtacaactaattacacaaattagatgtattgtatgcccacatataccaactatatgacgacatgtggtcaacatcacgaaatccggtgttgaccatcgttgatcggcattgaccacatgtcgtgatgttgatgttgaccacatatcgtcatatagttgatatatgtgggtatgcaataaatttagttcgtgtagttggttgtacatttctaaacttagcatgtgtgacccatgtattcccttctacttggtgtagctgagtattttttttccaaaaaataaagcataatccatgagggaataaaacaaagccatcttcacttgttaaataagtcattgatacaataattccacggtaatagttacttgcttcttgcaggggatggaataatcaaagctgcttcttgaatgaggtttgttaagttaggcaaatatgacatatcattttgaaagaaaacacaaattgaatggtggctaagctaatagataagaagtctaatagctttttattcatactggatgctgtcaatttgtcattattaaactattttcatataatttatacgtaattaaataaatgtaaaacaataaaatacgttaggtcgggtgagttaaatatatgtacatgcagcgtgagttaattaagaatatatatatgtaaatcagatatttaggtgtgataaatcatgcaaaacgaatattcctattttaaccctattgttcaggatacttgtaggggactgaaaaaagatttgggaaatatggatattgcgcatttaatgcggcgacaaaaacctgccaaaaaatcccgccggcgtaagttacagaaaaagaatcgtaatgatgagccatgatattatttgggttgcgtgtttggctatttgttactccactatcattgttgcttcaacaacaaaagtagaaacacatgacggaaaagaacctacatttactattgcgaagataacaaaatcaaagtaattagagactcagataagcagttaattctcgagttactttgttcaacttcgatagagggtaataaatagtccaccctgccttagggtttgtaacttctgtcatacttgtctgctaacgttgcggttatggttgattatcgacaagcacc

SEQ ID NO: 12527 - DNA, 3000 bp, Unknown
  misc_feature (1)..( 3000): cDNA_ID_2712246_gDNA_ID_2214556_Annot_ID_134787 3000 nt of promoter + ATG
tattttcttgctaataccttcaataccaagtgagacgattccaagaacgatagagttaagcatcaatcccaacgcaccaacgtgaatcccttggttgtatagtttcttcattttgtcatctccttttgagtctccaccgtacacttcacgacccatccaatcggtatcgtataaaagaaaagggaaccatgcgatccagttcaaggccgtgacgattaatagcatccacattggacgtttcatcaccttgaaagctccaaagatctcaccaaagaacggagttttctcgttgtccgagtctgctttaggcgaccattgcttgtcttccacgtaccaaagagctatgattgtgacgactaggaggagagtgatggaaaggaagaaacaactcttgagatttgcgcaatatatgtcacatgctttagtcattgtgaaagggaagatcttgtagaggttagtgtatgatcctgccgcgtatcccaaaacgttcccaacagccatgaagaaagagaaaaacgcgtttgctgttcgcgttttcttagcgtctccagcggctaaatcaccgaggaaagcgcgacaaggtccttggagagtgttgttagccacgtcaaggatccagaaaccgagagcgaagataacaacggctcgcatcttgacaggtttgtcgattttgtctcccatgctgtggccaaaatcagctgcgtatccgattagtacaacagcaacagctacaagcaaggcgcctgtggcgatgaaaggacgacgacgtccgaatcttgacgtgcatcggtcgctgaagtaaccgacggatggctggacaagaagaccagagacaggaccacatagccatatgaaagatgaccatttgtgtgggactccaagaagctgcacgtatggagttagcagagacagctgaagagcccaaccgaactgaataccggcggcaatagaagccactgatatcatctttctcagcggagatggtccatcaagatccgccaacgacgaggaagactgtctatctacagctaccacatcgttttttgcttggaggtcactcatcttcttcactttgtcttagaggttgtgtttggtgttggtgatggatgagatgaaagaaacaaggcttgtctcttagagacaaggtgaagaagaggaatgagacttatatatctaaatgttttgattctgtgtttcaatagttttgaaggtaaatcttttatagtaaggctataacgcatatatccttataggattgttgtaataatgacaagactaacgttaatataacagaaatcggtttattatcttatctttatataatttattttgagatcgtgacagatttttcaatttcttgtttctgtaatgtatgacttttataaatgacaacaagttgtaaatgattttgacttattttaggtaaattccatgttcaataacagattatttggaaaaatattttgaaatcaagagatttcaaataaaaaccaaaatcttctaaaattcttaattcaatacacccccctaaaaggctaaaacataaaacaaaatctaaagaaatcagatgttaatcgacaaacaaaatataataacaagatttagagttttctcttcgcgaaagaattcaagagaagggtttaaggtttaaggttaagagtttatggtttatgctttgattttaggttttattatagtattctcattatttaagggttgcaaaaaagtattggtctaagtaaacataatattttttttgttaaatgtaaacttaacattttatgagttgtatgaaaagcttagagaaacatttcgaatttgtaagatttaatcgtttaaaagtcattttaacaatcattatcattccacacatcttccatcagctcaaatggtaccatattttgatcacgttcatgattgcccctctcttagcctttttaaactcttacggttacagactcactgactggtccgtagtccgacaatatttgccaatgacaaaaccgaagcaaagatagaaccaattgccaaaacactaacacctttcaccggtctcttaaatccttatcatacacaagcttatctcaaaagttctaatctcaagcttttatattaagttcttatttcttaatcatattctaacattttttttctttaatcttattctaacattaatatatgatcgtttgattttaacgtcattactagatagagaactattcttctatatatcttcctaagattagagttagtcaaaacaaatacatatttgacaatcgtttacaaccaaaatatcagattattaatgcaaaatctctcttaaataagaaaagaaatccaaacaaatccacaaagctctgtcacttgaataagaaatttgcataagtctatagctacactgaatttttttgtacaattttttttttaaaaaattagggaattaactgaaaatgacataatggttaacatagaactaattataggttacgtaataaatagtctaatcaaaagttttgtgtataaatctcactttttttaatagataaggtaggaaaaagaataagatagaaaacacttactaaaccggattgatcctcggttaaggagaaattcggttttgaaaaaattacgaggaatatcccaacgaacataataatctgacgaaaggagtcatttttggtcaaaacgaagaagaacaaaaaggtacaaacactttctctctgatcctttttttttaatttctttttctcaatttcaatcttctcgattagggtttggaattgcccttggaatgttgaattttaagacttcgctttgatctgtaaactaatttcagggtctcatctgaattctttgttgatttgagatgagttctgggtttttgctaaggatttgtttttatgtcttctaagcaccaaaatctgctcaaaaagtctgtaaatttccaagcaagttgtttactttttcatagtgttgatttgatcttctgcagatcaaatt

SEQ ID NO: 12528 - DNA, 3000 bp, Unknown
  misc_feature (1)..( 3000): cDNA_ID_2712293_gDNA_ID_2214557_Annot_ID_134792 3000 nt of promoter + ATG
ctgattggtctgagacattgaaatccttctctctttctcgtggagaaagcgatgcgttcgagtcactatcatcgtttctgatggaatctgtctctatccgtacctctcctgcctccatatcatttcctttctctctctctttcattagaggttcctgattattgctacctaaatcaacaagaaaaatcactaagaattatagaaagcctaatcatgatcctgattaggtcactaacaaaactgtaaaatgtcataccttgtagtggcctaggcctaccatcaactacatttctccacaaagacgtaaatttagaatcattttgagattctgatggaaaagctctgtgatggaagctctcatggcggcaaaagaagatatctttagggttagtctcagcaaactcttgttgaaaactatctcctgttaggtttggtttctcttccaacggatcgtaaggaaggtcaaatgggtttcttcttggtaataaaacggaaggtgcagagcctggcatgacaagtccatcgatttcgtagtttcctttatcgaaaccataaaagtttcgaccaatacaaatccgaggaacttccatatcatccatcaagcttccttcagctgcaagtaagaaaaatctccttgaccttcttctagaaatcaaattctctaacctcttgtttcgttcgatctcagatgtcccaagatccatcaaattcttctgatcatcctctgtccacgccactacaaccttgcttacatcttcacgcctttcttcttcttccttttctccttccgatgatgatgatgatgaacattcaacttcactttcatcatcaccatcaacacttattagcctctctaattcaacaagatctctgtgattgtcaagaacagagtcaaatacgttttcttctgcaacaagcaacgtcctttctctcttgaatttctccatatctggtgtaatcgtctccggtaatacttctccatagagagtagtcagaataaccttacctctctcatcctcactagcttgagacgaatcccaatctttcccaacctcttcaactttccttcttgcatttcgtctaacactttgttgatgctttaacttagccttctctgttcttccctcttgagaaatcgtagataacccacgatcctttctcttgtcttcatcacaaatcttcgaactcagatcatgattccgtatataaaacgaagcaaaagctatcaaaggagaagaacagagcaaaaaatagaaaacccaaggaagaaaagtgtacaagatgatcaaaaacgtagaaacaccagaaacaattgggtatctcttcacgtatctgaaaattgttttcgttgagaatctaagaattttccaaacgataaagcaaacatctttagcatcaaattttcccattttcttctccttctagtgaatcaaacaaacctgaaacataaaaatcattataagacctaaaacacacacgaaatgatcaaaggtattgaaggaaaacttcaaaattgatgaagaagagaggtcaagcttacctttgaaatgattaccagtcaaaatagttttggaggggttttaattgcagatttagaaaaaaatttctctgttttcttaaaaacatgatgtcggtgtggtagagaggggatggttttatgtacggatcggatcgtgcggggaagacaaaatagaaaaacaacgagggagttagttgcttacatgttgtttttcaaagatattattttcttcttattacatacacttttgaatttgttgatcgtgttacttacataaaattgcaggttaggtccctttgttttcgcagtttttgcaattatttctcatatttcttaatattgggcttttcacatgtaataagcccaacgataagaccatgacaatttctatacgaaacatgatataaattctttggatatacattatgaatttacgatatacaattagtttgtttaaatatcaaaatataaatgcgtcaatggttgttgttacttgtgagattatctttctatttaagaagaataattctcttcgtagataaatttttaaaataattttccgagttttctaatgtttctagatatgatttgatttgaacaattaattcgtggttctttgaatgaatatatcgactgtatttgatttcagttaaactgataataattgtcatttacgtctcaaaagaattgaaatatcatgtctctcaagatatggacttacatattgttatgcattatttatcaaaatatgtggacaaaacataatatcaatgtcgctttcagaataattgaacaacagatattgagaaatcaatttttatggttatatcaattgtcattgccaacatctattacatagtaacagtccaatttacattacaatggtaattcaatgaaggtaatttactttttattggtttactcgtgaaacgacgttctcctcctcacgtaccttatcttaatatcctgatcaacggacaccaattttcgacaaaatatctgagaaagaggacacgtcagcaagcctttcgctttaggctgcattgggccgtgacaatattcagacgattcaggaggttcgttccttttttaaaggaccctaatcactctgagtaccactgactcactcagtgtgcgcgattcatttcaaaaacgagccagcctcttcttccttcgtctactagatcagatccaaagcttcctcttccaggttcgaatccttgatttctccatgaatgtgcatggtagtccaacaattgtcgatgtttttgatagagagttttgtagattttctccggcgaaattccgatttgttcttcaatattatgtgcatgaaactttttttttaagattgtgcgtttagatgcaatattcgactctttgttgttctcatgctcgtcgatttcgatgtgtttctgttaatccattgatcgtatcggaaactgtgattgattgattcatattttcgtttgtctccagct

SEQ ID NO: 12529 - DNA, 3000 bp, Unknown; identical to SEQ ID NO: 12528
  misc_feature (1)..( 3000): cDNA_ID_2712293_gDNA_ID_2214557_Annot_ID_185752 3000 nt of promoter + ATG

SEQ ID NO: 12530 - DNA, 3000 bp, Unknown
  misc_feature (1)..( 3000): cDNA_ID_2709073_gDNA_ID_2214557_Annot_ID_185758 3000 nt of promoter + ATG
tttcctatggtcaaacaagttttaagtttaaagttcgtatttgtcctccaggtgtagcaaatgcaatagaccttgcagatcgtttccttccaaaattgaagtctcttaattgtaagaatttctccatcactgtgtggtgccatttgaacactcttctttcttcaccatatgtacctaagctttgatgaagattaaaagttgagtatacttctgtaacttatacttccatccaatgcaggcaaacctttggttgtcactttccgtgcctattctaaagatcagatccttaggattctgcaggagaggcttgtggtaagtcttaaaagatgcctttaatgagagaggaatggctgattaatggtattcaaggaattatgaagaaaaaatgcatagtagattaacatgtcaataacaatttttgacccatttaaggaccttgaaactatatgatgatatatctaatctaaacttatggtacttctatgttgatcttaaattattattttcactatttgtaacaggcacttccatttgttgcatttcagtccaatgccttggaaatatgtgcaagagtaagaaaatatatgtcatttttttatttctctcaaccttgttttcattttgatattctttaattgatattcataatgtttgcattgttccagaaagtatcagctgcatcaggagacatgagaaaggctctatgtgtctgcaggtgaaatctcttacgaatttcgtttcctttgagtttgttcttgtattgcatatgatgaatgagatagaaatgggctttatactgtaaattcactcttaaaatcattacattaaagatgacaatctcagttaactcacattttttttcaatttccaggagcgctctagaaatcttagaaatagaagttagaggatcaatagatcaagaaccaaaaggtccagttccagagtgtcaagtggttagtattttactctctactttactcagttcacttactgacgatgcaaatatccatagaaaccgttgtcttatcccataattgtttttatcgaatctataggtcaagatggatcatatgatagctgcattgtccaagacgtttaaatctccaatagttgacaccatccagtctctacctcaacaccaacaagtaagttacacatcaaaacacacacacttattgatatctggttcttctcgtttttaactattaagtaactgttaggatatgcttacaacatgatcttacctagaattagcaaaatcgtagtattaagagaacaaacttgaagtcacaaagaaactaaagacccgtgttggttctctgacttagtggctaataagacctactctgaaagtatgtaatggactgaaataacatgcttctattgaaaacttgcagatcatagtctgttctgctgcaaaggcttttcgagggagcaaaaaggatagaaccattgcagaggtaaatcttcattgaatgagcaatacacaaacacaactcatgaatttatagacattgtacataatattcatctctgtcttcacactttgatgcagttaaataagctatacttggaaatctgtaaatcttcgatgataactccagctggaattactgagttcagtaatatgtgtacagtgctaaatgatcaggtacttatctaatcctataagattaactctcatgtttgtgtatggtttatgcattatataatagacatttgattgaaatgtcattgttttgtttggcacaggggattctaaaacttagtcttgctcgagacgataaactaaagagagtgagccttagagtagatgaagcagacatcacatttgctcttaaggtatatacattacactctttgtttattattccgaaaatgcagtttcttaagttaacaccttctcttttcattgcaccacaggagattcgattcttccgcaactgtcttctatgatgaagttactgagttatagtcttatagatgggttggttccttcattctttacagaatacaaagagttatatatatataaaaaaatcagtacacataaattgtttattctgtcatgtaaatgcaggaacataaacaaaatataatctttattagtttttactggttagcgcaaaagctgaactcatattatgtaattcttctctttttgtactattagtcatgctctcaatgaaattaatgccatcaagtgattgtccttgactccttgattcctgagtgttcgtctgatgcattgtggctattaattccgttcaaaatcttggaggtctcagctttagtctaaggcattttacagccactatgcgccgtggttcacaaaagccctcatatactgaagactcttttccatttgccatattcttattcattataatataaacaatctattaatctttttaccaactttgtcatgaacgaattcaccccaacggaaagttagaagtgtttaaaacatctccaaggtgctctggtgcaccattggttaaaataacatgtgcatcaagtatattacaactttttgttgatttgctatgattgaaaatgtttttcttcgtattttttaattttaaaatctctatgaaattattaaaatatccatgaaattattaaaatctatagcttaaatttcaaaatcatggattaaatattttaaattattgattgaatagcacataatttcaacttggaaattgaaaattaccaaaaattctgattaaattttaaaattaacacagatcatgaatccagcaaacccctaaggaataaatgttggttataaaactatgcttgactgttttttggcaataaaatccagatatgctttcgtttgcggtcccattcggtccgatcgccggtccggtttagaaaacattgctttatgggctttgtatttgtagtactgtagtgtatatattcttctcccagtccacacttaaaaaggtttaaactggtatcgaaagacttaaaatcaacgagctcacgggg

SEQ ID NO: 12531 - DNA, 3000 bp, Unknown
  misc_feature (1)..( 3000): cDNA_ID_3025559_gDNA_ID_2214557_Annot_ID_185756 3000 nt of promoter + ATG
gatcatatcgtcatttgtttcattgcccagctccatcatatcaatcttcataaaccaaacccccttactccttagtatatatcacatgatttattctatcattttctctttgtttttattaaccctccatacatttttggacatttagcgtttggttttatgatttgtcttaatactagtcttccttgtcgctgcccattagcaattagttccatcacttgcataatctataactaactttttcaccttttagaattgtacatttcccaaacgaacaaatcaaataatccacatgatcttatctcttgctaaattcaagtattcatattacatattttatatttacttaaattgacgggccatgccgaggatacgagaattttttaatagaactaagcggatctcacacccttagcctaccgtccgactatggtccacaccaacattgataataatgcatttagaaaatggtatggaaaaatatttctatgaactctccaataatatttaatcttttgttcgaaagcattttattatttagaatatttttaaagaaaagaagccaattatcagggatttattcatccaaataatatagttatggagagctaaggtaaatagagttacagaacaaggatttataagatataaattacaccttaagttggtcgagattacaatatgttatgtctattcaagaataattacaactgctctcagtacttattttctttctcatatacatctaccattcttcttctggtgatataatgattaacgttgaattcagttgctatttcatgtctatttcgattaagcttagtttctatgagggactggttataatcagtatatgttcctctagaactttctttcaaaacacatttcacatcctatattcataaaactcgtaacgagacgagctaattcgttttaaatccatgtgtaccctaaagtttttaattacgaaatattctcgatggtccaaatatagacgataataaaaaggaaaaaaaaaactgaaattaggacaaggtcagattccaccgtacgttttgtaaaatggaattgaataaactaagggaataaataaatatcaatgaaaggtgagaagagtccaatattgttgaaagaacaataaatatcaaccgttaagaaggacataagccgaataccaacgagagccgtcaattcttcaccttcttctaacgtcaatgtctcaacgacgtcaaattacggcaagttggtgcatacctttctctccttctccaccgtcggtttttttaccccctccatttggcacgtttcaacaagatataaccaccctataaacaaaacaagatataaaccacttgtgttattcttcttaactttcgatttttcggttaggtttggttacagttttttcggctgatttttcccgaactagaacttataagctcgtccattatggtctacattgtttaactcacgtttatacatatttatcaaattgagaccgaaattgtaaattggttcattttttgttgttgtaaatttcaattgcagttaatttggttttctttgttttgtttcagtttagttcggttttggtgttttgaattgtgtgttggttatgaaattattaaatacgttttgatatttgttcaatttaaaatataagttgttaaatggggcagctccaaatcttacgaaactagatatatatctcaaaaatacatgcatgcgataatttacgaagtcgtagttatttgttacaatcatcattgcacatgcacagaaaaaggtatcttataaattactcaaatcaagtaaaaaatagtaggatccactatatagtcaccccaactatataaccatatagagaaacagtgtaatcaaaatctccctagaacggagattattttctatcactactttggtaaaactaaaacataattttctataagcaattatttccttcattgcatcattacaaaacttgatctcacatttcatgaacgatttacgatttttcgaatccgtcgattttggatcagacgtatttacgttttctatacaaacaaaatttaaaagaaaaagatgtaaaaattttgataccaaagagggcaaaatgaacatagacgcaaatcgcaacacttaccacacatcaaagttaacgccagattacatggacactacgggacccactcttttagcataccttcttgcaaaactgttactattttcacactcctaattaaaccattttaaaataaattattatcttacagcaagtaaaatatctacatggcttttccaagaccgttgattggtttaaattttaaattggcaaaatacagtacgcaatacactagtactagttgtcagaaaatgacaaaagaaaacccaatagtctgggagacacttggtctatcttaaaccgtcagatgtaaaaataataaatcctaatgacatctccggttaatcatgtgagtcggttcttgtcaccggcttacttgtttgtcagattctttacgtcgctgtataaccggctttaacccggtcatatatttaatttaattaatttcgatattttcgatcataaactcgtgcgcaacaaacccttccttgacatctgtatataaaagctcatctcctcactctctctctctccgcgttctactaaaataaaagtgaagcgccttcctcaggattttcccgagtgagtttcgctttcctccgagaaaatttcagacttaaattttccggtgagtttttcttcctctctttacctattttttttcttactaattcgttgaacccatcgattctcgtgacattacctttccactatccgatttgccatcttcaatgattcaatctcaagataattagtggattcaatttctcttatgatttacaggaatctaataaggagaagccattgttgaagaaactagtctctctgtttcgaatcttcaaattcagattcaatatctatcaggaaaatttcgcatg

SEQ ID NO: 12532 - DNA, 3000 bp, Unknown
  misc_feature (1)..( 3000): cDNA_ID_1808235_gDNA_ID_2214557_Annot_ID_134794 3000 nt of promoter + ATG
cttatagtacattttggatgaaagttttaggtttatagaattctacttatgttttgtgaagaagaaaaaaacgaattcgaatgatgtttattatatatgccttttccctccatatatataattttttcttttatattatgaaactttggagccgaaattcatttatttagactggaatgagagtagataaattagttcattctataaggtgttgaactaggtaggggagttttaggtcacacaatttttttgacgaaaccttagttcgtcactaaaccacaagctcttctcataacatacttttgtggtatatatatatatactttttagttaacttggaaattttaggttttagactcatccgatgctgttagtattaatggatgatgatatcttctaaatttaattaatatattatataggcataaattattcctccatcttcaactaagttcgaacatgggtagccaataccaaactctacgtaccacacaccacatgagcaacccatgttgggtgtttagtggtattcattacacatttacactgatactcaatgttgtaacttctctatacagaatcattttctcttcatctttctatagaatgtattctccatttttttcttcaattatttgtacgatgttatgtaattacatttaaattattgtatacaatgtaaattataaagaagacaaactcgaaatttagaggaatccaaggctacacagaattattttattgatatgaatatttggtttcacaaatttttgttgcttaggatgcggacgtagacaggggaacacgtgcacatgtctcatttctaatctctgcgcctcatcagtgcatatgtgtttactaattagatccatgcacacatccatgcatttgatcataacaaattattaaaagaaaataaacaaagtgattttatttataaatgtttcattcagtttaattaggctttttatatatacagaacatgacaaaaaaaaattaggttaaggtttcgctttcaggagaagaaaagcgaaatattcaagtggcagttggaggtgctaagtttttgattcgtttagtttaatatgaatgttagtatataaatgttatcacgttcatgttttcatcacaatcaatcgtggttttgcctcaccattttatttttgttttggaaaatgtatattctaattactctgaatataactacatattgatgaaaactcgtcatatttgacactgagattatatataccatggaaattttgattagtagaaaaaagttgcgcctatttaaaattaattcgtaggctcatataggataacgattgaaggtcataaatcagattaattactaccacttggttggataaattattttcatcacattgtcggtagagaatatcacattgtacaaactaaaaaacgtattattttttctcatataaccaaatctagaaagtgtaatttggttatagcttagatgtcgtttagctaataaatatagaaataaaataatagagaaaggagagttagtgatgaatgattgaaatggtgaatgataattggagaagtgggccacgtgagagaagcatgtacttttggaaagtgggtcatttcgaagctcttcctgtctccatccacatgaagttggcattcttgtgtctttacggcctaagtttgcgtttctacctcttgagaaatgaatcttgccttcttgtttagtgactggtacggatctaatagtaacatgacaccatctcatatttctgaattggacgtctttgaattgaataccataacctaggttatagtctacacctacaatattacgtgccgatagatcaacatgcatgatccgtatagtttagtgatctcgttacgtcgttatatcaattggtgaaaatcatcaagtgtttttttaggagtgatgaattactggtacataaattttacgtttcgtttagattttggaagaccttgacgacacagtggtagatgttggtaaatggataacgcatgcaacaaagaaataacgatacaacaacaataatgatgacttaaaagaagaataaaataaataaaagtggcagtcataattcataaaagcctaagctaggaaattcttatggtagaccagaagggacaccttcgatgagtaaaatctgccgcaccacaatcttacatcattctcatcccctaaacttggacctcctccattaataaataagaaagctgcaaacgttaatcttctaattgtgattttgttacaagttttatagattctttgttctatctagctacatatatttcatacatttcactaatttacaaatatgtaagaatgtaatcaatgtaatcgactaagaatacatcaaacattaccaaatttgattgacatttacctctgtctattcgtcctcaacattattatcccatacgttcatacaaattgacattttacacttaattttgaatatcatgatcaatactctctcgcatgggatacttaatcaattgttggattaaatattctttcgcatctttgtgaacgcaattagtgggtggtttgggttccacctttggatcctgcctttattccacataaagtagatcactggtcatactcatatccttacggacaataaactattgttattggtattgccgtattattgtaattctattcataggtctacttccaaatctttgagatttttttttcattggggaagtaagatagatctcgcaatttatgctcgtaagctaacattatttgggccttatatgggctttatgttaaactgatagttaataatggacctccaatagttattctgttaaccgttacttcccgttagattatgacatcctcactcaaccaatacttaaacgccacatgtcgtcacatcagccacgaccttaaaaaaaaatcaattcctctctcttaaaacaaagaagaaaaaaacagagaagaagaagaaaaaatctatctccgccatg

SEQ ID NO: 12533 - DNA, 3000 bp, Unknown
  misc_feature (1)..( 3000): cDNA_ID_2709069_gDNA_ID_2214557_Annot_ID_134797 3000 nt of promoter + ATG
tcttaacggttgatatttattgttctttcaacaatattggactcttctcacctttcattgatatttatttattcccttagtttattcaattccattttacaaaacgtacggtggaatctgaccttgtcctaatttcagttttttttttcctttttattatcgtctatatttggaccatcgagaatatttcgtaattaaaaactttagggtacacatggatttaaaacgaattagctcgtctcgttacgagttttatgaatataggatgtgaaatgtgttttgaaagaaagttctagaggaacatatactgattataaccagtccctcatagaaactaagcttaatcgaaatagacatgaaatagcaactgaattcaacgttaatcattatatcaccagaagaagaatggtagatgtatatgagaaagaaaataagtactgagagcagttgtaattattcttgaatagacataacatattgtaatctcgaccaacttaaggtgtaatttatatcttataaatccttgttctgtaactctatttaccttagctctccataactatattatttggatgaataaatccctgataattggcttcttttctttaaaaatattctaaataataaaatgctttcgaacaaaagattaaatattattggagagttcatagaaatatttttccataccattttctaaatgcattattatcaatgttggtgtggaccatagtcggacggtaggctaagggtgtgagatccgcttagttctattaaaaaattctcgtatcctcggcatggcccgtcaatttaagtaaatataaaatatgtaatatgaatacttgaatttagcaagagataagatcatgtggattatttgatttgttcgtttgggaaatgtacaattctaaaaggtgaaaaagttagttatagattatgcaagtgatggaactaattgctaatgggcagcgacaaggaagactagtattaagacaaatcataaaaccaaacgctaaatgtccaaaaatgtatggagggttaataaaaacaaagagaaaatgatagaataaatcatgtgatatatactaaggagtaagggggtttggtttatgaagattgatatgatggagctgggcaatgaaacaaatgacgatatgatcgatgggcattacacagtgaaaaactttttggcagtgaataatgttaattaaatatgatcatgacgatatcaaaataagatgttagatatatatatatatatattcacattttttaacaatagaagatctcgatacggaggtgttatatgttatttaacaataggaatgtgttactttgtataccaagttgtctagggaggtaagctgttaaattgaccatattttttgtgtgagggtaaatatcagtgaaacgcatcgtatattggtcatccgataaatattgttgtattgcatgtcagccttctcaagaataattttgattggatatgtagtggttaattagttggcgattgaaataccacctaacctcgattttggggtattatggaaaaaatggcaaaaagtagagtttgaattctgacaatgagaagaagaacgttcgcaaagctcaaaatgtttgttgagaatgtgtataatcaaaatgtttcattgttttatatttatttttgccaaggttcatttgcttaggtcttatgttgtaacacctatctttcatctaatgatatttactctcttagcagcaaaaaaagagagtagaatttggattccgacaatgagaagaagaacgttcgcaaagctcaaatattgaatgcaatttaatttatataaggtaaataatttggttgattaatatgcaactcttatgtactttatataacacaacaaaatataaaaatcaaattaacatatataggaactaaattcttacatagttatgactcttgaaaggaggatatagccaatacgaaaatcaaaaggagagagacattacaaaggccaccactcttattatctcttatcttctttccacctagtatttatcaaaaaaatccttcattttatattcgtagatatctagtctacgcatgcattgatttttttggatacatgcacatcatataataaatcatcgtcaattcatgtggatatccttcttctatatcaatgcattgattttttttggcaacaaatcgtatgatatatgatcaatgtatgtggatatccttcttctatatcaatgcattgatattttggctacacatcatatgatatatcatcgatttatgtggatacccttcttccataaaaccttttatgaaccagatatacatgaaaaatatctccacgtcgtctttatatgttgatatgatgatatctcatacttcaatgattatatatatgaggaaataaataaatataagtgcattgacagtttgacacatagatcacctagctttcttatcttatattctgattcttttttgtcattatatgtaatttctgatctatcaagtagttaagagtgaataaactatatacagttgcttcatatttttttatactatatgtatataatgagaaaagctattataggttaagatacgtttactattgttgtgcacgtaattaactattatcactttttttcccccgccagagatggtaatgtggtaaatggtcatatatgggccgttaaagggctttaataggcgttaaattgttcaaaccataatgcggcccaataaaattgccgcgaagccgatggtttaaaacggtagccgaagaaaaccgggcggcgaaaaaattctgttccattgctatttcccgctacttccatttttccctctttgtttactttttttttttttttcatttatttttcttatctcattttcctcttaaaaaccatgagattgattcttcacttcgattccattggatctcaatctcaacatcgatctcgatctcccgccttttttctgcctccttctgataacctaca

SEQ ID NO: 12534 - DNA, 3000 bp, Unknown; identical to SEQ ID NO: 12530
  misc_feature (1)..( 3000): cDNA_ID_2709073_gDNA_ID_2214557_Annot_ID_134798 3000 nt of promoter + ATG

SEQ ID NO: 12535 - DNA, 1369 bp, Unknown
  misc_feature (1)..( 1369): cDNA_ID_1833587_gDNA_ID_2214558_Annot_ID_134817 3000 nt of promoter + ATG
ccacatatcgtgcaataagaaactgatcacttttatatacctaaacgatttacaatttacactactatgcttgacacgatatgtaatttttttttttttgccaaagggtgttgttattgatattaaacattgtacaatacaacgtacatagactgtttatataaaacaaggacgtctagataaaaaaagcaaataacaaatattacaagactagttaaggaaacaacaaactgagtaaggttttatgtacaaaacagagacgactaccaaagaagagggccagacgtggtagcagtgatggaagacaaacatcctgacatctcaataagaacatttatggctacttcaaatacatatatacacaatatgtaattctcttattacatttatggctacttcaaatacatatatacaaaaaaaaaaggcctaccttcgacagaagttataccaatttattgatcggaagctacaaaatgttatctagggtcaatttgtagcctatctctatatcaaaaccgatacggatacaaaatagtttgataatcatagaatttaacattctaataaatatttgtttctagtattctttaaatgaataatcttgtgttcaattagtctattcatagtagaattaagtctcctaaaaaatagattgaaaccaaaaacagccgcacatggatttaatatcgactttagttaggaggttttgctaaaaatagtaaaatactcacaaactcacttctaaatactaatcttttacactcatgtcatgtgctttaaagatatgagagaacctttcctagtacacctacagtcaaaattttcaagattccgaaattttctaggttttttgagcaagagccaagaatcccaaatgtttgaatttgtatttttgatccaaaaatactacaacatcgtataaagaataaatcatacgtgtcagaacgagacatatgaagatgatgaaagcattgagccgcccctcaaaaaatccgttcaacgtttgagagtcaaggccacaaggtctgaccaatctatctcttctccttcttcttctaatcatattttcaacggtcaaactttttatcaccttctcagaaactactcttcttcatatgtgaccctaaaaataaaaacgaacaattaaacaaaattttaaaataatataatattcaccaatcagacgtgcaatatgttttatatattcagacataaccaacaaatatacagaaacaagaagaagaacaagaaccatcacttctctcattttcttcttctccaagcccccctcctttctatatatatctgaaattggtcttttataaaacaaacttccatttttcgtatggctgcttcttttcttacaatg

SEQ ID NO: 12536 - DNA, 3000 bp, Unknown
  misc_feature (1)..( 3000): cDNA_ID_3025683_gDNA_ID_2214558_Annot_ID_134823 3000 nt of promoter + ATG
caatttttaacggattgttaatgatataggaaactttttttttttggcaaactaaaaataccgaagatagatttgtgtccgaactgttaactaagattttgtgaaaagactcagccatttaattggttgagcttagctttttctaacacgcagaagtatgtagtgagaacagttgtgacgaatctatcaaggatcaatcaagatcaatcacaattctacttatgtaaactatatattctgtaattagaagtctctagaacatctagtctgtatataaacaatgtaaatcatctcaatacaaatcatccaattctatattctttatatggtatcagagcatcatcgatacctaaaaataaaaaacctaaaaacagccgcctctctcctttctttcttcttctcccccgttgatttttttattcctctgtttttcaaacttcaaccatgtcgaatgtttcttctgaaaccgtcaacctcaacaacacctccattgttcacatgaacatgtcgaatgtgacaaaacttacggcctccaattacataatgtggagccgccaagtccacgctctccttcacggctacggtctcactcaataccttgatgcgacaaaagctgctccagctcgtgagattaccgtcaacgacgttgcctctgtgaatcctgagtatgaagcctggagtagacaagatcaattgatcttcagtgctctcatcggcactctctctctcaccgtccaaccaacggtgtcccgcgccgctacctctgctgatgtttgggccactcttgctggtacctatgccaaaccgagtcgtggccatatcaaacagctccaacaccaaatcaaacaatggaagaaagacacccgcaccatcgacgagtacgttcaaggctttatcaatcgatttgatcagttggcattaattggcaaaatcattgaccatgaagatcaagttgattacattctcgggggtctgccagaagactacaaacccattgttgatcagatggaaggacgtgacacaccaccaaatggatgtttaacaaacagttgtgacgaagatggatgttttatccaaatggctttgaatagtgtatagaacaagcaacaagcccgattcggcccaaacccaaccccatttaatcatatgtggttttagtagtttaaataagctactttgagtctttgacaactgttcttcatatccatcataaattgtgtagcattttacattttacattttacgtttgaaacttaatcataagttttgtgaatcaaagttaattgataaaaaatcactcttaatacttttccacgtctacatcactgtcattttcatttcagacttgaggcattcatttttcaccatgtttcaggaaatatactgcaatttcttacacgtatagagaggtccttaataagtatgagtagctatatcgtaatgtatttataccaatgtactttatgctcacacgtgttcggtgtacatataatatgttgcatgtggcatttcggtgcctaattatcaagtttttaccgaaaataagggaaaagtatataatcatgtagcctttcagacaccgacaaaaattttaaacagtaaatacgatttttctgttcttcttaaacagaaaatgattaaacatgaatgaaacttttaaaagcttattttgacgacgtgttctttagccaaatagacgacatttaaacacatcaccggaccggaaaaacaccagttgaaaataaaataaaaaatgtatttgtaaaagtctgttattacaagaaaatatggtcgatcgttccatgtttaattgtgtttcttgacactttttagttcttataaaacacctttactacataacttgataagttggatgagaataaagaattataatagattctcataaaaataactttataagatatattctctcttatatatatatatatatatatattatgagatttcctaatctaaaataaaaataaatgtaaataatatatataaatattactaaaactaatatatgttaatattttaaatctttctacaatctttatgatttttatattgttcgacgatcatctcaaccattgactctcgatctccaactacagataaagtaaaattttaccaaagaaaagtctagtgactcatcataccaataaaaaacacacaacacctagttttaccaaaataagactagaaatagtactatagtagttatgggacgatggagtgatggttttgcaaagcaaaagccaataattgtacatttcaggccgaaaccgacaatgaccccatcctacccatgtgtcatgcattcagtatttattatgtgtatcagtcaaattttcacataatgacgaaccatctacatacaatctatggcgtggcctgtggagggcaggacaaaccgacataatattgtgtatatccactgaaatttattattaaaaaaaactaatacaatgataagtactagtattagtgataaaaaaaacttatacaacgttgttttcatcttacaattaaagatattcataaacgataaatctctacttcgaaattttttaacatctccaaatgtttgttcaagctagtagtagtccacataaagtcacgttggggtttcaggctttcgttaaagattcacaccgtcggattgggatttccagacgtcacagatagacttatcttcttcgttaaatttagaatccaaagattattgtctgcacactcgttattatctaaaacagccttttttagttaaattgacgatattttagtgacattccaattttaaaattcgtatgggtctacattaaatgagtacagcgaccaactactccttccctcatagtagtatttaggtattgcattcacattacataagatgtactttcctactctatataaactctcactcccctaacactcttcatcatccatcacatctcctcttgcaaaccaacgtaaaacactaactaagagatcaat

SEQ ID NO: 12537 - DNA, 3000 bp, Unknown
  misc_feature (1)..( 3000): cDNA_ID_1375747_gDNA_ID_2214558_Annot_ID_134824 3000 nt of promoter + ATG
atatatatatatatatatattatgagatttcctaatctaaaataaaaataaatgtaaataatatatataaatattactaaaactaatatatgttaatattttaaatctttctacaatctttatgatttttatattgttcgacgatcatctcaaccattgactctcgatctccaactacagataaagtaaaattttaccaaagaaaagtctagtgactcatcataccaataaaaaacacacaacacctagttttaccaaaataagactagaaatagtactatagtagttatgggacgatggagtgatggttttgcaaagcaaaagccaataattgtacatttcaggccgaaaccgacaatgaccccatcctacccatgtgtcatgcattcagtatttattatgtgtatcagtcaaattttcacataatgacgaaccatctacatacaatctatggcgtggcctgtggagggcaggacaaaccgacataatattgtgtatatccactgaaatttattattaaaaaaaactaatacaatgataagtactagtattagtgataaaaaaaacttatacaacgttgttttcatcttacaattaaagatattcataaacgataaatctctacttcgaaattttttaacatctccaaatgtttgttcaagctagtagtagtccacataaagtcacgttggggtttcaggctttcgttaaagattcacaccgtcggattgggatttccagacgtcacagatagacttatcttcttcgttaaatttagaatccaaagattattgtctgcacactcgttattatctaaaacagccttttttagttaaattgacgatattttagtgacattccaattttaaaattcgtatgggtctacattaaatgagtacagcgaccaactactccttccctcatagtagtatttaggtattgcattcacattacataagatgtactttcctactctatataaactctcactcccctaacactcttcatcatccatcacatctcctcttgcaaaccaacgtaaaacactaactaagagatcaatatggctggagtgatgaagttggcatgcatggtcttggcttgcatgattgtggccggtccaatcacagcgaacgcgcttatgagttgtggcaccgtcaacggcaacctggcagggtgcattgcctacttgacccgaggtgctccacttacccaagggtgctgcaacggcgttactaaccttaaaaacatggccagtacaaccccagaccgtcagcaagcttgccgttgccttcaatctgccgctaaagccgttggtcccggtctcaacactgcccgtgcagctggacttcctagcgcatgcaaagtcaatattccttacaaaatcagcgccagcaccaactgcaacacgtatgtgatcttttcactcttataagtatatgttataaattttttagtttattttgttaaatattggaaacttatattaacgttgttatgttaatttgtatgtgaatgcagcgtgaggtgatgagcgacggtcaaatgaagctactagcggatgtttcgaatattatataatcgatgagataatattaaataaagatgttcgaatggctgtactcttttcaatttcctgtctttttttatcgtggcgtttctattatgtgatcgtctgtactatgttcgcaaacaacgttctttgaatttcagacttgaagtttaagttattctatactctatatctatactaacacttactttagtttaatcgatatgaccaaaatgattaacttgcattacagttgggaagtatcaagtaaacaacattttgtttttgtttgatatcgggaatctcaaaaccaaagtccacactagtttttggactatataatgataaaagtcagatatctactaatactagttgatcagtatattcgaaaacatgactttccaaatgtaagttatttactttttttttgctattataattaagatcaataaaaatgtctaagttttaaatctttatcattatatccaaacaatcataatcttattgttaatctctcatcaacacacagtttttaaaataaattaattaccctttgcatgataccgaagagaaacgaattcgttcaaataattttataacaggaaataaaatagataaccgaaataaagatagaatgatttcttagtactaactcttaacaacagttttatttaaatgacttttgtaaaaaaaacaaagttaacttatacacgtacacgtgtcgaaaatattattgacaatggatagcatgattcttattagagtcatgtaaaagataaacacatgcaaatatatatatgaataatatgttgttaagataaactagacgattagaatatatagcacatctatagtttgtaaaataactatttctcaactagacttaagtcttcgaaatacataaataaacaaaactataaaaattcagaaaaaaacatgagagtacgttagtaaaatgtatttttttggtaaaataatcacttttcatcaggtctttttgtaaagcagttttcatgttagataaacgagattttaattttttttaaaaagaagtaaactaactatgttcctatctacacacctataattttgaaacaattacaaaaacaaacaatgaaaatgcaaagaaggacgtaggcactgtcacactacaaatacgttaataaaatgtattttggtcgaattataactttccatacgataaagttgaattaacatgtcaaacaaaagagatgagtggtcctatacatagttaggaattaggaacctctaaattaaatgagtacaaccaccaactactccttccctctataatctatcgcattcacaccacataacatatacgtacctactctatataacactcactccccaaactctcttcatcatccatcactacacacatctcctattgcaaacgaacataaaacactacctaagagatcaat

SEQ ID NO: 12538 - DNA, 3000 bp, Unknown
  misc_feature (1)..( 3000): cDNA_ID_1985638_gDNA_ID_2214558_Annot_ID_134826 3000 nt of promoter + ATG
tgaagtcagttgttgactcaaggtttattagaacaaaagtcaggtttttagctcattaaagtcaaccggataaagacgaccggtctaattcggtttgggatttagaaagactctatatcgctcagagggtctaacgcagacgcttttcaactttcgagatatttttcttaggtatatatttccaaatgttacggcgtcgttttcaaaaacatatttttgttgttgcgtagtagtccttcggaaattctttgcttcctagttgaagcactcacaacacacagcttttgtaggaatccctaagcttaaagtctctattattctctaatctcttcttcgccgacgacttctctcaccaaggcgacgttttgatcaggcgatgatgagtatcccaatggagttaatgtctatcagaaaccctaattccaccttgctctatagagctcactctcgtccgcctgtgaagctctgtgctccacctcgttctctcctccctagccgacgccatttcagtgctcctcgagctgttgtttcgtatccaggaatacgtttcggctttacctcgccggaagtcttgcttaatcgatccgtcgttgctttcgctgcatcccacgaggattcggtgagtagtgtggttgtgctcaaaacttctaatttctctgttgggtatctcgaaattcagatgctttatcttgtaaattgcttgaggctagaaaaaaattggactttggtgaaatttatttgattaagcaatataatctgccaatttcaagtgaggtgcaatttggggtttgaaattatcaaatgatctgtgattagctaaagaacatgttttgattattaccctttatcgccattgttcaaatagggagaatcaggtgttgaggtggggaaggagaagagtgatatagatgttgaagatgatacatctaaggaagcatggaaacaaactcttgagtcttttaaagagcaggtatcaaagatgcagagtgtgtcatcggaggcatactccgttaactcccaaaaggcgatgacggtcttgaaagaaacttctgaacaacttaggattcaagcggaaaaggcgaaagaagagttgggtactaaagcgaaagtggttagtgaagagggtagagaatatattttgaaagcagcagaagaatctccatcagatgtgaaagagattgttgaagcatttgcctccactgaggatctgaaaaatgtgtcccgagcgaatgattttcatgttggaataccttatggtaaacatgttgtatatcttgttcatcttttgtaagctttcattgttcgtgagtaacgggataacaatgtttgtatactttacaggtctactcttgcttgtgggtggttttattaacttcatggtatcgggaagcattccggccatcaggtttggagtcattcttggtggagccctttttgcactgagcctggcaagtctaaagtctcataggaaaggagagtcatctacaaagttcttaaaaggacagatgggttagtaaagtttttcaatctgtattaaccctttctcatatcattcacaaaagctagccccagttactgaaatctagttttaacaaccagaattgtgctttgattaggaacggctttgataacccctctgatatgcatattagctaaccatgaatgaattagtttaagttgcattattgatttgtctagaaatgagtcttgttccaatagatacttgttgaatcctagattttgagtttagtcaacaaattaatttttcactaatctgatttttgaggctttccgacattctccggttgagtatagatgtaaagcatgtttagtgacgcttatctgttaccgtgttcttatgttcaacagctatagtggcaatcatatttttgagagagttgcggttgctactgtctcaggtaactttcattgctcaatgttatatttcaaatggtttgaagaatggctttgaatgaaacataattcactctcctttttctctttatagaaatcgacgttcctaggtttttttaccacccttacaaggtacactctgaaaaccatatcattaatcattgtacatttgcaatttgataaatgaaacacgataggaagatgattgatagaagaacctaaactaaaattcaaagagatatctgaatgaaggaagattagtcataccttttgaccaaacttcctgctagattcaaatattccacggggaaaagcaaaacacactttgcatataatggattaattaggattcttatcagaaagaaggcttaaaagtttgttggattactgttgcagtggtggtgtgctagggttttacttgtacaagatggtggtcaagagagaaaagggaccaaccttagaagatggcggagaagatgaatcaagcgatgggtttgtaagaagtgaaggataaagaaaaatggggtaagaggaagaagtgttgtcgtcaacatcagcatcatatatgccaaactcttttgatatctctttttaagttgtgtacaatttttgcgatcaatccttctaatttccgttgtatttggattagtgagtcgtttattaatatcaacaaaccaataaaaacgagaattttattttgtttgtgaaaagcccatcaaactttggcccaataagggcctgggtgagcccaagcttgatgcagtaatatcgggataaggagaaagagagcagaagcgtgaatctagtagtatccatagacctagccacgtgatccaaaccgttgattcttcaaggttttaactgaaaccgttgatcactttgtctcggtcgtataaaataaattaagaacacagtttcagtccgtaatctctatctatcttcttcgtcgtgactcaaacgaggttccgccgattataatccttctctccatacttgagagattttgttggattgttctttgttctgagtcgccttggatctatcggtgttggtgctttgttttttgagctagggattgtcggaacg

SEQ ID NO: 12539 - DNA, 3000 bp, Unknown
  misc_feature (1)..( 3000): cDNA_ID_2709138_gDNA_ID_2214558_Annot_ID_134827 3000 nt of promoter + ATG
tctctggatgacttctgcaggattaaatgtgtatgatgagtaaaacatgcccatcttattctaactcttaagagactcaacttaaaatgagtaccaagatttttatagtgtaagatagagttacctcctcagccaccaaggattcttcatcgtgttgaagttgttgaactttcttttctagactcgcctgattgaaatcatgcaatttttacaaggagaatgcattataacagaagaagatggaacccttatctccaatgaatgaagacatacctctttctgagtgaaggtagatctttcatctagcaattgtctcatctgggcttctgtgctagactgtcaaatttctataaatgtcagaactacacagcatcttcaggcataatgaaatgtaatgtaacatctatagcgatctgaaatgtcctgacaacatgacattctttcacgttagctaagaccaagtcctagtctagaatgctaaataccggtagtaggtcctaatctacatactggggagataattaagaaacaaaccaagttgaacagataaaaggaactttcatatgatcacacaaaggagaaactgtagtactaaaaaaatgatcccagtgttgaagatctctcaccatttcacgaagaagcatgtcgttcttgtttttatactgcacaagtctttcctccaacttttcctgcataaaatacaatgttattttgacctccaacttgcagatgatcctaaaaaaataagaaagctatggatacggctttatgcaattttcttcactaacttcgttttgtttgtgagcttcattttcagttctaaaatgtaagagcctttcttccaacagtgcctgtgaaaaaccatgtaattttgaccttcagcttgcagataatccagcaaaatagtaaagttaggggtatggctttatgctatttcttcactaacctcattttgtatgtgagcttcattctctgttctcaaatgcaagagcttttcttctaacagtgcctgtaatacatcatgtaattttgaccttcagcttgcagataatgcagcaaaatagtaaagttagggataggctttatgatatttcttcgctaacctcattctgtatgtgatcttcattctctgttctcaaatgcaagagctttccttctaacagtgcctgtaatacatcatgttattttgacctttagcttgcagataatgcagcaaaatagtaaagttagggatacagcctcattatttatgttatttcttcaccaacctcattatgtacgtgagcttcattctctgttttcaaatgtacaagcctttcttctaacaatgcctgtgaaacatcatattattttgatttttcagcttgcagatgaagaaggaaacagcaaagtaatgaaaaaggtttaaatctaatcttcactagcctctttctgaatgtgagcttcattctcggtttccaagcgtctaacattttcttcaaaaccagcctatcaagacaaggcaattcattctttactcttcaactgtggaaagaaatcatgactaggtggagagattatctctatgataaaaaatatgtttgagaagagaatatcacctctttctgaaggtaggaaccattttcctcacgtaactgtttaattgtttcttccaacagcacctacaacagcattacaaactagtcttgagacccaagtgaaaagatagaaaacaaaaaaaagcagactcttcatggcagtaaggaagaaaatttgtcaatatttcactcaggaaagatgaaatatactactgttaactaaaaatttatcaaccaatttatacagatagaaatgaaaagttctctttctgcatacaacaacatagttttgttgttgttctttaacctttctcttctacattagccaatccaaatttccaaagaacaattatctactctgcatacaccacaaaaaaaaaaagtacatacaagatacagtaaaaaatctcacctcacttccctgagacttgttctcaacaccagaatcatcttcctgttttaaacaagaagattttaagagtatcagacaacgacggctcatacactatcacataatttttgtcaaccatctctacacaaacctaatgaactctctacacatcagttacaacaaagtaaacacacacgtagtaaaaggatccgttccagtatatgaatcgaaatttcattcaatcaaatcatacaatgtagcataactatgtcaacaaaaatgcaactgcattgacattataaaataagaagaaatgaatcaaattgaccccaatgtcctatcatcaaccaagagaatcaatctaatgtagcaatgttccaatcaatcttagagatataatgaactcacagttgcgacgacatcgatctgatgagatgattgcgactcatcggcatctggacctccgctaatttgaggaacgtcaccatctccgatatgattttcatcgacggaggtcgttgcaccagaagctaaagcgtcgtcaacacgtttattattctgcttattcttctttttcttgtttctcttcttcttcttgtcgtcttccatacctgatccagcttcccaacgtatcagttatcgattcaaaccccaaaacaaaaatccaaactttatctcatcaaaatccaaactttatctcaacgaagtcagatctgaatgatttgaacaataggaggacgaagaagagaaatgcgtgattcttaagcttactttgcgatgaaggcgagtgataatacgacacgaaatcgaaaccttagcgccgaacgggaaaacggagaaaggacaaacgagaaagtggtcgccgaacgggaaatgttaaagtcctttcttttagtcggagcgaacaattttattaagagtttttttttttttttggcttctctctcaatttaataagagtttagaaagaacaaaaaaaaccatcttttccttgtccacgtagagttgaatttgtagggttctttagaaatg

SEQ ID NO: 12540 - DNA, 3000 bp, Unknown
  misc_feature (1)..( 3000): cDNA_ID_2709140_gDNA_ID_2214558_Annot_ID_134828 3000 nt of promoter + ATG
tggaggcgttgtgcagggttgctggagaagctgatgactatgagagagagtcagtaaatgctagtgatcctttacgtgttgctgtctcagtggaatcactgatgtttgagaaattgggtcgctcaactggagctcagaagcttaagtacagatctataatgttcaacctgagggatagtaacaacccggacttaagaaggagggttctcactggggagatttcaccagagaaactcataacattgtctgccgaagatatggcaagtgacaagaggaaacaagagaacaaccagatcaaagagaaagccctgtttgattgtgagcgtggtcttgctgcaaaagcatctaccgaccagttcaagtgcgggcggtgtggtcagcgcaaatgcacctactatcagatgcaaacaagaagtgctgatgagccaatgacgacttatgttacatgtgttaactgtgacaaccactggaagttctgttgaggagatctctgtgtcttttatttcatgagaccatgttaagacatagaggctctgattgattaatcaggagcttcgtgtccatttgctagcagcattcctagaatgctctggctccgatgtttgtttaaggatatcattcaatgtcttagagattagtaagtaggggtatttactaatttaggtgtttgtagttcttatttcttttgcttctcttcttccaaactgtcaactcaactttcttgcagattttaccaaattttgaagtttttttttttagttttagaattgctatttgtgtcctccatttaatcatcttgtacggctgaagcttcacagcctaatgtatgtgatattggtcgataagtatcattacttgaaactgattctgactcaactgcaacacaagagaacatatacagcttaaagttcccatcgcattgcgaacaagtcctgtttctttctgtttcattttcactatcaaatacagccgaagatatatgtcaagatgaatggcaacaaatggatgtatcacttctagcggaatatgtcccattcttcatcatccaaatctctcttttttcggttggatcgattgtttctccttcgccgtcttctatcagatgaactttcaagatcttcaacatcagggtattcactatcaaactgagcatcccagagtccctgtaattaaaagtctttcttcaatcatccatttgaaaagtgatgaaaatcccaaggcatgccattacaagacatatatataccttagtcaacctctgttttctagaagctgcatcttcttgaaccacaactatatcttgtaagacctcgattatatcctcgacatctaatctgtatgtactcacctgcattatcacataccaggtaggtaatcataacattatgctattccaagattaaatgcttgtgcttgtatctcacataaaccatttcaactttattagaaaaaagggaattaagttacccaccaggcttgatggtataatagttaccccgaaggaatcgagctcaagcgattcaactattcccgagttaatgttgaatgagtaacctcgaacctaaaaccaaccatgtgcattcagctaatagcaagatataagcaaagagacagatatcattaccgaagaagatctttattaacacacctttccaatgtttctccctcctggtgtaactactctgtaacctacctaaacaaaagatgagaattcaatcttagacttgcttaaaggccagtgattcacaagacatcacataaaaagagactatataccagtgtttcaagtccaaccatcttgaattcagtatccaagacagtctcattatcaacaaggacaacatcacccacctacagagatcttaatataaactaagatgtaagtaaacacatttccaaatgaaacaactttcaacgtagcagaaaccaaacatagtagtacccggacaatgtctgtgagcagaaatctctcagattctccagatagcaagcttggtttaacatcaaccaccaaaaccaaccactgaaatttcagaatgatagagctcattgcacttacttaaacagtcacaaatttggtaaaagagcagactttagactcgctaaggtgattggattcaagaaggaacttacagaagtagtgtcaacccaaagctgagagataaatcctaaactcaaagctgattgtatactaacaacttgcttagcaacaagattcgatcttgtcgtcgactgcttgaatcctcgcgaacccgtaatgctcagatcattatcacctactagtcgaaccaaatcactttctccaggtaattctacactatcactccccacagtttgatgcactacatcttcttcattagatagtgaagaactcaagcaacagatgaaattgtctctcggtttctctataaaactgaattgcccgagaaagggagagtttttcgaatcaatccaaaagcaattgaggattgaatgctgaatccgtttgagcctccatcgacaagtttctgaattgggtttcaccaatcgagcattgagaactggaagagaacagaagaaggaagatgagcaattgcacatttctaaagaaccctacaaattcaactctacgtggacaaggaaaagatggttttttttgttctttctaaactcttattaaattgagagagaagccaaaaaaaaaaaaaaactcttaataaaattgttcgctccgactaaaagaaaggactttaacatttcccgttcggcgaccactttctcgtttgtcctttctccgttttcccgttcggcgctaaggtttcgatttcgtgtcgtattatcactcgccttcatcgcaaagtaagcttaagaatcacgcatttctcttcttcgtcctcctattgttcaaatcattcagatctgacttcgttgagataaagtttggattttgatgagataaagtttggatttttgttttggggtttgaatcgataactgatacgttgggaagctggatcaggt

SEQ ID NO: 12541 - DNA, 3000 bp, Unknown
  misc_feature (1)..( 3000): cDNA_ID_2709148_gDNA_ID_2214558_Annot_ID_134830 3000 nt of promoter + ATG
tgatctctaatcttccaagggttttgatagaggagattttttttagggttcctttgaaatctttgagagcagtgagattaacttgcaaaagttggaacactctatccaaaagtaggagctttaggaagttgtacattagtaaaagagcaacaagagaagaggagtccatgatgatcgctatgatgaatttcgatctttattcaatgagggtcgtagttgacgacgacgttgatccatctaaagcgtttaaaaaaaaaaggaataaaaaatctatagcgtttaaacgtcaacctattttccttgatgaacaagtcaagatatctcaagtttttcactgtgaaggtttattgttatgcttcttaaaagaagacgatacaagggttgtcgtttggaatccgtattgcggacaaacaaggtggatccaactcagatattctcaccgtccacacaaagacaggttcatttacgctctaggatacaaggataaggaatctcgtggtagcttccaattattgaggtttgtagattatttcctaggagcacccaaaaatcaatatttttggtatgaaatttacgattttaactctgattcatggacaactcttgatgtcactccacactggtgtatatactgttgtgaccgtggtgtttctctcaacggaaacacttactggtgtgctaaagaaaggaaagcagaagacgatattgtcgatcacatcatatcttttgattttacaaacgagagatttgggccgcttttgcctttgccgtctaaggttatggaacatgaatatgaaattgtaactttatcttatgttaaagaagagaagcttgcagctttatttcagcattacgaagcagattggaatgagtttgatatatggattacgactaagattgatgctgaagtggtgtcgtggagcatgttcttgagaatggatacgggacctaggatagaggttccacatatatgtgaaggtttcttcattgatgaggagaagaaagtcgccatgggttttgaagaagacttcgatcgcaaaacatttatcatcattggagaagctggatacgtaagaaaattggatatcaaagcacatgtagacagaaaatgtcggccaactgtgtgttcttatgttccaagtttggtccaaatcaagaaacctgcacgaggcaaaaggaaaagacaaagcagcttagaaaagcgtctatttgatcaaaacatgttgagacttgaagcatttaaaaagctaggcggctacttctagaagcaatatgcaggaggagttagaagtgaaagggatgacttgtctcaatatataatttattatgttacaaaacttctatttattttctcaattactttattttggcatgtacgtcaatagatttttgaaccagaatctgccccacatgtgataattttctccaaatattttcttaatggtttagttttgataattataatatatatatatatatataaatatatatatacaggtttaaactccaaatctatttctaaaatatgaaaatctaaattttattaattatgaatctataattcgatatgtctaatatatattgtttgattttatttaaatatttaactcgtctaaaacaccacgattagatctctaagagttgggttgccgcccctccaacaacgaacaaatataaagcacaaagcattttcttcaacattgtctcacacaatattttttttggtaaagagatagaagaagaaagtgttgcgagtggcattcaaatctatgaaaattcaaagggacaggagaacatgaaaaaaaatatctaaaggagtgttaatgagatgagctaattggttagtgtgcttaatgggaatgttttagacttttagctgaattattctttttaagtttttaatgattaaaccaaagcaactcttaacggaattgccactttagtatatcgttgacaactcttagtttccattagactactacgtacgtgtcatccacttttctgttgacaaaaactaataacaatcccattccttgtcagcatccaatccataaatgtagttggtcggtccattttttgttggtttgacacatttgtgcacaatcccattaatttcttgataattagcaataaggcaatcctagttagctaagaaactatacgattatatttttggtttgtctactatataacatgtactgtgggagacacttacacatgtaactagtttaaccaaactagatgatcgttcaaaacagcatccagcttatctctcgagtgaaatcctaaaacttgggtagaatagtaccatggaaattgctttaagtgggtttatatcataaacatagaaatttatattatacgtgaggaaaaaactagtgagatcatccacttagtgttgttatatactaactaaaagatatcatatgcgccacttagtaaatgcaatgatgtattattagagatagtagaggattaacgtgaatgtgtttggaatacatatagtggcgatagatgtgtgttagtgaatatgttcggtgctggttttgaccccatatcataatttttaatgtaataaattcttttgcttacttcataattattaagttaattggtcgtaaaaatggtgctacttagtggatgaaacctcatccagaatcttctaccgaaccaaaactctttaaatactaatctataacacggctacattactattaagctgatccgatccaccaccacatcataggtattattactctgatcttcccttttcaagcattactactttctcctcttagttttcttgtttcaccaaccaagctctctttcttgatctctatctttatgtcaactctatgctctcttgtattgtgttcttttccttttcaacaaattttgttcactagtcactagtatttcctaacactttgtactcatgatgatctctacctatctttgcataaaaccctcacgggtacttaggaagaatattcaagagca

SEQ ID NO: 12542 - DNA, 3000 bp, Unknown
  misc_feature (1)..( 3000): cDNA_ID_1807259_gDNA_ID_2214558_Annot_ID_134831 3000 nt of promoter + ATG
gttttccggtggttttctccattgctttgtagacttttccataggttccttcaccgaccttttcgagcttctcgtatttctccattgatggaggattttgaattgagactgatgaatgttttttgtttgggtcttataaaccctaaagccccttttcgattttagatctggtaaataaaggcgcctctttgctataacgtttaacatttgaatccctcgcacgcttcacacgtaccaataatattttattagtcaaagactcaaagtcattttaaacagataagtatagtataagatatttgcttgattatgtttatagatttcaattcattatccatggtgaatgtttagttgaatgaatctatgcatgatctttgatgtaaagccggccctgagtacaaaaagctaagctcatgcttgcagccacaacccataataaagatttttcagtcatttattttgctaaactattaatattacttgaagagtcgatcatttcgcattaattggttgaaacttcgagcttttccaacttcattttaactttaatctagtatttaacatactaattaataagactataactgttttagcttgtatcccattagttttctccttatacgttaatgttcaatgtttggcacaaactcaaaaaaagaatttcttactacgtagttttttttcacttactcaaccaattggaaaaatgtttaggtttgattttttgtgttcgaatttgtaacttcaattattttgggactgtgaactcttactcattattcattaatggtgggttgtttcttgtgttctaggcttctagtatacatgattcaacttcatatgatattgattcagtttcacatttttgatttatttcaactttatattcttcttacactcattccaatttcatgtatggtaattgcatcagttttgatcgatagttacattaagaaaaccatttctttttacaataaagatactacaacaacaacaaaaattctgactaggtctacgaatgtgcaaggtatgcaatttcacaaactcataaaaatcatcataagaagttctatgtaaaggggaaagaaaaacaagattataaacaaattgtgtgtttcatgtggaaactaaacaatggctgaatattaaaaaattattggactactatacataaaagaaaattacaataatgaaaaagaaaacaaagataatattcaatgatagggcattgactaaacgaaagaaaatggcttaaagactttaaagttgattatgaaaaaccgttactgatttactagggtcaataaacttatttgcaaccattttattaagggaatttaatgaaaaaaaccgtcagctttggtcagatctatttttaaattctgaactatgtttttagtaaaacaaactctgaactaaaacctgttaataaacttaaccccatagtaattaaatattaatgggatattaatttccaaaaatcgaccaaagaacaatgacagaatccgtgatccaactgaagatcgtccacctcaaaaagttctttatacacgtgaaaaagtttaaatggtaaaatagagaacaatgaattatgtttcacaagatcttcattttcaaattattaaatttaatctttgcatatttagacttgcagcaattgtcaacaagtcggacacaacaaacgttcatgcaagtgtaaagcaatgccaaaaccacccaagaaacctcaaggacgaccaaggaaaaaacagaaaacaatggatgaagagaaccctatcactcagccaatacaatcttctcttcaaagttaatgcttgacaagtctttactttagaatatcttgtccatctgaaacgattgttttttttttgtgacaaatattgttgtgttgcaacagcttcgatagttatgttggttggatttatttaagcatgactctttggattattttaagttattgtgtctttctttcagcttttaaaatccaaactaattaagcaattcaaaattatttagaatgtttttttgtaataaattcaaaacagttttaaagaacatcacgtggtttttgcgctaaatacaaatgtctcattgttttctttttaaaaaattaatatctcattaatatttaattactgtgaagttaagtttattaacaggttttagtttaggatttgttttactaaaaacatagtttagggtttaaaaatggatcaggacaaagttgagagtttttttcattaaattcctttttattaatattttttctcttccaaaatattcataaattgctttgtcttataaaattctgtacacgtaaaatggtttaattgtgtgcgttacatttgggggacttggaagaccatgagcataataagagcactcaaaatcatcaccacctaacaaaaaattgcagaaacacatttattgttaataattaataattaaaaaatgtccaggccaaaaagacagctcaaatgagcgattgcatggttgacacgtgtaaagttttagcggcgttaaaagatacggtctacgtagtcacgcacacacaccaaagtttctctccattttcttatttccttatttatttaattataatacagaatcaatcaaacggtgacggttgaattatcaccaaaaaataatcactaaatttttcaacctttgtaacagagagatccactctgtcactttaaactttttagctgattttttctgcctgagtttaattaaaaatctcctttatggaaaataaaaataacttttaatcaaagaaacaaaaaaaaaaagagatttttcagacagaagaaaaaaagaaaaaaaaagtctggcgtcttctgcagaattcacatttggtgtctgctgctggcgttggtctttctctttctctttctacttttttttggttctgcgatttccatcaaaacccttttcccaacaatcttggttttgtacagagaagaagaagaagaagaaaggcacacaaaataacccatg

SEQ ID NO: 12543 - DNA, 3000 bp, Unknown
  misc_feature (1)..( 3000): cDNA_ID_1807782_gDNA_ID_2214558_Annot_ID_134832 3000 nt of promoter + ATG
acctgtcgatctcaggagtgcttctaatctgaggagaagcagctcgagcaggagagaagtaagatgagttattgtataaaccagacatgggttattttgtgtgcctttcttcttcttcttcttctctgtacaaaaccaagattgttgggaaaagggttttgatggaaatcgcagaaccaaaaaaaagtagaaagagaaagagaaagaccaacgccagcagcagacaccaaatgtgaattctgcagaagacgccagactttttttttctttttttcttctgtctgaaaaatctctttttttttttgtttctttgattaaaagttatttttattttccataaaggagatttttaattaaactcaggcagaaaaaatcagctaaaaagtttaaagtgacagagtggatctctctgttacaaaggttgaaaaatttagtgattattttttggtgataattcaaccgtcaccgtttgattgattctgtattataattaaataaataaggaaataagaaaatggagagaaactttggtgtgtgtgcgtgactacgtagaccgtatcttttaacgccgctaaaactttacacgtgtcaaccatgcaatcgctcatttgagctgtctttttggcctggacattttttaattattaattattaacaataaatgtgtttctgcaattttttgttaggtggtgatgattttgagtgctcttattatgctcatggtcttccaagtcccccaaatgtaacgcacacaattaaaccattttacgtgtacagaattttataagacaaagcaatttatgaatattttggaagagaaaaaatattaataaaaaggaatttaatgaaaaaaactctcaactttgtcctgatccatttttaaaccctaaactatgtttttagtaaaacaaatcctaaactaaaacctgttaataaacttaacttcacagtaattaaatattaatgagatattaattttttaaaaagaaaacaatgagacatttgtatttagcgcaaaaaccacgtgatgttctttaaaactgttttgaatttattacaaaaaaacattctaaataattttgaattgcttaattagtttggattttaaaagctgaaagaaagacacaataacttaaaataatccaaagagtcatgcttaaataaatccaaccaacataactatcgaagctgttgcaacacaacaatatttgtcacaaaaaaaaaacaatcgtttcagatggacaagatattctaaagtaaagacttgtcaagcattaactttgaagagaagattgtattggctgagtgatagggttctcttcatccattgttttctgttttttccttggtcgtccttgaggtttcttgggtggttttggcattgctttacacttgcatgaacgtttgttgtgtccgacttgttgacaattgctgcaagtctaaatatgcaaagattaaatttaataatttgaaaatgaagatcttgtgaaacataattcattgttctctattttaccatttaaactttttcacgtgtataaagaactttttgaggtggacgatcttcagttggatcacggattctgtcattgttctttggtcgatttttggaaattaatatcccattaatatttaattactatggggttaagtttattaacaggttttagttcagagtttgttttactaaaaacatagttcagaatttaaaaatagatctgaccaaagctgacggtttttttcattaaattcccttaataaaatggttgcaaataagtttattgaccctagtaaatcagtaacggtttttcataatcaactttaaagtctttaagccattttctttcgtttagtcaatgccctatcattgaatattatctttgttttctttttcattattgtaattttcttttatgtatagtagtccaataattttttaatattcagccattgtttagtttccacatgaaacacacaatttgtttataatcttgtttttctttcccctttacatagaacttcttatgatgatttttatgagtttgtgaaattgcataccttgcacattcgtagacctagtcagaatttttgttgttgttgtagtatctttattgtaaaaagaaatggttttcttaatgtaactatcgatcaaaactgatgcaattaccatacatgaaattggaatgagtgtaagaagaatataaagttgaaataaatcaaaaatgtgaaactgaatcaatatcatatgaagttgaatcatgtatactagaagcctagaacacaagaaacaacccaccattaatgaataatgagtaagagttcacagtcccaaaataattgaagttacaaattcgaacacaaaaaatcaaacctaaacatttttccaattggttgagtaagtgaaaaaaaactacgtagtaagaaattctttttttgagtttgtgccaaacattgaacattaacgtataaggagaaaactaatgggatacaagctaaaacagttatagtcttattaattagtatgttaaatactagattaaagttaaaatgaagttggaaaagctcgaagtttcaaccaattaatgcgaaatgatcgactcttcaagtaatattaatagtttagcaaaataaatgactgaaaaatctttattatgggttgtggctgcaagcatgagcttagctttttgtactcagggccggctttacatcaaagatcatgcatagattcattcaactaaacattcaccatggataatgaattgaaatctataaacataatcaagcaaatatcttatactatacttatctgtttaaaatgactttgagtctttgactaataaaatattattggtacgtgtgaagcgtgcgagggattcaaatgttaaacgttatagcaaagaggcgcctttatttaccagatctaaaatcgaaaaggggctttagggtttataagacccaaacaaaaaacattcatcagtctcaattcaaaatcctccatca

SEQ ID NO: 12544 - DNA, 3000 bp, Unknown
  misc_feature (1)..( 3000): cDNA_ID_1808299_gDNA_ID_2214558_Annot_ID_134833 3000 nt of promoter + ATG
gactcctgtttcccactatgaaaagatgcactggaagtgtcgatggattatggcccgtaggttttcgttactatagattctttactttttgtgtactgatcagcacattaatattctctagttataataacaaaaatgtagagggaaaccaagagagaaagattcgagaaatgttttatttttattttttgacatcgattcgagaaatgtttaacccgggaattgataaaataaaatagaggagagtgttagtataagattttaaaacttgggttatcaattaagaaaaagaaaatacaattgccaaactatatactaagttgctaacagtatagtttctgtaaaattcatgaaaatatagagcatacgaactagagttagtgtcaaatttatattattcatgagaccataagctattttgtagggccaatattggccagaacaggaatcaaaaacaaggtttcaatataatattttgttggagtctaggtgaatgaaaaccggccgttattataatatttgattatagaaaggaatcaatccattaatttgcatgaatacataaaaaaaaatggacctaaattgaagagaagatatcttatagtaatagactgaaagtgatatctctctagtggaaaacaagaagatgagagaccattcttttcatttgagaaccacattctctctctctttctacatttgtataaataaacccaaagacctcttctcatttgtcccacattcaaacatcatcaacttatcgatcttctccaacaagaatcatcaaagcccaaagaaacacaacagagaataaaaaaagaaatgacaaaagttcacccaaaattcccaagcacatgcgaagagagcttgtgtgatagcaaagcagcagttgttttaacggtgtggaagaagtcccttctcttcaactgcgacggattcacggtttacaacgccaatggagagcttgtctttagagttgacaactacatgaattgtcctagagacaacatcgtccttatggatgcttccggctttcccctcctctccattcgccgcaaggtactttttcttcttcttcttttttggtatttttcataacaaaaacatctatatatagtgatagacctatacgtgattccttaataattggccaaaaaataacactaatagttatgaaactaatcttaagttctcttgcttgctaattgacttgaacagaagttgagtcttggagattgctggatggtatacgatggagaaacagagagagatccaatattcacggcgagaaagaacgttagcataatatctaaccggaaaagcttggcgtgggttagcgcaaagaagacggtgttgtacgagatagaaggatcttacggtcaaagaagctgcaaaatattggatgagaggaggaacaagaagaaaacggcggagatcaagaggaaagaaacggtgatcggaggagttgcctttggcaaagatgtctataagcttatcgttgaatcggagatggaacctcgtgtggccatggcacttaccatcatcctcgaccaaatgtttcgatcttcttgattttcatttttttaaggtttatttttaacgtgtatattagttcctttttgtttatgtaatttatgcaatgtgttccttcctaaatgtacacatgaatagagaactttttttttcgtattgattttggcctttgatgatactacaaagatgcaatcaatttatcgatggatatttttagagacgattcaacgatgacggcttggtagagatgctgatgattaggccgcgggctatatttaataactgtcggtcatgaaagtttgatgtcaagttaacaagaaaaataaatgtctaattttgttactgttttattgccttttttttttttttactaaacgtttcattgcaaattgtctaatatatttgctaaaataagagtttgtttctaaaatttatcgtgaactaggaaatcaatatcaaaatttatgtcgaatgatatagattccacacttcacacgaattctctctagttcttgacttggatctaaataatggaattgccaaatcacgatttagtttcaaaagcatatttgagattttgcacctaaacacacataatctggttttgcattacgtgggaagcccaaaatcaatattttgggttgaaattttgatctgacaatcgaaaattaacaccaaaaatattcttgcaatcttttataacaaaacattaaagtcaatattttgatgttaaaatggattatttagaatacagtgtaaaaaatactaaatcgcataataagtttttttttttgtttgaaaataacctaattgtgtaataaaattttgacttaaagatttaaaactaaaatttagttttaaaattttagttcaaactaaaaattagcgctaaaatgttatttggcaaaaaaattacaaaattggggtttggcggtaaattgcgaattatgatttgataccaaatttattagttgaaatttgatggctaaaattgcaaaattacatagtcatacctttttgtttgcatcttaattatgatttcataccaaatccgtaaaacagcgtaactatagttttttcaatggttgttgtccaaatcgttgcttatttatttggctttcttggttgtattagatcagtgaattaacctatcaaaaaggcttaacacctgggcttcagacactttgtttctgttttggtcaacaatgcttctgtcttcagccacttagccgataaaaaaaaaaaaaaaaaaatgttacagattcagaaaaaatatcataagcctaactttcttatgatgatatttccggtttatgcttaagaaattctgcttgatactgaaatttcgtaattagccccattggtagcctttgctgctgcaacagttgcagtctcttcttcagtgttacggattcttattcttcagccctaaaaatcatcactttggaatcagaagcttgaatgatg

SEQ ID NO: 12545 - DNA, 450 bp, Unknown
  misc_feature (1)..( 450): cDNA_ID_3025650_gDNA_ID_2214558_Annot_ID_185819 3000 nt of promoter + ATG
aatactaatttaaaagaatgtaaagttttatgttatccgattgcataaatttggttttagtttggtttatttggtacaaattactgtttaatgttttttaatcataagaaattcagttttggttcgattcggtttacttggcttttgctcaccattatttatttatattaattttactcttaagattatttctagttccagtccagactaaaatacttctagcccaatatcggcccaagtccagctgtaattaaactagcatcactcgggtcgggtcgagtcggtcgtaaccgccttttatctttgacgtcgtcgatgaaactctcacctccgcttaagccctaaaaatcttactcttcttcactctaaatcccttctctgaacctcttcgtttgctgtatgtgttgatttcacttctctctgagcaagaagctttcgcgtgagagaatg

SEQ ID NO: 12546 - DNA, 3000 bp, Unknown
  misc_feature (1)..( 3000): cDNA_ID_1808620_gDNA_ID_2214558_Annot_ID_185818 3000 nt of promoter + ATG
gaactgacattgaagcgggagaactcaagcttgaggtgtctgacgaagtgatcatgacatttctcaaaagctctttcctcatcttcaacaaagaaacttttgcttgctttcctaaacaattttctatgttccttttgcgatttccccagtgtgcttatcaatgcattctcatcaactcccattcccatccctataaacaacaaacatacattttttagattttcaatctcaaatccaaatcattctttgtatcttccaagaaccataataaaatcaagaattaaatattacaattaccagctgagatggcttcagtgaggctttcgagctcgagaggaagagccattttcttgcagttgatcttttattactgtttttgatttccggctcttggtttggtttctgtggaaatctatggaagagggacaagacgttttatatgatgattaagggtaatgttgtggtttatgggagaagagaagggtgttttaggtattcaatacaagatttaagacaaatgctaggggcattgttgtaacaaggagtaacgcccacgcaattaattgcatatgttaacaactgttttacgcaaacggaatttacatacttcagtaagttcaagacaaattaacacttactgtttttctttgtcttaagtggaatttattaagtttgaccactataaaagttgtacttaagtgtcatcattcatatctataatccaaaacggaggttcttgaacacagataagaagaagagtttattttcttttacagttttcgaaaagtaggaaaattacaacaagaagtagagtctgacaaatgaaagtttctttagtataaaataaaatagtaaagaattatgtaaaagaaacagtaaagaatattatactttctaaagaaaattaagaaagtgaaaaagttatttggagaaattacgttttcagaatataggttctcaaaattagatgcaaagaacataaaccaaagtgattcaagtgatggtttaggatatgatcatatatcaaaattaagatccatgtgtcgaatagctcaaatctgaatttgtcaatattaaaggcaactaatctcactgaatcttaaaacatatataaagataatatctacgaaatagatagtctttggtgccaagaacaaggttttttttttgttactgcgaaacacacatggacctattacagaaaaataatggtttgaatatcatgggcaaaggagacagcttatctcttcttctctgttttttttcttctcattatgtccagactgtcccatttcataaattatgcacacaattgtagtagatggcaagcctcaatcacatttgtttcgcattattgtgacttgtgagactaataattaagcttctataatatatatatatatatatatatatatatattcaacaagtactatcacatgtttttttatagattatatattgctgaatatctatctgaatctgacaatgagatttgagaagattgtacaaccactacatgtgtcgcttaaccaaaatataatttggtcaaccaattaagacccgatttatatagtatatgagaattagtataagcgatttatacatcaaaacgtgttttgcacaacttccgctgaagctgtttaattagcatgttcctcatatatagttcaattttccacagctcaaatgccgccagcatataacccttacgtcaaatttcctcatattttattgtgtgtcataagacttgcgtatatccaattatccatacatgacacgatcgatactgaagaatataatttgaatattaatcacgagataactcactcattaaaattttaaaaagtttacaagattacgagatactcacttattggcattaagaaagtgtgaatcattaatcaacttacgtgtagattccagtactttcgcgccagggtcgattcacatttgtttacattagagtgatcagtttttaatctactacacacgaattttccatcgaaggatcaaaaaattctagagtatgattattttaaaaaagaaaagatcacgttttacacgacgagaggactagcaataatttggatcgaggacagctgtgttgagccgtatcatttgcaaatcgcaatctatttatttatttgatttgatttggttatacttagacttcactcataagatcatcccatcatgttcctaatcttaaatggtatttctatttcgcacatgtcacaacttagacagttgactaaatcataactttatatttaggttttaagtattaaaaatatatcaaattatattataagttttgtaatctctttttgttagtttagcctaccaaaaaaaaaagaaatctctttttgttagttcttcttgtcttttcgtaatcaactactatataacctatatatttatttatataaagacattgttaacttcgtcatcaaaaccatttatttatttgtccatttatttgctaccttagtttatttttagtactatatgaaatatcatacattttattttatcttaaattaaatacggtacaagttaaattcctcattaaaaccattgtacgttgtttttagtcctgttgtaatatcatttatttcattgcaagtttgcaaccttacaaaaagtaaaaatatgaaaaggttattttgtgttaattggaaattattacatagtatgtaggatatgaaaataggttaggagaaaagatgctccatagaactcatcaatacacacaactaatatatgaccctaattttaaatgtcctcaaaacgaaaaatctcgacagaaataggctaattgcgtcatattacagtttcgtcttcgggggcatttatgtcaaacaccatccccagctacataattacacctcctaagtaaataactccgccttgaggaaaaaaaactaaaacggctctaaattgaaaacaaaagaagagagagagagagagagacgaagaaacagagagattctctcgaaa

SEQ ID NO: 12547 - DNA, 3000 bp, Unknown
  misc_feature (1)..( 3000): cDNA_ID_1019319_gDNA_ID_2214558_Annot_ID_185817 3000 nt of promoter + ATG
cgtgattgagaaatgttagagaaataattaccatgaaatcaccagacagttcggaggatagaacatcgataagatctttgccataaatctctctaaaactttctctaatcttccttctctggctctggtctctttgccctaaaactcgtataatcgccttctcatctgttccccatcctacaagaatgagaaaactttcattcagagatttatgtcttaatgcatcgaatcacacaacaaatgcttgcggctatggatgtaacgtaccgcgaatagcttgtttgagagtttcagaatcctgagctggagaaggaacttcgtttggtactctaatggtggccattttcgagagaatctctctgtttcttcgtctctctctctctctctcttcttttgttttcaatttagagccgttttagttttttttcctcaaggcggagttatttacttaggaggtgtaattatgtagctggggatggtgtttgacataaatgcccccgaagacgaaactgtaatatgacgcaattagcctatttctgtcgagatttttcgttttgaggacatttaaaattagggtcatatattagttgtgtgtattgatgagttctatggagcatcttttctcctaacctattttcatatcctacatactatgtaataatttccaattaacacaaaataaccttttcatatttttactttttgtaaggttgcaaacttgcaatgaaataaatgatattacaacaggactaaaaacaacgtacaatggttttaatgaggaatttaacttgtaccgtatttaatttaagataaaataaaatgtatgatatttcatatagtactaaaaataaactaaggtagcaaataaatggacaaataaataaatggttttgatgacgaagttaacaatgtctttatataaataaatatataggttatatagtagttgattacgaaaagacaagaagaactaacaaaaagagatttcttttttttttggtaggctaaactaacaaaaagagattacaaaacttataatataatttgatatatttttaatacttaaaacctaaatataaagttatgatttagtcaactgtctaagttgtgacatgtgcgaaatagaaataccatttaagattaggaacatgatgggatgatcttatgagtgaagtctaagtataaccaaatcaaatcaaataaataaatagattgcgatttgcaaatgatacggctcaacacagctgtcctcgatccaaattattgctagtcctctcgtcgtgtaaaacgtgatcttttcttttttaaaataatcatactctagaattttttgatccttcgatggaaaattcgtgtgtagtagattaaaaactgatcactctaatgtaaacaaatgtgaatcgaccctggcgcgaaagtactggaatctacacgtaagttgattaatgattcacactttcttaatgccaataagtgagtatctcgtaatcttgtaaactttttaaaattttaatgagtgagttatctcgtgattaatattcaaattatattcttcagtatcgatcgtgtcatgtatggataattggatatacgcaagtcttatgacacacaataaaatatgaggaaatttgacgtaagggttatatgctggcggcatttgagctgtggaaaattgaactatatatgaggaacatgctaattaaacagcttcagcggaagttgtgcaaaacacgttttgatgtataaatcgcttatactaattctcatatactatataaatcgggtcttaattggttgaccaaattatattttggttaagcgacacatgtagtggttgtacaatcttctcaaatctcattgtcagattcagatagatattcagcaatatataatctataaaaaaacatgtgatagtacttgttgaatatatatatatatatatatatatatatattatagaagcttaattattagtctcacaagtcacaataatgcgaaacaaatgtgattgaggcttgccatctactacaattgtgtgcataatttatgaaatgggacagtctggacataatgagaagaaaaaaaacagagaagaagagataagctgtctcctttgcccatgatattcaaaccattatttttctgtaataggtccatgtgtgtttcgcagtaacaaaaaaaaaaccttgttcttggcaccaaagactatctatttcgtagatattatctttatatatgttttaagattcagtgagattagttgcctttaatattgacaaattcagatttgagctattcgacacatggatcttaattttgatatatgatcatatcctaaaccatcacttgaatcactttggtttatgttctttgcatctaattttgagaacctatattctgaaaacgtaatttctccaaataactttttcactttcttaattttctttagaaagtataatattctttactgtttcttttacataattctttactattttattttatactaaagaaactttcatttgtcagactctacttcttgttgtaattttcctacttttcgaaaactgtaaaagaaaataaactcttcttcttatctgtgttcaagaacctccgttttggattatagatatgaatgatgacacttaagtacaacttttatagtggtcaaacttaataaattccacttaagacaaagaaaaacagtaagtgttaatttgtcttgaacttactgaagtatgtaaattccgtttgcgtaaaacagttgttaacatatgcaattaattgcgtgggcgttactccttgttacaacaatgcccctagcatttgtcttaaatcttgtattgaatacctaaaacacccttctcttctcccataaaccacaacattacccttaatcatcatataaaacgtcttgtccctcttccatagatttccacagaaaccaaaccaagagccggaaatcaaaaacagtaataaaagatcaactgcaagaaaatg

SEQ ID NO: 12548 - DNA, 3000 bp, Unknown
  misc_feature (1)..( 3000): cDNA_ID_1012980_gDNA_ID_2214558_Annot_ID_185816 3000 nt of promoter + ATG
taattttctttagaaagtataatattctttactgtttcttttacataattctttactattttattttatactaaagaaactttcatttgtcagactctacttcttgttgtaattttcctacttttcgaaaactgtaaaagaaaataaactcttcttcttatctgtgttcaagaacctccgttttggattatagatatgaatgatgacacttaagtacaacttttatagtggtcaaacttaataaattccacttaagacaaagaaaaacagtaagtgttaatttgtcttgaacttactgaagtatgtaaattccgtttgcgtaaaacagttgttaacatatgcaattaattgcgtgggcgttactccttgttacaacaatgcccctagcatttgtcttaaatcttgtattgaatacctaaaacacccttctcttctcccataaaccacaacattacccttaatcatcatataaaacgtcttgtccctcttccatagatttccacagaaaccaaaccaagagccggaaatcaaaaacagtaataaaagatcaactgcaagaaaatggctcttcctctcgagctcgaaagcctcactgaagccatctcagctggtaattgtaatatttaattcttgattttattatggttcttggaagatacaaagaatgatttggatttgagattgaaaatctaaaaaatgtatgtttgttgtttatagggatgggaatgggagttgatgagaatgcattgataagcacactggggaaatcgcaaaaggaacatagaaaattgtttaggaaagcaagcaaaagtttctttgttgaagatgaggaaagagcttttgagaaatgtcatgatcacttcgtcagacacctcaagcttgagttctcccgcttcaatgtcagttcttttcttccattaatcttctttccatttttaacattttctaaatgtttttaccaaataaaaaatctttattttggggtcaaacctaataataaatggaaccattcttgtttttacctaataaaagtataaacccaaccatatgttacaatttaatacaaaaaactaaaacaattctaaaattgcttaatttggttaatgtaattaatacagaaactatataacaaaaataattattacagctggtttattttttctttatgaattagtatttataaaggatctcaaacatttctttaaaaataaaccaataatttactgctcaaaaaatcacagaagatgatacgatggaaatgatgaagtttttcattcataactaattggtcaatgagtagataaaattcacattctatttcaaaaatagttgacaatgagtgaaaaagtcacattctagtattgaaacgtatctccacttcagatatggaattttaagaacaatttggtgtgtgatgtgtagactgcggtggtgatgtgggcaatgcatccatgggagagagatgcaaggttggtgaagaaagctttgaagaaaggagaagaagcttacaacctcatcgttgaggtctcatgcacacgctctgctgaggatctcctcggtgcacgtaaagcttaccactctctcttcgaccaatcaatggaagaagacattgcctctcacgtccacggtcctcagcgcaaggtcaatatttttatatactctagtgtgttggtctctttcaaacttcttttatctcactcattgtctctgttttttgtgcagttgcttgtggggctcgtgagtgcttatagatacgaaggaaataaggtgaaggatgattctgccaaatccgatgctaagattctagccgaagcagtggcttcttcaggcgaagaagccgtggagaaggatgaggttgttaggattttgaccacaagaagcaaacttcatctccaacatctctacaaacactttaacgaaatcaaaggctctgatcttcttggggtaacataaatataacaacaactcacttcttgtatatactaatgttttgatattctctaatgaaaatcttgtggtttaatttggtcattagggtgtatctaagtcttctcttctcaatgaagcattgatttgtttgctcaaaccggctctgtatttcagcaaggtatatatgaaccatattcttcattgcggttgttttataacgccaatttctgcgtttgtgtttatgttttgtcgtgatttggttttagattttggatgcgtctctgaacaaagacgcagacaagactaccaagaaatggttgacaagagtgttcgttacaagagcagatcatagtgatgagatgaatgagatcaaagaagagtacaataacctttatggtgagactttggctcaaagaatccaagagaagataaaagggaactacagagatttcttgctcacacttctctccaaatccgattgatttcgtgttgagaaacctattaccaatacttttggttattgaagatttatgatttccctttttatggttttatgtttctaattcctaaatttgcgttttctctaccgtttggtaataaagacatgaaaatttgatgaactcggtgaatcgagagtaagagttttgcgattgtgacaatgagtgattaatacaaggattaagctccaataaaaaaatgttgcataaatcagaaatgaaacttgtaactcttcttttctttatgtgaaacttgtaactctatttgaaagattctatgtgaccactaaaccgaattacggattccaaccgaatttcacctctaactaaaccggttgaatgttgatgaattccggtttgaaatttcggcagtatgtgggtgacacgtggcgaagaatagtccccgaatcttcctctgacgaccatttgatacttttttttcttcagtttgttggttttgtcctcttaacaaaatattcttcaaactctctctgttgtttgtttgttgacaaatctctcaaaaccatttgttttgcaatcgcagatccgtttttcttcgggtctcatcacaatg

SEQ ID NO: 12549 - DNA, 3000 bp, Unknown
  misc_feature (1)..( 3000): cDNA_ID_2709126_gDNA_ID_2214558_Annot_ID_185815 3000 nt of promoter + ATG
aacaacaactcacttcttgtatatactaatgttttgatattctctaatgaaaatcttgtggtttaatttggtcattagggtgtatctaagtcttctcttctcaatgaagcattgatttgtttgctcaaaccggctctgtatttcagcaaggtatatatgaaccatattcttcattgcggttgttttataacgccaatttctgcgtttgtgtttatgttttgtcgtgatttggttttagattttggatgcgtctctgaacaaagacgcagacaagactaccaagaaatggttgacaagagtgttcgttacaagagcagatcatagtgatgagatgaatgagatcaaagaagagtacaataacctttatggtgagactttggctcaaagaatccaagagaagataaaagggaactacagagatttcttgctcacacttctctccaaatccgattgatttcgtgttgagaaacctattaccaatacttttggttattgaagatttatgatttccctttttatggttttatgtttctaattcctaaatttgcgttttctctaccgtttggtaataaagacatgaaaatttgatgaactcggtgaatcgagagtaagagttttgcgattgtgacaatgagtgattaatacaaggattaagctccaataaaaaaatgttgcataaatcagaaatgaaacttgtaactcttcttttctttatgtgaaacttgtaactctatttgaaagattctatgtgaccactaaaccgaattacggattccaaccgaatttcacctctaactaaaccggttgaatgttgatgaattccggtttgaaatttcggcagtatgtgggtgacacgtggcgaagaatagtccccgaatcttcctctgacgaccatttgatacttttttttcttcagtttgttggttttgtcctcttaacaaaatattcttcaaactctctctgttgtttgtttgttgacaaatctctcaaaaccatttgttttgcaatcgcagatccgtttttcttcgggtctcatcacaatgaatggcttctctgatcttaatccttctgagaggtacgctttgtctgatcatcaatgatgcttataataatctcatttatacatgatcttgcctctatatatttgttcatcttagtaatcttcggtctcagcttccattttcgtctcccactatgtttctaggattttgtgttacttttgttagaaaactgcgatttttgtgctagtgtttgtttctccaagatcaatggaactcgttgcctaaaattcctgattatagttacataaacatcaaatggttctaattggtctttgatcttaaacccatttgattatggtatctaaagtttgatccttttgatgcactctcatcgcagtttctcgtgattttaatattattgaactcttttgatttgtggtgaagcaaaccttctctgtcacaactagctccattagaagccattctgtttgatgttgatggaacactctgtgactcagatcccatccaccttattgccttccaagaactgcttcaagaggttccttgctttttttaatgtcattataacttccaaatttacaacaagactttagaaaactgtgaataatatgctatggaaccttgctattactcagtttcaagctctcgtgtcaatcaattttgtttctttctatcattcgcagattggttttaacaatggtgtcccaatcgatgagaaattctttgttgagaacattgctggaaaacacaattctgaaattgctctacttctgttccctgatgatgtttcaagagggttaaaattctgtgatgaaaaggaagctctttaccgcaagtaagctatttttctgtgtttcctccattcttttaatgtcacaaactcttttcaggtctgagttcatttggagtaactttgttttgttcttttttcttgatgattagaattgttgcagagaagataaagccacttgatgggcttataaaactgaccaaatggatcgaagatcgtggattgaaacgagctgcggtaacaaacgctccaaaagaaaacgcagagctcatgatatcgaaacttggtctgactgatttctttcaagcagtgattcttggctctgaatgtgaatttcccaaaccacaccctggaccttacttgaaggctcttgaagtgcttaacgtgtcaaaggagcacacgctagttttcgaagactcgatctctgggataaaagctggagttgcagctggaatgccagtgattggactgactacagggaatccagcaagcctgcttatgcaagcaaaacccgcttttctcatcgagaactatgcggatccaaaactgtgggctgtgttggaagaacttgataacaagtcttaagtctcacttgtttggcttatggaaacccacacatgcatgagcagcctctgaagtttaccttatgtcttagatgatcattgttgaataattcattgggagtttatgacaatgggagctttcaaatatctgattattttgtattgatacatgcacaatgctagatttgtatccaggagatagttgcataaaccaatatactataccctcggatcttagcttattttcattgatatcttgttgttttgtgctgtaaacatatcagcttttgaatacatttggtccatggcgcaaaataagactttttttttttttttaccataccttaattagcaaagtaacaaaattgttagttttgaaaaatactcttaattaaataaaggaaataaacacttgccgacagccaaaaaaaaaaggttatgaacaaattgaaagtattgttttcatcaaagcccaaatatgtaaagcccaaaaacggaaaacatctttatttcaacaatacatatattaaggcgtaggaaaaactaataagagaggaaaagagaagaaggagcaaaaaggttttgccgaagttgagagatcaatcaaagatttgaagttccgatg

SEQ ID NO: 12550 - DNA, 3000 bp, Unknown
  misc_feature (1)..( 3000): cDNA_ID_1028073_gDNA_ID_2214558_Annot_ID_185813 3000 nt of promoter + ATG
ctcggataatgtctaggctgaggcatccttttttcaaggcatcatcaggtagactagaaagtaagctgctgcaatggtcaaatcttctcctctcatccataggtgtttccattaggttccacagctcttgcatgcttcttcccaaaccttgtagctgaaataaaagaatcaagggatcaatccgtcaagctaaggtttgctttcttggagttgatgaattcatttccgtgagaaatagtgccaggttaaatagtaggctaccaataaaaactgcattttctaattgaatgctactgtgctcattgctcaagtgcagtggtaactggtaagacatgagaaaccacataatatatgtatatatacacttcagaagtgttatttttttatcaccttaagcagcctctcatgtttctccgccttcagagactttacaagttctgtgaacctagcaagagtatcattactaatgcttttcgaatgagtctttgaaaactcagtcaagctgctatggacactattcagggccttggagaaatcaaaagacagaatctctgacagctcatggacagcactgatataagagtttactttctgcagtcgaacagcctgaaattgaaataaagatgataagcaaataactacaaacattttaaaacaatcacttcgacgtgtgtgtgtgtgtaagaacaccttttcatttcgaagatcctgcagatctgctctaagttcatccaactttctttgtgtcaagtcactttcatcaacttctgaaccagaactaacagtataatcattccctgctatgttagacgtgatctctgctatttgattcagtgtctcagagagctctttccttcttcgatcctttttcatcagtagatcttccagtacaggctttacactggaaatctgctccttcaaagagccttctttcttctcaaacaaaaacaataacatatatcagacattatataatactctctatgagacaaacatgtagtattgctaagagtatcttaccttggcaaacgaaactttttcaccaagcgcagacatgaggctggcaatctcagcttcagcttgagctaatgatcgctgtaactcagctctgaacttacgagttttctcaaccttcttattgtatatatccagacattcctgctcaagttctagcagcatcttatctctttcattgtaactttcaccaatctcatcccatatcatctacatccgaataaaaccagtggtaaacatcaccagctcaagtttttcctcaattgacacagaacaagacattatcattagtagtatcctaatcctgatttcgattattgctcatactaaaaccatcccaagaaaaagtagagtacacgtctttcacaggaaaacctaaaactgtaagcaaatgtaacagcggaggcataactcaaaatggcctgaaatcgaatctaactgacagtgatcagaagcataaaccctataaaatcaaaattcgaaattcaattgcgttacccaacgaatcaatgaatcaccggaaactcaaaccaaaagagatagatgtaatcgcaatctcccgcagtcaaaatttcgaaacaatctggagaatgtgaagaagctacggagagaaaaaaaaaaaaaaaagaagaagcgaggaatctaagaacctgcaactcttcaagaagggaagtgcaagtagtggttgaagacggagacattttgttcacgccgccggcgagtagtgaaaatgacgttgctcagaaaccctagaaggcttatctggttacagcgtgaagatcccgagagatattgttttgaaggacgagagcaaatgtcgattttggaaagaatgtgtttttggcggtaaactataaaaaaaattagtatccctctcgaatttcgtgcccggggaagtccgaatgttttttttttttgccattttctttgttgaaattctagagaggttacaaaaataccaatattctagagaataatcaaacttgatttagtaaccaaaaaaaaatgtatctatttatgttgaataaataaaaattcttatttaaaattttcctttgctttgcatttgactatatgtaaaaattgttattattattttatatttggttgtatattgcattttattttttatgtaaagtaaaccgtctaaacaaaattagacgattactaacctagtttttaggaaagataaattatctttttaacaaatactataaccatatatgttttgataaatatgtttatatcttgtctttttttttcggtaagaccaaaattcttgtcttataaaattagtttatatcgaataatttaatttttctattatgtagtaatgacaaaataagttaaatagattatatattgaatcgataacttttaatcttttttacttttgaaaaaaaaaaatcttttgtgaatctagctagggcgacgtatatatatggagaaaaacaaaaactagctgcggccgtaactaagctcaaatagtttagttaacaagtctttgagaaaaagacacaccaaccaaaaaaattgtcactatactcaaaatcaaacaacaaagctttctaattaaacaaaacgtagacacttcatcttcctctctctcctgcgcttttctttactcaggttttctccgctctcttcttcatactcagaattgattccttatctcttttggtttcaattcttcttacagatcgatccataaccttttagattccatagcttttaattgatttccctcatacaaaacagatcaatttcatcgtcgaccatcacttttaaattttcaattttttaatactgctattgctaatttgtgcaatttggtatttgatttgtgagttgcttttgatagttagctctgggtagtgtttaaaaattggtatctttaagcataataagattttggttatttcaggttcacattacttgctgatttggatttttttcatctgcggttttctcttccaagcaacaatg

SEQ ID NO: 12551 - DNA, 3000 bp, Unknown
  misc_feature (1)..( 3000): cDNA_ID_1017185_gDNA_ID_2214558_Annot_ID_185812 3000 nt of promoter + ATG
tttctcttccaagcaacaatggtgtcggcgaacagagaaatggctgtttactgtttcgacactttggtctctcactacaacaatgaagagactccaccacctgcctttgaagaggccaatcagtaagtttttttccttgcttgtgttatgacatgcaagtttgaatctttctcaaagtatgcatttttttgtaattctctttgtttggaatttggatagagtactattgaacggacgatctgttcttaaatacaaaatcaaattctttttatggtcccaagttgttcttgatactgttatgagtagtcactttgagtatgtgaaactgtctgtgatgaggatattctttcacaatctaatattcagagactgtgatcagcagatccttgcaaacattgcatgccttatcgttgtgatgctagaaactaaccattttttgttttctgggtattttgtgttgaatgtttatggatgggtgatataatctgaagcgcatactttttgtgtccattcttactgatggtccagtctttttgctttttgtgtagtccattgtttgttacctggaagaaaatagtgaatggtggagagcctcggttgcgtggatgtattggtacactggaagcacgccgcttgatcagtggcttcaaggattatgccttgacaaggtacgtactcgtcctcattcagttttttttttctgattctcatattattttcttggccatattcatgatgtgcttttcgtctgctttgcttttttttcatggttgaaattgttctgcctcaactttgcttatcatatatctgtgttcttaagtcttagatagtatctcttaacaactttgttgaatttttcttttgtctgtctgctttacttctcttctttctcatttttctcttgttgtaatgtacttgtgttgcttgatactaagagcggtttaagatagactacaaattgataaccataaggtgacaaacaacaaactaatggataagtacacatgtacagatatacttttacatatgtaaataggcagttctttgtctaatttatcaaacagacataaatggcattcccctattgttttgagctaacagatttcatatcaagtatcaaaattttcagctgtttttgtactgtgtttggtgtgtaatttatatttttgttgcaacccatctgctgcagttgattaaaattttttgctgtatctttttcgaaactttgtgtatatcgatagcatgaatagcaatagtattacagtgaaagctaatcaggcttcaacctctgtaaaggaactgagtaattcagttttagagattttaggcttgacaccacaaatgaagcacatatatgtaggtgtttattgtgcagagagagcctctattcattagcatttcccatagcttatctgccttttatgtcatgtggttggtcgtaaatgcttgtgatatctttcttttgttgtcagttttaaacgacattagttttcttatataatattgcagtgccttgagggatcgcaggttcccacctatacaggccaaagaattgccatctctgcagtgtacggtgtctgtcttgactgattatgaagatgcagaagattaccttgattgggaggtatattctcttcactcttttcttacaatatgtcaatctcacgaattaagaatatagttgccaagaaggaatgcatactattcaatgtacacagccaataaactttccgttgtcctttccctcatatcattttcccgcttagttaactgctctgccttgctcatgacattgtagtttgtcgaattcttcttgtttgtagtttgtcttatacattgtcccgttggtgatattttgttttgtgatttcactctaaaggttggtaagcatggtataatcattgagtttactgaacctgagactaatacaaagcgaagcgccacatatttgcctgaggtgccagctcatgaaggtaccatttcaatacaataattcaagtacgtgttgttgctattggtattgttgatacaacgattactttttttatccccaggctggacaaagatagaggcaatcgattcgctggtgcgtaaagcaggatacaatggtgtaataacagaagcagtgcgtaggcgaatcaatctaacgcgttaccagagtacattattcagcatgcattatagcgaatacctttcatatgtgaaggcgaccaggggcgttgttggcccggttattaatgggatcaacaagcacgcctttgcctgatttgcacctgcaaatggatgccattgattatgtttggctacctcctaatttatcctctgtcttgttgtctggctctcataaaagaaacgagacttcgaacttggctgtttcactattgtaacattaattaaatcactttcatcccttctctctttgttcctcacttcctcttaattagactcgatgttaaaatcgtatcaggtaaacttgaacttagtgttgacaatgtccaaattgaccaaccgtttatcaacctcatactacagtaacaccaagtcaactgtttttgttaaaagtcaactcaaagttggaggttacttatggttaatttaagagtacacgcttatttcgtaagaatattttaaaagttggaggttatttatggttaatttaagagtacacgcttatttcgtaagaatattttaaaagttggaggttatttatggttaatttaagagtacacgcttatttcgtaagaatatttaaaagttgggggtgtttattttgattttttcgcatattaaaaaattaagaatcatgaatcgcttacgcatgtgcagtttggacgcaactgaatcgtaccaatgagatcatcctccttattttaatctcccacctgatttgagctgtttctttctctttcgaactctccgtcacttccatttcatttctatttgaatcttctcaaagctacacagatctctgaaatcgaaaaagcttgagctgtgttaatg

SEQ ID NO: 12552 - DNA, 3000 bp, Unknown
  misc_feature (1)..( 3000): cDNA_ID_1025340_gDNA_ID_2214558_Annot_ID_185808 3000 nt of promoter + ATG
ccggtatgcctagcgatatttttcaacgccattgacgacgctttatataccactggtaaatctctcctctgttttttcctattttccgatttcttctttgttaagaattctatgtatgatgaatttagctgagtgaagaagatgaattttagctgagtgaaagcttatgatagtctggtgaaatctttaatccatttaggttcaatctggtgcaagtttgtttttactgtattatgcgcctctttatttgtttgtgtggatgtaatgaagagtatggagctaaaaggatcaaattatggttttattctagcttaggctgacctgtctaaggttctcttgtctggtctgtacttttacattgacttttttcttgtgcttgatttgaatcagtgactgttcttttagttttgagtatgttaatgatcgcgaggaaagctttggcctcggcgcatactaaggcgtttcgtttggcaacaagggatgtacattgctttagttccatcttagtgtctcctcctctcgtgtcacttgacttgcctgaaaattggattccttactctgatcctccacctcctgtttcctttggtaatactctttgttgcattttcatggctatatatatatgttacaagaaaattctctaattgtatgagttgatttctgtgtgtatgcatttatacagagactgaacagaagactgtggtgatagatggtaatgttatcgctgaggaaatcagaacaaagattattagtgaagtggggaagatgaaaaaggctgttggaaaagtccctggtcttgctgttgttttggttggtgaacaaagagactcgcaaacttatgttcgcaacaaaattaaagcttgtgaagaaactggcattaaatctgttttggctgaattaccagaggattgtactgaaggacagattatcagtgtattgagaaaattcaatgaagacacgtctattcacggaattcttgtgcaacttcctttaccccaagtatgtttctcatttttttctttggacgttgtgatgggggatgttagtgttgttgatgtcaaagattagttctatgttaggaggtcaagtagttacgtttactttgttttcatacttgtatgtagaaattcttgattcatatattttcatcgaccatggactcatgcataacattttcccctttaaggtttccttttcgttggtaggtaaagcatttaatttacaggttatgcgatagagcatcttacttgtggagctctttttcaggagaacgttcttgtattttgttggtttcctttcctttttttttttttttctcatgagtccaatcatttaatggaagatatcttgtacagcatcttaatgaatcaaaaatcttgaatatggtgagattggagaaagatgttgatgggtttcatccattaaacgtggggaatcttgcaatgagagggagggaaccgctgtttgtatcttgcactcctaagggctgtgtggagttgttgataagaacgggtgttgaaatagcaggaaaaaatgctgtggtcataggcagaagcaacatcgttggactaccaatgtctttattattgcaggtattagttcttctttatagttcaagtggattcttatgcttaaacattttggtttgggaattaactatgcatttatgttttctgaaattctcggatagaggcatgacgcgacagtaagcacggtgcatgcgtttacaaaggatccagagcacattactaggaaggcggatatcgttatagcagcagcgggtatacctaatttagttcgtggaagttggcttaagcctggagcagttgtcattgatgttggaacaactccagtcgaggtaaaaacgaaactattttccttaactgatcaaaagtcttaatactttccaatgaaaaaagacttataccatagcttgaatccaatctgatatagaaaacgttaaactgaattagagcttgaaatgtttttccttcagattgttttcttgtttctgattagacattgaagcatgacgtgttataatattgcaggatagtagctgtgagtttggttaccgtcttgtcggggatgtatgttacgaggaagcgttaggtgttgcctcggctatcactcccgtaccgggaggagttggacctatgacgatcaccatgctactatgcaatactttggaggctgctaagcggatcttcctctgagtatggtatctctgtctattactaaatatattttgtaatgttagataggagactccatgctgttcgagttattaacgatctcttttgaattattgtataatagacctggcgattgtgatgccatggtttatcctaactcatcagcatctttagcatcaagttcaactaaacaagtattcatgttttcgtttcattggcttttagaagatgagaatccatttagttataatttaaaacttaaggtagttagatcactggtcctactagcagctaaagtaggaggaatgttgcgtcttacatcaacgatagaagatgactcaagcaagaggtgtcacatgaaggatcacgaaatatttgcttcctacgatattttacacgtcttctcaaagtttctcacctttacattgtttgctttggttcggtttagattctctcttttgctgcttttatcacttttgtaaaactcgaaaccggttttggttcggtttagattctctcttttgctgctttgatcacttttgtaaaactcgaaaccggtttttgattctttttttccttcgaaacttaaatgatatctttaaaccaaaacgaaccaaactaaatcacacaattacgatccggtttgaagatattttgttgtccgtaggattctgattccgagtctctagttccaaagagaagagaacatctgtgagagatctgagacgtctggaaatgtgaagaaaacaaaaaaaaaaaagatctgagagagagagtttcgaaattctcgtgttcgtaagcaaaa

SEQ ID NO: 12553 - DNA, 3000 bp, Unknown
  misc_feature (1)..( 3000): cDNA_ID_2709152_gDNA_ID_2214558_Annot_ID_185804 3000 nt of promoter + ATG
tattaactagtttgcacagtacatttatccatggtgttgaagcttcttctcagaaagcaaaaacaatcaggtcttatgaaggatttctctcagacagtgtgtctgttgcaatagcggaggaggccctttcctcggtaggttaaagtttcgcatccttgctcatgcgaaactaaatagtaaatagtaaagaaactttgaccatacaatgtgtctgtagcaacattacagcaggaagctacactaaatagtaaagaaagtttcgcatccttgcacatgttaaatgattcaagcagaaacattgttataaaaaaaacacaagctgcacaaaaaccaatccacacttcacaaatccaaacgcaccaaataactttgtcgacaactatggtctcaatagtttaaagcacagaggtaaatggatccatcgcaacctttacagtccttgtactttaattttgagctgatagtttttcccctaattgaggtaacgtacaaatcaagaaagacattgattactatgtaaataaagtgcagtgtaggtataatgttatatccgtatagagataatacatataagtaaagagcatgcatgtggtataaagaaagaagaaagagacctcaagcaaaattgtaacgatgaagtcccatcttagcataaagcttgactaagtggtaaggattaggagggagataaagacagttaaccttgaccattttataaccaccgcatacacgtccatatgaccatatacaaacatactttcatcgtcgtcggatgatgacgatacagaccaaaacaaatcccaatcacaatcatggttagacatataattaacaagaagatgagagaaagaatatcgattggttttgagaaatatacgatattcggatattcccatgatcaaattttcaatatcgatcggtttgaaatctggtcgatctcaacatatatgacaacaaaatttgttgtcaacccttcattcatttgtagtaatgtatattcatcgaatggaatcaaatgtctcatagtcatattttaaaaaggatctacttagaaaacttcattcacatactgtacttacccatttagtgatgacgtacgaggtaagatgcaaattgttttctcaacacaaaaacactaaagcaaagttgaggaataagttggtgtatagagtgaggaatcagatttggtaggaagacagaattattaggttgtattacatctgtataattaaagagaaagagagagaacatattcttcaaagtgcaacgcgtaattttcaatccatttgtttttgtgaaagtgggacgtctcttacctctcaaaggtcgtaatcagctttttgtacatatgacgcagaaaccgcaatcttttgttttaaaaacaaacgatagataatgaaagaaatttaaaataaatgaggtcaacgtaagtggaatactcatgataacaatggacgtggaaaaatatcaatagtaaaataatttcagaacttttaattgtataaaatttagtggaattttgttgggatggttttatttttcttcccaccgctaattgcttctccgccacacacctccttatgtttaatcatttattatcatgaatcatgatatagtggtcctccttcatcatatcaaaattaaaaaccaaagattggttcaaaactcaattttttcttaactcggttatatttttttgtatatattttaacttttgcaatccactcgttcttatcttccactagattatcttttcctcgactcaatgttcatggtaataaattattcaaaacttgattgtcttttaaaataaattaaatcggatgtttgatatataattggactaataaggagctcatgaccaaaaatattggaattcggacacctgcgagaaactgatccacaaagtgatctttaaactttctttctttttggttttaatagaaatccttaaacttcatatcaccaatatattgattatcttagagagtagatcatatatttctttctttctttttatttcggtttaaatcatatattactttcggttcggacacatgtagtctgttgttgaaaggaacaaatcaaatactttcggttcaatatggagaggaaacaaaaacgataatcctgcagaaatagaaatataagaacatggaaaatatttcaaatagagactcctgtttcccactatgaaaagatgcactggaagtgtcgatggattatggcccgtaggttttcgttactatagattctttactttttgtgtactgatcagcacattaatattctctagttataataacaaaaatgtagagggaaaccaagagagaaagattcgagaaatgttttatttttattttttgacatcgattcgagaaatgtttaacccgggaattgataaaataaaatagaggagagtgttagtataagattttaaaacttgggttatcaattaagaaaaagaaaatacaattgccaaactatatactaagttgctaacagtatagtttctgtaaaattcatgaaaatatagagcatacgaactagagttagtgtcaaatttatattattcatgagaccataagctattttgtagggccaatattggccagaacaggaatcaaaaacaaggtttcaatataatattttgttggagtctaggtgaatgaaaaccggccgttattataatatttgattatagaaaggaatcaatccattaatttgcatgaatacataaaaaaaaatggacctaaattgaagagaagatatcttatagtaatagactgaaagtgatatctctctagtggaaaacaagaagatgagagaccattcttttcatttgagaaccacattctctctctctttctacatttgtataaataaacccaaagacctcttctcatttgtcccacattcaaacatcatcaacttatcgatcttctccaacaagaatcatcaaagcccaaagaaacacaacagagaataaaaaaagaaatg

SEQ ID NO: 12554 - DNA, 3000 bp, Unknown; identical to SEQ ID NO: 12544
  misc_feature (1)..( 3000): cDNA_ID_1808299_gDNA_ID_2214558_Annot_ID_185803 3000 nt of promoter + ATG

SEQ ID NO: 12555 - DNA, 3000 bp, Unknown; identical to SEQ ID NO: 12543
  misc_feature (1)..( 3000): cDNA_ID_1807782_gDNA_ID_2214558_Annot_ID_185802 3000 nt of promoter + ATG

SEQ ID NO: 12556 - DNA, 3000 bp, Unknown; identical to SEQ ID NO: 12542
  misc_feature (1)..( 3000): cDNA_ID_1807259_gDNA_ID_2214558_Annot_ID_185801 3000 nt of promoter + ATG

SEQ ID NO: 12557 - DNA, 3000 bp, Unknown; identical to SEQ ID NO: 12541
  misc_feature (1)..( 3000): cDNA_ID_2709148_gDNA_ID_2214558_Annot_ID_185800 3000 nt of promoter + ATG

SEQ ID NO: 12558 - DNA, 3000 bp, Unknown; identical to SEQ ID NO: 12538
  misc_feature (1)..( 3000): cDNA_ID_1985638_gDNA_ID_2214558_Annot_ID_185796 3000 nt of promoter + ATG

SEQ ID NO: 12559 - DNA, 3000 bp, Unknown; identical to SEQ ID NO: 12537
  misc_feature (1)..( 3000): cDNA_ID_1375747_gDNA_ID_2214558_Annot_ID_185794 3000 nt of promoter + ATG

SEQ ID NO: 12560 - DNA, 3000 bp, Unknown; identical to SEQ ID NO: 12536
  misc_feature (1)..( 3000): cDNA_ID_3025683_gDNA_ID_2214558_Annot_ID_185793 3000 nt of promoter + ATG

SEQ ID NO: 12561 - DNA, 1369 bp, Unknown; identical to SEQ ID NO: 12535
  misc_feature (1)..( 1369): cDNA_ID_1833587_gDNA_ID_2214558_Annot_ID_185786 3000 nt of promoter + ATG

SEQ ID NO: 12562 - DNA, 3000 bp, Unknown; identical to SEQ ID NO: 12553
  misc_feature (1)..( 3000): cDNA_ID_2709152_gDNA_ID_2214558_Annot_ID_134834 3000 nt of promoter + ATG

SEQ ID NO: 12563 - DNA, 3000 bp, Unknown
  misc_feature (1)..( 3000): cDNA_ID_2709156_gDNA_ID_2214558_Annot_ID_134835 3000 nt of promoter + ATG
cttgcttgagtcatcttctatcgttgatgtaagacgcaacattcctcctactttagctgctagtaggaccagtgatctaactaccttaagttttaaattataactaaatggattctcatcttctaaaagccaatgaaacgaaaacatgaatacttgtttagttgaacttgatgctaaagatgctgatgagttaggataaaccatggcatcacaatcgccaggtctattatacaataattcaaaagagatcgttaataactcgaacagcatggagtctcctatctaacattacaaaatatatttagtaatagacagagataccatactcagaggaagatccgcttagcagcctccaaagtattgcatagtagcatggtgatcgtcataggtccaactcctcccggtacgggagtgatagccgaggcaacacctaacgcttcctcgtaacatacatccccgacaagacggtaaccaaactcacagctactatcctgcaatattataacacgtcatgcttcaatgtctaatcagaaacaagaaaacaatctgaaggaaaaacatttcaagctctaattcagtttaacgttttctatatcagattggattcaagctatggtataagtcttttttcattggaaagtattaagacttttgatcagttaaggaaaatagtttcgtttttacctcgactggagttgttccaacatcaatgacaactgctccaggcttaagccaacttccacgaactaaattaggtatacccgctgctgctataacgatatccgccttcctagtaatgtgctctggatcctttgtaaacgcatgcaccgtgcttactgtcgcgtcatgcctctatccgagaatttcagaaaacataaatgcatagttaattcccaaaccaaaatgtttaagcataagaatccacttgaactataaagaagaactaatacctgcaataataaagacattggtagtccaacgatgttgcttctgcctatgaccacagcattttttcctgctatttcaacacccgttcttatcaacaactccacacagcccttaggagtgcaagatacaaacagcggttccctccctctcattgcaagattccccacgtttaatggatgaaacccatcaacatctttctccaatctcaccatattcaagatttttgattcattaagatgctgtacaagatatcttccattaaatgattggactcatgagaaaaaaaaaaaaaaaggaaaggaaaccaacaaaatacaagaacgttctcctgaaaaagagctccacaagtaagatgctctatcgcataacctgtaaattaaatgctttacctaccaacgaaaaggaaaccttaaaggggaaaatgttatgcatgagtccatggtcgatgaaaatatatgaatcaagaatttctacatacaagtatgaaaacaaagtaaacgtaactacttgacctcctaacatagaactaatctttgacatcaacaacactaacatcccccatcacaacgtccaaagaaaaaaatgagaaacatacttggggtaaaggaagttgcacaagaattccgtgaatagacgtgtcttcattgaattttctcaatacactgataatctgtccttcagtacaatcctctggtaattcagccaaaacagatttaatgccagtttcttcacaagctttaattttgttgcgaacataagtttgcgagtctctttgttcaccaaccaaaacaacagcaagaccagggacttttccaacagcctttttcatcttccccacttcactaataatctttgttctgatttcctcagcgataacattaccatctatcaccacagtcttctgttcagtctctgtataaatgcatacacacagaaatcaactcatacaattagagaattttcttgtaacatatatatatagccatgaaaatgcaacaaagagtattaccaaaggaaacaggaggtggaggatcagagtaaggaatccaattttcaggcaagtcaagtgacacgagaggaggagacactaagatggaactaaagcaatgtacatcccttgttgccaaacgaaacgccttagtatgcgccgaggccaaagctttcctcgcgatcattaacatactcaaaactaaaagaacagtcactgattcaaatcaagcacaagaaaaaagtcaatgtaaaagtacagaccagacaagagaaccttagacaggtcagcctaagctagaataaaaccataatttgatccttttagctccatactcttcattacatccacacaaacaaataaagaggcgcataatacagtaaaaacaaacttgcaccagattgaacctaaatggattaaagatttcaccagactatcataagctttcactcagctaaaattcatcttcttcactcagctaaattcatcatacatagaattcttaacaaagaagaaatcggaaaataggaaaaaacagaggagagatttaccagtggtatataaagcgtcgtcaatggcgttgaaaaatatcgctaggcataccggagtttaggattcaacgagtgacaatataaaacgatgatgattaacaaaaaaagtaaaaagaattcaccaccgtgtgagaaaagacacgtgttatgatctggagatagatcttgcaagtgggttaaataataaacggcggagacatagccacacgtgtgaaaaaaaaagaggtgtgtgtgtgtgtgtgtatgtgtgtatgtgtgtgtatctctctctctcttcctccaagtagcaaaaagcaaaggggaaagagacgatgcgatcgggctaagtgcagaaacacttatacttgtgcattctgcaacacaacacacacacagagaattcgacgagagtatgatttgagtgtatcgagaacagagagagacattgatagagagatcgttggcaacgttttggggatccaatgcgttcgtaattgggaaagacatttcattcaattctaaatcgggaatatg

SEQ ID NO: 12564 - DNA, 3000 bp, Unknown; identical to SEQ ID NO: 12552
  misc_feature (1)..( 3000): cDNA_ID_1025340_gDNA_ID_2214558_Annot_ID_134837 3000 nt of promoter + ATG

SEQ ID NO: 12565 - DNA, 3000 bp, Unknown
  misc_feature (1)..( 3000): cDNA_ID_2709160_gDNA_ID_2214558_Annot_ID_134838 3000 nt of promoter + ATG
aaatcatattgattccccaaatccttccagaaatacaatgtgaaccgaaagcatcttagctaatatttggacagaaccatatccgaaatacaaatgacattgtcataattaccaaagaagtggaaaaataagtagctaaggcaaatatttgaaccaaaacattccacacataaacaagaggcagaaaacatgtttgaaattgagtattgaaagaagagataacataatcggtgatattggttcctcttgattcttaaacaaaacgtaagaaacaaacaactagtaaactccatattcaaactcacaagcaccagcatagagtcatagaaaaaatctaccaaaagaaagatttagtatatcacatactcttccgaaacaaacgggtttttcttgcttatcctattcttatccaacatttctcctagaaagaagagaacacagtgtgaaatctcaagttaaggaatgaatgtgtcaactagaggactaaagaagttgaaataggtataccttcatcacaggaacgctctgcctctgcatcagatttgttggaaacctaagaattgatgtgaaagacaagtacagataaagaggtaagagcacatttctaattcaaaacaaactgatcacaggaccaattctcaatcaaagcaaccattaagaggagaaaaaagaccaacattgtgactcaaggaggtaacaagtcggtgactttggttgaatacggagaagtgatgtggtagcagagattgagtgcgcttgccattggcgaggacgctaaaagtacggagagaacacttctgaaaagtggaaacagagcagcaagattagtaattcagctcaaacatcaggggttcgtgagagcaagagaaaataagagtaccggcgggagaggaagactaaaacggtggacgccggcgacactcatcagtccggcggtgataattcaatgttaggatgtcacaattatcgccggagtggtttttaaaccgaaattgaaccggtttaatttaatttgacaaaatttaaaaagtaaaaaatattaaatctttaaaccgcaattgaaccggaatctttaaaccgagtctatatatacttttcaacttccaagtctttcttcacattctctcaaacttattttcgttttccagagaaattattgacaatcagagaaggaaggaaggaagcaagaagacttaagaagatgataatggaagaagaacttcaagagcgtaacaacaatctcagcctcgacgacattgatctttctctcctccgtctcacttcaccaccgtacgactactctcctccatcatccttgttctccgccgatgaaatcactcctccattgaaacgcgcctcccctgtttccgacgaatccgatctccccaaacgcagaaaactctcccctcaaaacccaatctttaccacttctcctcctctcttcacttccccggaaacacaaacttcctctgttcatgacacgagccggtacacgaatctcactagctctgtttcggagaagcaagaagcgacgccgtctgttactgatacagaggttgttatataactattaagcgtttctctaatctttgttttcacttcttgttttgaactactaatgaagaatcttgaattggttttggtaaaatagacgatgaagatggttaacaaatgcgtagaggtgatgaatcgtggagagactaactatgcttatgaggtttgatgttcttctctaatcaattctgctttcttttttttagtcttaaagatcgcaagtactggttttgataagtttacggtgaaattgcagaaggagcaagaggagttggaagaagaagaagattgtggaggagggatgaggatagagagatctggagatgggtttgtaattagattgaagtgtagatgcagacaagcttttagggttcttttctctgatgatcatctctacttcaagcctctctaagtttcacttcacacacttgtggtgtgatttagtatctgcttctactcatttgttgcaacgttttttggttggacagttatggagactttgtaaataggaagtaaccaaaattaagatttacatttcgtgtagaaaaatgtgcaatgaaatggtaagagtaagagcaagaactcgttttgttgtatagagattacaaaaaggttactacttatttagagtcaaagtcaaaactttaaaattgtttatagagattatcaagaaacttttaatctcttctgaatacaaaaggtttcaacttttttttgtgtgtgtcaaaactcaaaccttttacacttgtttgggccttcttcacgggacccatggtcatctcgatcaagtcaatgttcagctcctcaaaacaagctcttgagagtggcaaagagaaattaagaccatcaaagaggggaattggcctctacagagactagctgctggcgacagagagctctcttagcactctcacatgccttgtggagcttaccataagccatgttgtctctgcttgaattctttttggtgttttttcttgattaacttcatgaactattctatgatcttgtggttaaagtccttaccttttttatacatagtagatttttttctaaaataattttcttgcttatttacatctcaattaagactttgaatatgtgatgataatttccttagttatgaattagaatgattaaaatcaattaagagacccaacagagagacaataaggctattttggcccatttagacgtaagtaatgcagaataaaattgctccgaccaaattaattgatgcgcgttatcagtttctgcacgcgctttcacgcgccgtcgtcgattcgtttctccatcgtctgccataatcacccgcaaacacattcttcttgctacttccgtcacgacgtcagtctctatctctctccctctcactctcagtttcaatagaaaaattctcaaacattgtccgttttttcccttgttttctctcagaatcatcaaatg

SEQ ID NO: 12566 - DNA, 3000 bp, Unknown; identical to SEQ ID NO: 12551
  misc_feature (1)..( 3000): cDNA_ID_1017185_gDNA_ID_2214558_Annot_ID_134840 3000 nt of promoter + ATG

SEQ ID NO: 12567 - DNA, 3000 bp, Unknown; identical to SEQ ID NO: 12550
  misc_feature (1)..( 3000): cDNA_ID_1028073_gDNA_ID_2214558_Annot_ID_134841 3000 nt of promoter + ATG

SEQ ID NO: 12568 - DNA, 3000 bp, Unknown; identical to SEQ ID NO: 12549
  misc_feature (1)..( 3000): cDNA_ID_2709126_gDNA_ID_2214558_Annot_ID_134843 3000 nt of promoter + ATG

SEQ ID NO: 12569 - DNA, 3000 bp, Unknown; identical to SEQ ID NO: 12547
  misc_feature (1)..( 3000): cDNA_ID_1019319_gDNA_ID_2214558_Annot_ID_134845 3000 nt of promoter + ATG

SEQ ID NO: 12570 - DNA, 3000 bp, Unknown; identical to SEQ ID NO: 12546
  misc_feature (1)..( 3000): cDNA_ID_1808620_gDNA_ID_2214558_Annot_ID_134846 3000 nt of promoter + ATG

SEQ ID NO: 12571 - DNA, 450 bp, Unknown; identical to SEQ ID NO: 12545
  misc_feature (1)..( 450): cDNA_ID_2709173_gDNA_ID_2214558_Annot_ID_134847 3000 nt of promoter + ATG

SEQ ID NO: 12572 - DNA, 3000 bp, Unknown
  misc_feature (1)..( 3000): cDNA_ID_2709197_gDNA_ID_2214559_Annot_ID_134851 3000 nt of promoter + ATG
tatctacatcacaggtctggtagataaagatgtgaatgatattcttacgactatatattttggttaccaagcaataatcattgttacaataacacatatatattgtggagagaaacaaaactataatttgttattaccaattcattcggatgccatacttcttcagtcggctacgatgtaagtttgattttatcgaaaatgttgagatcaatgatcacgggtcaagacggcttgcagggagctcgaagacaagttgaacgttgccttcggagatagtgaagccgatcaaaaaccgtttttcaatagttacaatatcattgaactgatctccacattctcacttttctatgtttcctggtttgtaagatttttgaacgatcattttaatttgcttccattgtatatttaaagaccaaagtcttgatggatgatgaagtagacttgaaaattgatgaaacccgttattgtgttgttgtgttacaaatcccatctatgatcgttgatctcatagatgatcattgatcatttttctcatttttctatgatgaagtagactttttccggaaggcttatgagaaaaaaatactattcttgttttgtaaacatatgtgttcaataaagaatctattttcatttgcaatcattcggattaattaaagtgattgctggatgaatgttttgaatctctttttaccatttcgctacaaaaataaaaaaattgcgaatttcgcatccagatatatactagtattaagcatgggagattattcactcctcgaacacatcctatgactatgagttacacaaatcaaaatttttacattccaacgttgatgatcctttggatttggtatttttccatgtcatactattgtaactttgtttgtaatttctttctggtcaatattactctattgtggatgcaagatcgcataactagtcctccatcgaatcaaacatgatcacaattttaagaatcaaactggacttttatataccgaaataaagttacaaagatttcgctgagatgttcttacttcttagagctagatgagtaagtaatattagggattttctagtgtacaattgatgcctctatacattactctccatcagatttataggacttgacctcgtctgcttctctgatatttcccagaaatctcgctccttttagtttctgcttgaatctatcaaatcctagtgattttgcgaccacctacttctttattctttcctttttgttggttatgtccaaactgatttaagagtatccacattggttatttttatgagtgtttttagatggctatttttaaatataaaagagtaaaacaaataaaaaatatgagggtcattaaaatgaaaattatatcttcctaaaacatttaagacatctatacctttaatattattttatatgaaatacatctatgaaaaattattcgatgaggatggtctaatgagtcggagagtctcagaccaacatctatctataactattttttttttcactggaaatatagatttcattgatagaagatctgagtacaagagctgacaagagaaacactcttctaaaagccggagagtacatgggaccttccaggaactaaaaacatatttaaatgaaacaaaggggaaaaaaaccgatctaacaaattacatcacatctgatcaagtacttcccagacccaaaatccaagagttcaaacgaaatatacaaagtctaaaacaacaatgataaactgatagatctgagactagaagcctcacttaactcaacctaaacacgaatgggcgatgagataaaaccatcatccagagacccaaaggagtgagagcctcatgaaggagagaacgagatcgggatcttcaggtggaatttcagaagtctgaggcgaaaatttggatagaaacgcttctgccttggatggatcggccagatctgactctgttcttgaaaaagacaaaagacaaacagcaaaaacctaaaaagaaaaagttttagactttaaatatctagatctgaaaattcagattcacaaccgttggaaaaaaatctctcagatgtgtctaaagaaaaaagatagaataagagcaaaacaaaagacttcggttccggtgctgagaaagccaccggaaccggtaaccctaaacgcaggcggcggctgaagttttagagataagggagagtaaaattttaagagtgagaaaatgacgagatgtgagcttgtaaatactttttgtaatataagtaactataagtaatattttttttgtaatacctcaaattttatttttaatgatatttacaagtttaacaaaacaaaaacaaaaaacaaaatattattctagtcatagcaagtgagaatttttgaaaagggaataaatgtgtgtaattaattcaacggtccaacagtggcttggacctaacactaatgacatttgttcttcttgtaatttttatgtggctgtcttcttgtaccaagtacgtagacaatagtttgattctatttggaatcaaaactcaaattacatttacaagaaaaacgatcacagatacagtaattcgtagtattcgccaaagttccttttgcaactttcaaaaagtgcaaaaacaagaccactttttcgtaataagatagtagcaaaaaagcacgactattccataaaactgtccacgtccctccagaaaactccccccacatgcgatttgccacgtgtccccactcaactacacacaaagccattttaaatcaaattattaatcaaacttaaaaaacgtaatcgtgtgctgatgatgatgatgacactgtcactgcctcaaaaacctctataaattagtcctcttcaccgaatccttgtaaatcattactgtacttttctctcttaacggtttctttattattcttcccattctacccctcttcttccttctaattccccctcaaatgccactgtcttctcactaaactccaaaacccaccggaaaaaatg

SEQ ID NO: 12573 - DNA, 3000 bp, Unknown
  misc_feature (1)..( 3000): cDNA_ID_3025741_gDNA_ID_2214559_Annot_ID_134852 3000 nt of promoter + ATG
ctttttcgttttctataagacctaatattttatactactatgctctttcaaattatttgctccttccatttccatgacactaataattgacgctttaaataaaatccatacaaatgaattctttgaactgttgaaacttgaaagagagtggtcactatagcactgttacacttaccgcgatatttattgaataacatactaaattatataaattatcaatatcttaactagggatggacataaaatccgaaattcgaaaactgattcaaaatcgatccaaaaattccggctccaaaaccgaaccgaatagtcacaaaacccgaacgaaaaataaattcttccactgatccgatccgatccaaaaaccaaacggatatccgctaaacccaaaataaaattatatatatatataatattagttatatttagctataatttatacccaaaaatatccgaaataaccttgatatcagatttattattagttatctttgttatacttatacaatgttttacaaaattaaacaattttttaggttttttttttcaaaaactgatccgaaaccgatctgaatccgacatcatccgaaccgaaaccgaaccgaaagtcatatcatccaaacggataataaactccctcatcagaattatccgaatccgaattatccaaatacccatgtctaattttaccattgctttttaagccattaaccataaattttgggagaacattgattggaagactgtgttttacagatatatatgtattcggttgttccagtaaaagaagtagacaatgattaatgtaagatgtgtttaatcgaccgcacaaagaatatggtggtggtgactacacaaatctggctgatgtaacaactgtctaaaacattttctattctttttgaaacgtaataaacgcaaatcatatcatgcaccaacaagtagaatcattctttccataaaaaagtaagaaaataataatgataatcagtagtaccaatttattttggaaatgtacactagataatcctgcatttataatatattgataattgaccttgacctttaaactacatttttgttgattactatttgaacaacataatttcacaaaagtgcatacaaatattttcatcaatccacacgaaaaatgacatacccctttatttcctattttgccaccatagtaaactacttaataaaggggtatatgctttatttaacctaatttaacctttattttgttgtgtataagtcctaatgtttgtataaacataagtataaatccttaccttttgaataataagctttttttgctgtaattaatttggtcagtatgattgtacaatgaaacattattctcatgcgtttcacgagctagcaggagaatatattggactcatggtgtttctcaaagcagaaaagagaaaatgattactatttttcttttgtcaactttttactaattttctctttatagaatatgaaatatgaatgagcaaatactatatgattgtcataatcacgaaactttgatatactaatctaatcgtggacacaactaaataattaagcagttagttaaaggaacgtgtgtgatcaagaatgcttattatatgcaaataaaaatatatgactcatgcaaatgaatgaccaagaatgcaccacaaaagttctagaccggtcaagtatgttatctttttttaattctcttaatgaaacgaacgatacacgtagaattgttaactagctagtttagtcaatatagttagagagtagttaagataatagacttttaaaaccatagatggaacgttacatgtttccatggttagccattggaatattgaccgagagttaatatataagctattactgaatctggaaacaaattcttatgttgtcttaaatgcgtctactttaaaccgtacaaaaattcaacaaacccaagttaatgtaagtaattaggatgattgaatatgcgtttctatctcaataatcttcaccagttatatatttctcactctcccattaataacaaacataatcatctagataatggaatgtaaaaaacctgctgggtcagtctcccacacggagtcagcattttactcctccatttcactgattgacacgtgtcaattttccgacgactcttctcataattcatcctttgaccggtagacttcagtcaacagccccgctctcttctatttattactatgactaaactttttttagctttttaatttaaaacccaattttccatactattttttttttttaaaaacttcttaaaaataatttcataggttgatgagataccaaacgcatcttaatattttctccttaatttactttggttatgtctttctatgataaaactactatttacgtacatatgcacatacacatataaactatatgctctatatcatatggattacgcatgcgtgtgtatgtataaatataaaggcatcgtcacgcttcaagtttgtctcttttatattaaactgagagttttcctctcaaactttaccttttcttcttcgatcctagctcttaagaaccctaataattcattgatcaaaataatggcgattttgccggaaaactcttcaaacttggatcttactatctccgttccaggcttctcttcatcccctctctccggtaagctttacacaagacacatatatacatgcttcaatatgattaaagaaactactatatgaaccaaccaagtatatatttatgatgaggcttgtgtttggattctatgtttcttttggtggatgatctgattatcttatttcgtttttacaaacaaaatctctaaacagatattgacaatcataaaaatataattagttttttcatcgtcttttttctttatgatcacatattttttcattttgtccttgtgaatataatttatacacgcaataagtttcagatgaaggaagtggcggaggaagagaccagctaaggctagacatg

SEQ ID NO: 12574 - DNA, 3000 bp, Unknown
  misc_feature (1)..( 3000): cDNA_ID_2116844_gDNA_ID_2214559_Annot_ID_134854 3000 nt of promoter + ATG
tggaaggagaaaaagttcaatagattggcccatataaggctttcaggagttaatgtcgaaggcccattagctaactctacaatgatgtcaacttgaaaacatattttcgaaaaatgatagagaaatcatagagtaaggcatatgtctacgagttgaatttggaattgggatgaaacttagataggtggggaaagaaatggtaggactcgaccattaattagcattttatttgtaatcgcgatcatcacctaacgattaagaaatcttaagagaaaaatttctagtcattattgtcgaaactaaattttgtataaagacatatcaattggtaaagatcgtaggcgaaacttaaaaatcgccgattcgattgacgtttgtgacgaaactaatattacatgtcgtggtttcgaaccaggggaattacgggcttcgacccagaatctcctgatattcaaaaaaaaaaaaaaaatcaatcgtatgacacgtgacgtgatcattcatgcaagacgagaccttcgtagtatggtttcccgcactgacattaatcggggagatagtcgtgatcgtctatatatggtgagtgttggaggatctaacgattcggaaagctaaagaaacgtcaaatgtgtgactgagagccataatatgtattagccttgtaagttgtacccggccaccatatataacaaggtcaattcacgtcattaagtcctactaagtactaaccacatatcatccacgtaaataaatcaagcccgcgagatccacgtaagttttaatccactactaacgcaaacgtacgtagaagtgttttcagaagacaccacatcgataggtccagagatcgaatacctttggagctcctatggaagagttattcagaataatttgcctccacaagtattatttcatttagtgtagttcttaaataagaaaaaaatatgaatgtgttttatgtccttatcgtgtttcgtacattatcttccgtcaagataggaagctttttcatttgatacattatcactttcaagtgaggtcaactctttaatcaatgtaagttgattttgcaattagaatttgtggcgtagcaaagcgcaattagtttattcatttatttcaattgaatgatgaaagttataagtattgaagatatttgacctttggtatagaagaaatactcaaaataaaacgttgactttagtgttgaatcatacttcctttgtttcttaatatttgtaatttaaggtttttacaagtaaattaagaaaatatataaattttatttaatttatctatttcctataaaaacatcattagttataactaatctaaccaataagaaagtaaaatataattagctaaaaactattaaatatatttttgtttgcatagaaaagtgagaacaacacttataatagaaaaaaagaaatatttaaattacacttagttagaaatcgagaaaatataaaacaatgcgtttcagatataatggctcttcagttcgtgatcggcgaccgaggaaaccaatctatatagaacttagatataggtttaagtatacttttcatccattttttgagcttcttaactcgtagaagaatgtttgttataccttactataaacatggatttatatgcactccttcttgggttgttttctcttcatttactaaaatcagttgaccaataataagatataaaaaaagtacccaagtctacgcagttgttacggcccattagagtaatgaagagacaaaaagcaagcaacacaaaaagcgacccaacttgagcaccgtcacaaaaacggcgtcgttccaaaggatggtcaacaatggtgggaacctctgcacaacaaagagactttcctcgagatttcttatattcgcctgctaaacgctgtcgtattagtgggtagatgaaaaagacagaagggcaaatgagccgtgtcttccataattctcaacaagataagataaggtatggctcgcatttttaggtattgtttaatcttcggttgcgtttcttatctttttttttctcctaattttcatttacagtgatttgatttcagctcattcctgattttcaattttctgatttcagcaaaaagtccttatctatttttttcatttatttaaggcaacttgttttctaaaaataggaatggaaaaataaaccgaaccgatatatttaaccgaaacataaaactaaactaaatcaaattaaaaattagaaaataattgaatagatactaaattctttaaccaaaagaatcgaagctgaatcggtgccgaaccaaagtattttggtaaccaaaaatatccaaaatataattatattttcaaactaaataattaaaaattcttgaaaaattatataaaatagtaaatttattagaaattaaccaaaaatattcacaaatattcaaaacaaattaaccgaatgaatactaaatttaaaaaaaaaaaaacagaatcgaattaaaatcaaaccgaaatactaaattttaaaatcgaaaaaattaataaccgaatggatacgaacggaaaccgaataaataaccgaaaacacatgactaaaaagaggtattttcctccataattaaaaggtgtttaataatagagtgatcggcgaaaggtgtgaaattagctgttttgtcttgaagcggattcatatataaaagagcgtgtgccctctttgcttttaatttcagacaatcttcttcttcgttgcagcttcgtggaaattattttctctttctcttccattattatcttaaaggtccgtcttttatccttcttctttttttgttgttgtcctaaaattagggttcttccttgtgaatattgcttgatctaggaaactaatcaggatctgggtttgtcttttggatctagggttttattatagcatttctgggttctttgttgaccaagaagaagatttgtattgatggaatgttgttgatgttgttgtgaacagtgagaaatcaataagatg

SEQ ID NO: 12575 - DNA, 3000 bp, Unknown
  misc_feature (1)..( 3000): cDNA_ID_2709193_gDNA_ID_2214559_Annot_ID_134855 3000 nt of promoter + ATG
tctcgaggaaagtctctttgttgtgcagaggttcccaccattgttgaccatcctttggaacgacgccgtttttgtgacggtgctcaagttgggtcgctttttgtgttgcttgctttttgtctcttcattactctaatgggccgtaacaactgcgtagacttgggtactttttttatatcttattattggtcaactgattttagtaaatgaagagaaaacaacccaagaaggagtgcatataaatccatgtttatagtaaggtataacaaacattcttctacgagttaagaagctcaaaaaatggatgaaaagtatacttaaacctatatctaagttctatatagattggtttcctcggtcgccgatcacgaactgaagagccattatatctgaaacgcattgttttatattttctcgatttctaactaagtgtaatttaaatatttctttttttctattataagtgttgttctcacttttctatgcaaacaaaaatatatttaatagtttttagctaattatattttactttcttattggttagattagttataactaatgatgtttttataggaaatagataaattaaataaaatttatatattttcttaatttacttgtaaaaaccttaaattacaaatattaagaaacaaaggaagtatgattcaacactaaagtcaacgttttattttgagtatttcttctataccaaaggtcaaatatcttcaatacttataactttcatcattcaattgaaataaatgaataaactaattgcgctttgctacgccacaaattctaattgcaaaatcaacttacattgattaaagagttgacctcacttgaaagtgataatgtatcaaatgaaaaagcttcctatcttgacggaagataatgtacgaaacacgataaggacataaaacacattcatatttttttcttatttaagaactacactaaatgaaataatacttgtggaggcaaattattctgaataactcttccataggagctccaaaggtattcgatctctggacctatcgatgtggtgtcttctgaaaacacttctacgtacgtttgcgttagtagtggattaaaacttacgtggatctcgcgggcttgatttatttacgtggatgatatgtggttagtacttagtaggacttaatgacgtgaattgaccttgttatatatggtggccgggtacaacttacaaggctaatacatattatggctctcagtcacacatttgacgtttctttagctttccgaatcgttagatcctccaacactcaccatatatagacgatcacgactatctccccgattaatgtcagtgcgggaaaccatactacgaaggtctcgtcttgcatgaatgatcacgtcacgtgtcatacgattgattttttttttttttttgaatatcaggagattctgggtcgaagcccgtaattcccctggttcgaaaccacgacatgtaatattagtttcgtcacaaacgtcaatcgaatcggcgatttttaagtttcgcctacgatctttaccaattgatatgtctttatacaaaatttagtttcgacaataatgactagaaatttttctcttaagatttcttaatcgttaggtgatgatcgcgattacaaataaaatgctaattaatggtcgagtcctaccatttctttccccacctatctaagtttcatcccaattccaaattcaactcgtagacatatgccttactctatgatttctctatcatttttcgaaaatatgttttcaagttgacatcattgtagagttagctaatgggccttcgacattaactcctgaaagccttatatgggccaatctattgaactttttctccttccattttgggctgatttattaagttcacaacacaccgattaggacgtgcttagtttttacttttctccttccattttattatccatcacataaaggcatgtttaagagatgaattttacataaatccttttttctctgcaaattcaagctcttctttaaaaaaaaaaaatcatttcatttcctctagtaagaattaaatttatatttagcgtgttcttttagtgaacgcagccacaacaatagcaaagaagaaaaacagttctacggtgagaagaaaatatagtgataagagagaactatcacaaaagatgaactacgatgaagattgaagtgtcgctggttaatttcagcgattcatcgaatgcagttgcaactcaatcggcgactcatccaaagttgttattttaagttctaatgtcgttttacttacctgctacttctcatgacaattcgtcttactccgttgttgccgttgtcgcaacgttcagtaaaagcacacgctaattaatttttaaaaaaatgaaaaaatagctatattcacacctataatccaatccccttaatagaaacgtaactacttttcctttttttctttttttctttgtcaaccattgaaaatcagcctaactttaaatataattaatattacaatggaaattaaccaattaattatagaaatataattaatattacattgattaatatatttttttaaaaaataaaccaattaaaatggtataatagttacaaaatcttaaaaatagagttaatttcagctaaaaatttaatttctttttggtttgaggcattttgagtttgagtgctgagagagttgaagcggacggggaagaacaagcgggagacttgatgcttgcaagcaaagtgttcctcctaatttttacatataactaaactcttaattaattagaaaagcaaaagaaaaaagttgagaactctctgtttttttttcctttctttttaatttcactttgattcctaattttttttgtttgttcgatcttcaaacccaacactctttcttctctcgatccttcccattttccgatcctcggattcatcggaatcgtcctttgatttgctccgaagatcatcccgactagctgaagccac

SEQ ID NO: 12576 - DNA, 3000 bp, Unknown
  misc_feature (1)..( 3000): cDNA_ID_1807367_gDNA_ID_2214559_Annot_ID_134856 3000 nt of promoter + ATG
agaaattgctaaggattcactaagaatcaaaatctctatgtaagacaatgttggagctggaaaaagagaactcacggcatcagcggtggaattatcggcgtccatctcaggacggagcttggcgtaaacctgagggcttttgtaaacggatcctggaggaggtcgacgctgaatgattggaacaacgtcgaaggagacggttcccatgtaaagcagcatacaagagatatagattagaggagcgaataagaaaatcccctgacgacggagaagaaccgataagaggatccacgagaggcgatgagcgagggtccgacttggttgaaccgtaggaaatctactaccggcggcggctttagaccgaccgtgacgataacgaggagaacggcgaggagatgccggaggagacggagtagtgtggccgcttcccggcagccgattcttcgctagcatatcgacagatctcaatctctcttctctctctggccaacgccttaattcatcattgaaacctatcgccggcggtggcggcaggtcgtgaaacgcagagatataagtccaccacggcggcggaggacggtggcgaaataagaagaataaacgccggaagagagagaaagagagtgtatgtatctgtgaagggagctttatgcggtggaggcaaagccgtgatcagtcacatgcccttcctttgcttttctttctcctcttgtcttttttttttttttttggttgccctttagatttcaaatttttttctttaataaaattcgaaataaatctctttaaagatatatattgaagattcttgatgaacagttttagttaatctccatattttagtagtatatacctttttttttattatccaaaattaattaatgcaatttttgaaaaatgttgtttacgtaaataatatgttgcggttgaacacgaattttacgtatcaaattaaccgctttaatatttgcactacgagaaactaaagataaaaataaaaaatttgccttttgatacttaattttttggattgtttgtgtcttgtaatctttttcaatttttgatttatttgtgtgagatatggaaaatacccgacaagaactcaaccaatttcttttgtcatgttttgtattatgaatagataataatacaatttgtaaatatatatgatggtatatcttctggttacaatttttatctatttaaaattgtgaattattccttttgacgaaattttttttaactattaatgtcatattgcaggtcacaaattttatgattattttttataaaataataatcgttggaaacaaatatatttcaaatagttgccaaaaaaaaaaagtcaacatctacgtattttataaatgattagaatatctttatcatctaagtcttattccaataatgattgtttaatacaattattattcgtattcaataatgtgatgaaaatagtaaaaatattaaattaaaaattaacaactccgaagagaaagccaacacgacaagcaatgttgattccatgctctatttagctaatcttgaaacggcacgtatttttggtaaggaattagggtgtaattgtattgataacaatattataattttctaagcatgattgcttgttaatactataatgcagccacataatttcatagatcgaaaacaattatttttctaagcatatttaaatgttgacttgtgagttaattagtagatttagatctccatctttggattacattttatacacaaaaaatatttatttaaatttggatacgtggaagcttatgtatgtggaaattattgtataactctataatctaaagatatgttttttttttaaaaaacgtagatatcatttgtttgataaatatttagggagttaattaaacagtatgagagtttcactagcaattagcatgtggttgtgttgcatgtgcaaactgagatggatagagagtggttggcaacagcgacactattttatttttttactatataaatgaaaagattcctaaatttagtaaaatactatatgtcattttatatatagttttaggagattttcaattgagatatatgaccatgacaacaaggcactaatactctctagcatagaaacagtaatgaaaacgcggaagcgaaacgtttcagaaacgagaatcgtttttttccactttttgtggtcatcattggaaacctaaattttttgtcgagaaatgaagatttttcgaaagggaagaatgtcgtgatttatagttagtgacacttgcaagttgcaatttttgtaattttcgtcgtagtttacaaactatttgatcttcgaaatctcactacttgagttttattcgtgtagagttttaacttatataagtagcacactaaatacaaagatataaatcacagaaaacgattagacataagataaagacagttataaaagggccaaatttaaggaggaacaaaatgatgagaaataacaaaactttcaaatttcaacaacatgtatcgaaacgagtcactgaaaaattattattccaccaagaaacccactagctgactcagagacttcctttgcattttactcgtgcaatgtaccaaggatgtcctcgtcccgaaacagatgatacctacgtcaaaaatcaccaacacatcgatttaagaattttacacaactatagggtgtttttagatcaaatcaatagtattggggtgataaatgaaaatattataaaaattaaaggatccggtatacgtactctttctcgccgagtttgacctccgtaccgccgtactctttcccgtctctatcccgtgaaccgggtccaaccgctatcactttaccggaattcagcgataaatgaaatattatgatgggcctataaatactgtaatgggccttaagttagcccattaatatttttttttgtatttagtatttttacgaatcagtggggacttggcattgagctcgagagacagacacggaggatg

SEQ ID NO: 12577 - DNA, 3000 bp, Unknown
  misc_feature (1)..( 3000): cDNA_ID_1808283_gDNA_ID_2214559_Annot_ID_185855 3000 nt of promoter + ATG
tcagaatccaaatcatctcatgcatattcgttactacgatcactgactacttagaattctcattaaccgaatctattacacaacccaagaatgtatatactgaaaaacctaacccacatattgaatactgatcgatataatatacatatttttatcatcaaaaggagattcacaagattgaatactggcaacgctgatcactacttaacaagctaaacattgtttagtaattgattaaaaaaaagaacatggtttagtaatcatttgaatttgttcatgaccaatttcttattcacttgtacgtctttcagcagctattaattatctatagcttgttgtcaatctccatcaacaatttttcaagtttcttacgtttgtatatatagatggatctcgattatctaccatgtcttattcaaacaatctgcatcaaaagccccgtatcttttaacttttcatatgctacatataatttgattcaaaagtattcaatgcttttgcgttaaattagctgttctaattcatataacgcatactatatattaacaaaaactctcctactatctttcaattgctttcacaaaacattttttctacttttccacaaattataaattcacgaatactatggtctatggctgctcgcgctctatgtaacttttggagctagagcttaaatggtatggtgtaaaaatgcaatggtctaaaggccatgttttatataaaaaaataatttaatgtttggcgtcaaagggatgaaaccattatatatatacgctactaattagtaaattcattatgcacgaaagaaagtcaaacatgattgataagtagcttcttgttttggtaacgtattttttttggatttaccaaatatagaccaccatattcatgattccaagtcatcaaaaaatgactacaaaatcatgattccaagtcttttatttgggaatatctaatcatatacgtaatcgtaatgtactaatgtggattggaaatgttagtgcaaaaaagtcttgtgacacctgatgtaacaagtaccaaccgacgtcgtttaatttatccatcagaaacatcacaggtaagaagcaacccaaaaacatcgtcgtatttgccatcaaatgagtaaaggcaattatgtgggtctttaagattcaaccaactacacagcaatggaacggacgggttcgcacccaaagcccacccaaagcccaaagggtctcgagagagcttcaaggaaacactttgcaacgattacctaatttccaaagattacctgatacctttggtatgatcttttagtctctactgatgacctaattatcgagtagacatattatataattggttttgcaagagaatggcctagtttcgcagacttttacattctcggtaacaatcttatcaaccgatacatatatgtttgcattatgtttttaaacattatcgagtagacatattatatatcgcttatttcacaactatttgttactctacaactatcaatcatttcctgaaagagtagaacactgtgaagatataaacactgagagcagaagagaccaataccacaagcaccagcacggtatgaatcgccaaagcattgccgcaagagagaagccccagacggagttgtataacatcaacaattgacaacagaagaaatacacaacccaagatagatccaccagctgcaccaaccacaccgaaacgaagcacatctctgttgatattcgctttaaacacttcgtccgtttctttgctgttcaaaaggttgatggctagcttcatcccttgagccacaagggaggagaagagaaagaaggcaaatgagatgacttcaaacacaaccaggtcacgttccacgtctcgtcctgcactgcactctgttctgtccgtgagggtgaggtcacttggctggtcgaaggagattccgacaaagactgcaaccgtgaagagagaattagcacttacaatcccatcgagagccgtaacatgaacactcgtggttgaagtagttgaatggctggtgttgctattgctattttggttgctgctcgtctctatgtcggaatctgccattaccaatgaatggatctctctttctttcttttttgggatagctaaaagcttctttctaatggtggatcataatcttctgttgtgttcttatgattcccttttgaatatgatttggtaatgttgtttaagagtgggtggtgtttggtttagaacgattagccttttggaaaacgatagctctatgttaattgataatttaatctttttcaagtcttggaaggtacacacacctttctccttttgttatgaaagaaaatggtttcttctagtaaccaaaattttgaactttattcacatgtaaaacaacacaatcttgtagcaaatttacacgttaaatttaaaacggtgttgcgtatttgaagagacaatatcctaaacgttatcatattaatattatttttgttatttttccgtcaaacaccatttttattaagttatcgaaaagatactatccgttagagaaaactattaaggaaccgacgtgcttacatgagagaaaataacattttcagttttaacttttttggctaaaaggtctactcgagtgttaaatttttgagaaaaaaatctaatacgaaaaaaagaaaaataaacaataaaacaccgaaaaagaggcgaattccgctgcaaaagttggctaatctttttggttatccagaagagatatcaaatcggagcatagtactattattaactttgttttaacctaagcgatgtgggataaaaatcctcttaacaaagacaaacaatcaatgacgtcatcaatccaaaaattggcatgtcctcaagattaaaaagacagtcttagctgacgtggcctgttctcaagttttaattggctggagaattcaagaggatgaaacatagaaatcctctttgactaaaatattttaaaccacacaagagaaggaggaggca

SEQ ID NO: 12578 - DNA, 3000 bp, Unknown
  misc_feature (1)..( 3000): cDNA_ID_3025714_gDNA_ID_2214559_Annot_ID_185851 3000 nt of promoter + ATG
caagcctcgaagttttggtttaagagccttgagcttcttagtgaaccggaacagggacgacgtggacatgtgtataggctctgtttctctccaaaaattttccaccaaaggtttaaactcctccatatcggccacagcattcacaaacttaaaaggcttatttcctctcacttgtgcaccagagttcatatttaaattgatacgacaccgtaaatggtcagaacaccctcccgcttcaaaaacattataagattgtgggtagaccatcttccaagcctcattcaccataactctatccagttttttccaaattgggtcattatctctcttattgcaccaagtaaaaaggggcccgtgagatgccaagtctgagaatgagcagtagttcaccaaagactgaaaatctcgcataccggaggtaactgctgggtgatcttccattcgagagtgctcatccatatccaaaatctcattaaaatctccaaaaattatccatggtttatcacgaatgatcggagagtccatatggtctcgaagatcattccacaaaatctttcgttcctctgcaaagtttgaagcatatacaaaagagtagaaaaattcttcttcttggctttctagtttcaccgaacaagttatcaactggtcactcttgtaaaacggagtaaaccttacattctccctccacactacccaaagacgacctcttctattaaactcatagttagttagcatggaccaatccttgaacaacttagaacccaaccactgtgaattttcctccttaactctcgtctcaatgagacaaccaaactgaaaattctgctcgtccacccatttctgaattacggaatgtttatttgatttgttgaggccgcgaacattccaaaagaaacccgacattaatgatgttttggagggagccctttactctgatctttaggattattcctagtagaagggtttgataatactttatgtgctgactttgatcccctaggcaaagaatgacgcaaaatcatctccttctttgctagtcgattctgattttctaccttttcctgaggcgggtcttgagttgagttttgtgtttcctccgcttgtttctcaacactatccgctgttatgatgtcctctccactttcatccttaccattcagagcagagtaactatttgatagaatagagacctccccaaattgtaaaccttcttgctttttcggtggactacgaccaaatttaggggtaatccatgactcagctcctttctcttcttccttaccatcttcagagattggtatgattggtatattctctgtcacacattctgcagtcacagaggctgcagtctgagaattagacaagacctgacccgtctctgtttcttcaacatgaattgggtctggatttggcgtgtctcgagagcaggtttttaaggcagagagacaagagtcacggaggtgaccccatttatcacaacaactacatcttggtggtaaccaagggtaggagtattttatcactgcagctagttctccctcctcctcgccggtaaacacaaactccttaggtaactctttcgttaggtccgcttccaccagcaactgagcttcatcgaaactcgaacaagattcagtcttggggtgcaatcgaattggcttacccactgcactagccaaaaactcaagacctttatcagtgaatagtgatggaggaacatccgttaaagtgatccagagctgaattgacttcatagctggctgagtttcttccgcaaaaggagaccactttgacaccaccattggcaaatccatgatattccacatgcctctgtttaaagctcttcgtcgcatggcttcgtttcggatacgaaactttatcgtcgagtcattgacggcataaacatcaatcagatttgacttgtcccccaatctccaaattttattaacgatcatgtgaattttcccaacgtgtggggcctttgcattgagaaagtgaccaattagaaaatcttcccatagtggtttagcaccgagaaagacctcttttggtactaccaccgtcgcttgaccatcaacttcttccgatacgaacttttgttgagtgaaggtgtgttttcgagcagcgtttacccacgatttcttcgcaggcggatgtgacatcctttgagtcgtctctaaagcactctgactgagtgcaggaaactggtctgaatctgagacaagtaaaaccctatatgtgctttggtttgaaacgatgagatcaccgtcctgtctctccaaagagaccggagaagatacaggagacccctctcgcaacggaacctctccggagaggcctggaggagccgccgccggcagcatgcttgtgagaaacgtaagaaaaccctagaacgcttcttttttcgcccctgccacgtcagctgtccttccgacctagtaaagacaccccttttttaaaactggatttccacgaccacaaggttaagagccttgcgctctaccaactgagctagatgggctttgtggtgcttgtaatgggtttgtctttccttgcggaagaagaatcgggtcaaccattctcatccttcctctacatcaaaaccctaatttctatattacatctctaacctcattcatatttgatatataacaccattcatttccttgatctctcactcatcaccctcacccaccaccaccatcaaaccctagttttgtttttcccccaatttcgtttccttgatcgtggatcattcttgctcagatctctgttagcgtctttgaatggtagaaacaactccgatcaccagagaatatatgctttcccattgcacaaccgcaagggcgagctttttccttcgtcgtctctccgccgcatcttctttcaaatttggcttctccaaagaaggctggtactaccgttgcatcggcgtcgacccttgaactcctcaacacggtttgtttttttaataaacctttctgattttgaaatttgata

SEQ ID NO: 12579 - DNA, 3000 bp, Unknown
  misc_feature (1)..( 3000): cDNA_ID_2781800_gDNA_ID_2214559_Annot_ID_185848 3000 nt of promoter + ATG
cagcaactacatgaagttcgtcaagagcctcgctgctgacatggatgatcacgttctcaaagcctaaatatccctttcacatcaacccatcatcacctaatatcatgatcatcatcaccctcatacgtacattgctccttttgtgtgtgtgtgtgtgtatcgtttttatggtgttttcaatataataaatgggggtttacatgtatggtttcatctactataatatgctttgatgttgtttattatggttgaggtttcatgtatgctcatctacgcatgtatccttgttaattaatgattttcaagagttatcaatcaatactgcccttttttaaagtgttgcactacgtatgtatcagcttccacaagctcacattgtatacagcatttgtggttgtattattcatcattttgtacgttcaattatggttattattcatacacagtattcattatatttatagtggttgtatagtatatttagttgctgttgctgtctttgtatgttcatttagtgtatagtaattaatgctgactttataagttcatatagtggttgtaacatttatcatttctatgagtatatattattactcatgtcctccgaaattggacaacatttaaacgatacaagcaaggaagacaataaaaatacaaaaatatttccttcgaaactctagtaaagaaagcatataatgaaaccagcatttagcaaagatgaggggtctatgtgggatgggggtcttgttggttcaatgatgtaaaaaatcattacgatttgttttaaggctattgtttttaatgggttgatatatgaatgacgaggacaatggtcatgtatatggattttgtcaaacctactaattagaattgtgttgtatgataagaacttggaaaacgtgaattatgtatggtatacagcacaatcgcaagtatcagtaaatatctattaatctaacatataaattttgagtttatatgattctatatatctttgtaaataaataatgtttatgctgtgcttgacaaaaaaaatgattatgtgtacgtacgtatgctaagagatgatcaaaattataactagagacattattagagcaaagtaccagataagacttttaaagatatttggaatattatatgaaatatgaaagtatcagtttaataaatactaaatgtagaaaaattacaatcgtgacagttagcttaactcaaactttatactaaaaactatctatactattaattgggaatcatcggaaaatttacaaccttttgaaacccgcacgtatgtgcgggtcaggatctagtgattctttaaatttggaaactcgaatatctcaaacgatattaattattcaggatattgatattacatggatggatcatggaaataaagcgacaaattgtttggagcagaatggtactatacatcatcaaatggagagacgtcaaccatgagaactgcaaatctttaagaagtctatcctcactacatgcagaagtggaagcgcttctctgatgatgaggtgtatgattggcgctaacaatcaagacgtagcttttctaatagactattcagatcaggtgaagatggtgtctttcctaaccgaatgaccagccttctcagtgtatttggaggatttgaaaaacgacaatgaagaatttaaaagttttcttttatctttaaattttagtacaaatgttaaagcggataatttggcacgaaaagttctataccaaatcacatcatatcacatatgcaaacaacattcttcgggaatggatctttaatttgagttctaactaatatcggttgacaaaagaaaaaagtttagaaataatattatctcatttaaactagatacataaatgaaacaacaacacacccatacacacaaaaagcgactctattttgttaaatagatgaagagcctcctctagaagatgaagtgatatctctagaaccagcactttcaacctagccacatagtgatggattgattaaggacaacacctcagaaaaagacttgtctatgccatgtatactttcgctaagaagtaagaagggagtgatttggcgccaggtaattgcaatgtttgaagcggtctttttgggggtctagctacttcatccttccaactgtagctatcttgagtctcagggaagatcataaccattgtgagcttgtagaaaaaggcttctacattgtcactgtgggcactcgtgaactgccagccaattttagaggtctatatagaatcttttttatcaagaaaatgtgtataacatataagagcaccctcaatagtgtatcttagcaaaatcttaggattaaaagcaattaaaataaagcaaaccaacaatccaaagctaagaagtgtatttttctttagatgtttttcttaagttaagatgtttttcttaagttaagatgtttatatgtgttatttgatgattggtttaaaaaatgaacaaaaatagaagatattgttttagaaaaaatgaacaaaatagaagatattgttttaaaaatatcaatgaaagtcacagctggcaggaaatctacggtatcgttatctggtggacttttcggcattcaaggaacaatacatcatatcaacaaacaataattatggtttgtttaaggtttaaattaaaattgatgtatgcatttgtctactctaatccttatcattgattcattatatgcttctttttttgttggtaaaaccattatatgcattttgtcaaacctatccttatcttaataacaaacaaaatacattgtatgataagaacttggacaacgtgaaatatgactcattctaaatatattagcagtagatatcaaataagtataaaacccggctcatctattttacgtctaaaccgttacacactctatatataaacgaaggaagatcacacgtgaaaatagtcatcaaccaaagtaagaagcgcacacacacaacatatttctttcactacccaaagag

SEQ ID NO: 12580 - DNA, 3000 bp, Unknown
  misc_feature (1)..( 3000): cDNA_ID_1974269_gDNA_ID_2214559_Annot_ID_185846 3000 nt of promoter + ATG
gttttgttttgtggttctacgaccatttttgcaaaatgtaaataattttcagttgtgtgtatattatatatctaattgcagcttcattgtaaaatgtaaataatcttcgattaattttatacttttatttttttgggacggtttttgtgaaccaaaaatattgtttaggtcttgaacactttcatagactacatataatccatcaagactggagaccggagaacgtgatgattatgtatgataggaagactgtaaatgaaaaaatagatgacatggacattgctaagattgaacatggacattgctaagattgaacatgcaccattcttgagtcaccttgccagaggttgttatgtttcttataccttatattgatttgataaactaaatgatatgccgtaattgtcaacacgtgattgagttttcaaacaatctttaagaatgcatgtgtaaaaattgtaggtgagcggagtctgggtctccaaccactagagcaatttgacggcaaaaaggaaaccactgcacctgattctcggtaatataatctccaatctcttttcaatttttattccgctgattattcgctaaaatgtatatactccttatttgttgtctgatcgttaatgaagtgcttcttcaccccttttttgaccttacaacagttattggagatgcaaagtagaatgtaaagctagatcgtaatttcttagaacatagcgacaaaaaacagtgtaaagaacttgaacgctccaaataatagctacatatatttgataaaagattacaagtatgacaatgtgattgatttgttaagaattattcccaacattgtgcatcactttggttgactcccgaaaaacataaaagtatgttatttcaactctaattatttgtccatatctagaactagatcggaactttctacacaaaaaaaaaagaactagacgtgaaataatgaaacaattcaatgagaccttattagtgttgtaataaaatttagtattattacttattagtgttgtaataaaattagtatgttaaaatttatattttaatatagccctatattcatttattcactatggttatttatctatattttgatatatgtgaatatttgtgggtccaatgtcctcttaaaggcatgttctttgattgctggtttgattataaaatcatttttcttgtaccatttttattttgttttgtgatttttcttccacttttgcaaaatgtaaataatcttcagctatgtatatattattagctaatttggtcatataaacgtagcttagtctatagtaaattaatcatctacatatgacttatacatgcataaagtgagtataaatgtatgtttacatgcgtaaatcagaagaacctaaacatatttcatttagtactacatgttattgatttttctacctagacatggacgttgaaccccatcaacatattaaattcattgtctgatattttctcagaacatatatacttttattgtttttctgccgatgtggacaacaaaagcatggaatacgttcgaccaataaatcttcgtctcttatttgattaatgtgagtgtatcaccaaaacttgaattatttgccatttatttttatatccgaccgtggactataatttctttttattatttggttatatattgtctccgtttttggtttaaacgtcgattcaattttgattgacatttgaatcgaagccaaatcacgaaaacacacattcgagaaagcttagaactgaaatgaaagagtgcaaaaaagttacaccaatataaagttgttgaaatttcggaatcttgtaagattaaaagattgttagtagaaaaaactcaacctcccaatcaaaaattacaaaaatagtaaaatattcatccacaaatttcatttttttaaaaagagaacattcacacacacttctagattgatcaaagataaaacacttatataagttcgactaaacctaaagatattatcctcattaattagtcacaacttccccaaccaatttcttaagtcaagtaattcctttgctccggtggaggcattctcaatgtttaaggaattagtggcgggaccaagaaaaatcttatcaaagtcaaacaataaaatggagacaaaattaagtgcaaaccttaaacttgaacgggtcatacacaaccaaatctgccaaaaaaaaaagtattttattcaatgaaaaaaacatatattctataaaatttgaaggcatcattttcagttttttcaccctcttctcataacgtaggtcccgaccatatttgagattttatccatcataatgaaaaatgaactaaacggctccctttcaacaccacattaccgacacccaatcagctttaaaactcaattctatggttcatttattttgaatctaaccatattattaagatgtggttggcttacacaatcaatagttatgtactataccaaataacttattgaccaatcctataaagaatcgtttcaaaacacttttagaaagatgctttactttctaaaacgatcgttttcagtcaggttttctatcggttcacctattttctcttttgtagaaaggcgatcgtgattgttaccggcctcactaaattatggtttatatattataattatctatggattgattatgatttcctaggcatgtacgtacgtaatattttttttgtgcgacgtttcagtgaaagtgtagttgatagtgaatgtttcgagttcaagttataaatcatatcaatagtaatccaaatctttttttttgtgatacgaacttggtaaacgtgaatcacattttgtaataatgcaagatgacagaatcgtggtaagaaaaagtaactaatgtaacttatttttacgttttaaccgttatattctctatataaacgaaggagaaatgaaagtattcatcaagtaaagaaacaaacaaacaaacaaaaaacacacttcactcgctacacaaggaagagag

SEQ ID NO: 12581 - DNA, 3000 bp, Unknown
  misc_feature (1)..( 3000): cDNA_ID_1442067_gDNA_ID_2214559_Annot_ID_185842 3000 nt of promoter + ATG
aacagagatgaagtttataaagacgacaagagattagttcacacaggtccaaatcctcttcacaactgaaacactaattagcaacacgtgtctggtctctctccaagaaactgccttgagattctgctttgaatcaatctttatgttttagtcataatgagatgtggatcattatccttagccttgtttaattttctgtgaggctaagagttaatgatcttgtttctcacttgttgtaactccttttgcttcaatggctatcatcaagatccaatgaattattattgattatatagttttgtatttatttacttaaatcagtatgttttcggaatttgtaatttttttatatactaatattgtaagcaagaaaaaaaaaatggttgaagattcgaatgcatggatttcttcgaagatcatgttctatgcagaaaaagaaggttgtctttttgtgttaaactgattaattattgttatttaaccatataacatataagttattaaaatcaatgttgaatgggtccaaaattgtgtattgttaaatgataaatttataaatacatgaacatggaaggtgttgactgctccttcgagcatgacaaagggagaagcagagacttgaaattgggtgaaactcatgcattttcgatttttcctacatattataaagctagctagaatatggtagactctaggtgaaaaatacttcttaggtcgtgcattaagcatccgatctttctttttaaaacggccatggatgtaaattcagcctaatcatcatatacatgctgagtaggtgccctaaaagttcctaacaatatataaaatcgatcaaaagttatggatccaaaaatatgtggtggtctagtggttcttgaaagtattcaaggtcactacttcaactatatttgtagcttacacgtagtattgttaattgttgaatttggacattgaaaaagattatgaatcaaagattcggaacttccaagatttatatcataaaaagcctacaaatgcaattattagaaaactaaatctaacatactcatttttagtaaatcaaagtattttctttttgttagtagtaaatataatcaatgtatagtttgattaatcaaaattacatattctgattgactacatctaatctattgtgaaaacaagtccatacacaaagatataagttaaaaaaacgtacaataaacttatgcgaaaaatctgctaaatgattattgtgacgtgtggaaaaagatattatttaatagagtaggccatttagctttaataaaatttgtatcatttgaatgtgtttgaacttaatgcatacggttctctcgatggtgatgcctcccctctatatttttttctctcttttttgagtattatttacaaacgtacaaacataagtaatgctcatatatgaatacttgtttactactattcactcacggattaaaattctattttgttaaggtatatgagtctttaaatacagaattttccaattatacacaaccaaattaatatttgaccaaatatatgcaaacttcgatacttgtccctgtttttttttattacattaactaatatacattgattataaacaacaaacacatcaaaatgtatacataattagatcaaaataaaaatgttcttttcttcatccttgaaatctattactcattatgaatacaataatttaaaatttgggtccattttggttaaagaggaatatcctcagagagaggttgttgaatgtggaatgaatgtttgcacagtgtggtgagccataaatggagagatttaaggagctttactcattattcaactacccccctttcccatctccattttgtttctcaaaacaaattcatcctaacaaaattatagaaatttcttctaaaattcaattttttggatggtatttttaatattgatagattccctctgttccttaatacttgaatttctagaaaacacacatattgaaaaaacatattaaaagctgattataaatatattatttttgtgatttatattttttttttaattctaaaccaataatatttaattgtttatcttgaaatttgatattcatcaataataatcaattaatattatatagaaaacctaaaaatcaaaaacaaaacagaaagaatatttatttatttattactgttttagaacatgtaatatgggctacaaaacgagtcattcggtccgtttgatttgattagtccaatttaaagcccatttaagatgggaaaaggaaaaaactcgacccacgcgcgtctattgggctcagttgtggattttgctaaaaagtggcctaaatccgtggactatagctggcgattatgacgcaacgcgcctcccgcgtgaggaccgcgcgtgggattttcctgaaacactctcaggttgtgacttgtgagattttttttttttgtttggtaataaaattttctgagagagttgtttgataagaagaatgcaaaagttctacatagtccaaaagtaattcgtaaacccaatctaatcttattattaacttattaaattttggtgtaataactcgataaagttttcgcgccatattgaaatcatgtttactcatttccttttgatcttgcaaattatacgcataataatacatgttatttctattgtcaagcaagtacaagagtgtaagtgtatatctctctctatatatacatatatgtcacatgtgcataaagattttggtttatctataaaacaggacaaaaggcaaagtatagtagacccgaaaaacaatctcttggtagccttttcatctctcttgcatcacaagtaaacctctcatcattcatttccacacagcactgaaactcgagcatttgctctctcgaatcccatttccctagctaaaaggttcggaattccacaacaacaacaaaagacctattttgtgaatcttttctctaaattaagagttattagggcaaatttctacatagcatg

SEQ ID NO: 12582 - DNA, 3000 bp, Unknown
  misc_feature (1)..( 3000): cDNA_ID_3025728_gDNA_ID_2214559_Annot_ID_185841 3000 nt of promoter + ATG
cattttagcaatcttgtttatgtcaaagctgttgacttatctctaccatgttatgcttagatatgcaatgcggttgctgtggcaggatatcttaatgcaactctagtaattcccaactttcactatcacagcatatggagagatccaaggttttagattgctttcttctgaaaatcttgtttgtgcaaatcaaagccatcttttgtagattgctttctgacagaggtttttctttcagtaaatttggggacatctacgatgaagagttctttgtcagtaccttatcaaatgatgtgcgggtggttgatacaattcctgaatatctaatggagcgttttgaccataacatgacaaatgtctataacttcagagttaaagcatggtcacctattcaatattatcgagactcgatcttgccgaaacttcttgaggagaagtaagttacaaattgttctttagaagtttgttttcatgtggtagagttagttacacattgttggtagggttaaaaatatagtaacaggataaaccaccttttttctagcggaagatatgttttggatctgtttagcacttgtcattgaagaactgttctctttgcatggcacaggattatacgaatatctccatttgcaaatagactttcttttgatgctcctcaagctgtccagagacttagatgtttggcgaattacgaagccctgaagttttcgaaaaccatactaaccctaggagaaacactggtgaagagaatgaaagagcaaagtgcaaaccacggtgcaaaatacgtgtctgtacatctgcgttttgaagaggtttgttccatgtaaaggagagacatctatagaatccccactggtctttatcatggttgtaaatttttgaatggagagttttgtgtctgagttgaaagattaaataagctatatctacatgttgcaggacatggtagctttctcctgttgcatatttgatggtgggaaccaagaaaaacaagatatgattgcagcaagagaacgaggatggaaaggaaagttcacaaaaccaggccgtgttatacgacctggtgctatcaggcaaaacggaaaatgccctttaactcctttagaggtatactatcaccacaatatattagcattctcggatattttcttaagctaatcatccatcagaatagttccacaaacccttgtgagcaatagtgtgacttgttctgtttggattatacttttcttgtaaattattcaggtgggtttaatgcttagaggaatggggttcaacaaaagcacatatattttcctcgcgtctggtgaaatatatgatgcgaatcgaactatggccccgctactagagatgttcccaaatttacaaactaaggagatgcttgcatcagaggaggaacttgctccatataaggtttgcttctttcctggtgtttgttccagagtatatttctcgtgatgaatgataaatctgacttgaaactctgtgttcagaatttctcttccagaatggctgcaatagattacacggtctgtctccacagtgaggtatttgtgaccacgcaaggtggaaactttcctcatttcctcatgggtcatcggagatatatgtttggaggacattccaagaccattagaccagacaagcgaaagttagcaatcctctttgacaatccaaacatcgggtactcacttcttctactcttcgtcttcgataaaccctaccaaatctccacatgaataaaatttgaattgttacctttttattcaccataccagtgttgcactcacctgcaaaccttacaccctgttactgtgttatcacttattgctcaaacgatgttttgccccgcagatggcggagttttaaacgtcagatgctaaacatgaggtctcatagtgactcaaaggggtttgagctaaaacgacctaatgactccatttacacattcccttgccctgactgcatgtcccgtaggaacaaaacaacaaccccagaatcgagaccacctcctgccacctgaaaacacacatttgattaccggccttccagaatctgcttctacaggctacgttcattccttgtaattctaattctttcaaatcagacacaggaccttagtgactcggcctgcccagaattttagggaagacagcgtttgaatgggccgtggaatcatctatttattctccggcgaggagtaacagccacaacattgtttgatacctttgacacattgaagctgatgtatctaacaggaaagacgagattgaagttttaacacattccctagctgctgctgggcaaagaataggacagcgtttggattttggtgtttttttcttggggtgttttggtggtttgaagaagcgtttgcgttttgtacattttgtgaacgcaggctttgtgttaggagatatgtagagagagacggacaagggggagaaaagaagctgccctaaaagttttgtacattgatttggttagagatcattgtctcttcttttcttttcttttctctgatcatagggttttttaattgtttcatcatcatattcttatgattcttttctttcacaagataattttttcaatagtgatttaattcatttttgcttcttccagtcgtgttcatgtttttcatttgttcttatatcagttttaaatttattcacttcatgtacaatggggtttgcttcatctctaatccaacaaatacaaacaaacaaaaaaagaatcaccttcctagtttatttctatgcgctacttaagcgcgtgagaaagtacgatccacgtggaactagcttctttcgccaacacaacacagagtttggctcacgaaaaagtgtgcgcgtggggaagaaaagggtctcatatataattggagtgtaaaatgtttgacctttttgtttgggtttatctcttttagactcaacaacagataaatttgttggtttcaagtattatcaatttcccggcgaaatctccaccagagtt

SEQ ID NO: 12583 - DNA, 3000 bp, Unknown; identical to SEQ ID NO: 12576
  misc_feature (1)..( 3000): cDNA_ID_1807367_gDNA_ID_2214559_Annot_ID_185839 3000 nt of promoter + ATG

SEQ ID NO: 12584 - DNA, 3000 bp, Unknown; identical to SEQ ID NO: 12575
  misc_feature (1)..( 3000): cDNA_ID_3025736_gDNA_ID_2214559_Annot_ID_185838 3000 nt of promoter + ATG

SEQ ID NO: 12585 - DNA, 3000 bp, Unknown
  misc_feature (1)..( 3000): cDNA_ID_2990201_gDNA_ID_2214559_Annot_ID_185836 3000 nt of promoter + ATG
aactaaattttgtataaagacatatcaattggtaaagatcgtaggcgaaacttaaaaatcgccgattcgattgacgtttgtgacgaaactaatattacatgtcgtggtttcgaaccaggggaattacgggcttcgacccagaatctcctgatattcaaaaaaaaaaaaaaaatcaatcgtatgacacgtgacgtgatcattcatgcaagacgagaccttcgtagtatggtttcccgcactgacattaatcggggagatagtcgtgatcgtctatatatggtgagtgttggaggatctaacgattcggaaagctaaagaaacgtcaaatgtgtgactgagagccataatatgtattagccttgtaagttgtacccggccaccatatataacaaggtcaattcacgtcattaagtcctactaagtactaaccacatatcatccacgtaaataaatcaagcccgcgagatccacgtaagttttaatccactactaacgcaaacgtacgtagaagtgttttcagaagacaccacatcgataggtccagagatcgaatacctttggagctcctatggaagagttattcagaataatttgcctccacaagtattatttcatttagtgtagttcttaaataagaaaaaaatatgaatgtgttttatgtccttatcgtgtttcgtacattatcttccgtcaagataggaagctttttcatttgatacattatcactttcaagtgaggtcaactctttaatcaatgtaagttgattttgcaattagaatttgtggcgtagcaaagcgcaattagtttattcatttatttcaattgaatgatgaaagttataagtattgaagatatttgacctttggtatagaagaaatactcaaaataaaacgttgactttagtgttgaatcatacttcctttgtttcttaatatttgtaatttaaggtttttacaagtaaattaagaaaatatataaattttatttaatttatctatttcctataaaaacatcattagttataactaatctaaccaataagaaagtaaaatataattagctaaaaactattaaatatatttttgtttgcatagaaaagtgagaacaacacttataatagaaaaaaagaaatatttaaattacacttagttagaaatcgagaaaatataaaacaatgcgtttcagatataatggctcttcagttcgtgatcggcgaccgaggaaaccaatctatatagaacttagatataggtttaagtatacttttcatccattttttgagcttcttaactcgtagaagaatgtttgttataccttactataaacatggatttatatgcactccttcttgggttgttttctcttcatttactaaaatcagttgaccaataataagatataaaaaaagtacccaagtctacgcagttgttacggcccattagagtaatgaagagacaaaaagcaagcaacacaaaaagcgacccaacttgagcaccgtcacaaaaacggcgtcgttccaaaggatggtcaacaatggtgggaacctctgcacaacaaagagactttcctcgagatttcttatattcgcctgctaaacgctgtcgtattagtgggtagatgaaaaagacagaagggcaaatgagccgtgtcttccataattctcaacaagataagataaggtatggctcgcatttttaggtattgtttaatcttcggttgcgtttcttatctttttttttctcctaattttcatttacagtgatttgatttcagctcattcctgattttcaattttctgatttcagcaaaaagtccttatctatttttttcatttatttaaggcaacttgttttctaaaaataggaatggaaaaataaaccgaaccgatatatttaaccgaaacataaaactaaactaaatcaaattaaaaattagaaaataattgaatagatactaaattctttaaccaaaagaatcgaagctgaatcggtgccgaaccaaagtattttggtaaccaaaaatatccaaaatataattatattttcaaactaaataattaaaaattcttgaaaaattatataaaatagtaaatttattagaaattaaccaaaaatattcacaaatattcaaaacaaattaaccgaatgaatactaaatttaaaaaaaaaaaaacagaatcgaattaaaatcaaaccgaaatactaaattttaaaatcgaaaaaattaataaccgaatggatacgaacggaaaccgaataaataaccgaaaacacatgactaaaaagaggtattttcctccataattaaaaggtgtttaataatagagtgatcggcgaaaggtgtgaaattagctgttttgtcttgaagcggattcatatataaaagagcgtgtgccctctttgcttttaatttcagacaatcttcttcttcgttgcagcttcgtggaaattattttctctttctcttccattattatcttaaaggtccgtcttttatccttcttctttttttgttgttgtcctaaaattagggttcttccttgtgaatattgcttgatctaggaaactaatcaggatctgggtttgtcttttggatctagggttttattatagcatttctgggttctttgttgaccaagaagaagatttgtattgatggaatgttgttgatgttgttgtgaacagtgagaaatcaataagatgttggagaaagagtttttcacggagtatggtgaagcaagtcaatatcagatccaagaagttgttggcaaaggaagctacggagttgttgcttctgcggaatgtccacacacgggaggcaaagtagccatcaagaagatgacaaatgtgtttgaacatgtctcagatgctattcgtatcctcagagagatcaagcttctcaggcttcttcgacatcctgatatcgtggagatcaagcatatcatgcttcctccttgtcgcaaggaattcaaagatatatatgttgtttttgagttgatg

SEQ ID NO: 12586 - DNA, 3000 bp, Unknown
  misc_feature (1)..( 3000): cDNA_ID_3025741_gDNA_ID_2214559_Annot_ID_185835 3000 nt of promoter + ATG
tgactaataaaattttacattttggatatatgagaaactagcatgggaggtgggttgataaagacaatcatgaaaagacaattctcatgtttaatttgaacactacaagaccaaaagttatctatcacacataactatgccggcttttaatccctgttttgttaactactatagtttaagaatcccttaattgaaacctgcttatgagtagcaaaagaagatgaaataggtaacaagaggtttggatccaaagagtagaaagaaaatgattaagagacaagacagaaacttttttgactttagaagatagcgatgtcggaagttaaatctgtgtacgtcccaagacgaatgatttgctcatcggaagctacaaaagctgtttgtacaaattggggatcattctctttttcgttttctataagacctaatattttatactactatgctctttcaaattatttgctccttccatttccatgacactaataattgacgctttaaataaaatccatacaaatgaattctttgaactgttgaaacttgaaagagagtggtcactatagcactgttacacttaccgcgatatttattgaataacatactaaattatataaattatcaatatcttaactagggatggacataaaatccgaaattcgaaaactgattcaaaatcgatccaaaaattccggctccaaaaccgaaccgaatagtcacaaaacccgaacgaaaaataaattcttccactgatccgatccgatccaaaaaccaaacggatatccgctaaacccaaaataaaattatatatatatataatattagttatatttagctataatttatacccaaaaatatccgaaataaccttgatatcagatttattattagttatctttgttatacttatacaatgttttacaaaattaaacaattttttaggttttttttttcaaaaactgatccgaaaccgatctgaatccgacatcatccgaaccgaaaccgaaccgaaagtcatatcatccaaacggataataaactccctcatcagaattatccgaatccgaattatccaaatacccatgtctaattttaccattgctttttaagccattaaccataaattttgggagaacattgattggaagactgtgttttacagatatatatgtattcggttgttccagtaaaagaagtagacaatgattaatgtaagatgtgtttaatcgaccgcacaaagaatatggtggtggtgactacacaaatctggctgatgtaacaactgtctaaaacattttctattctttttgaaacgtaataaacgcaaatcatatcatgcaccaacaagtagaatcattctttccataaaaaagtaagaaaataataatgataatcagtagtaccaatttattttggaaatgtacactagataatcctgcatttataatatattgataattgaccttgacctttaaactacatttttgttgattactatttgaacaacataatttcacaaaagtgcatacaaatattttcatcaatccacacgaaaaatgacatacccctttatttcctattttgccaccatagtaaactacttaataaaggggtatatgctttatttaacctaatttaacctttattttgttgtgtataagtcctaatgtttgtataaacataagtataaatccttaccttttgaataataagctttttttgctgtaattaatttggtcagtatgattgtacaatgaaacattattctcatgcgtttcacgagctagcaggagaatatattggactcatggtgtttctcaaagcagaaaagagaaaatgattactatttttcttttgtcaactttttactaattttctctttatagaatatgaaatatgaatgagcaaatactatatgattgtcataatcacgaaactttgatatactaatctaatcgtggacacaactaaataattaagcagttagttaaaggaacgtgtgtgatcaagaatgcttattatatgcaaataaaaatatatgactcatgcaaatgaatgaccaagaatgcaccacaaaagttctagaccggtcaagtatgttatctttttttaattctcttaatgaaacgaacgatacacgtagaattgttaactagctagtttagtcaatatagttagagagtagttaagataatagacttttaaaaccatagatggaacgttacatgtttccatggttagccattggaatattgaccgagagttaatatataagctattactgaatctggaaacaaattcttatgttgtcttaaatgcgtctactttaaaccgtacaaaaattcaacaaacccaagttaatgtaagtaattaggatgattgaatatgcgtttctatctcaataatcttcaccagttatatatttctcactctcccattaataacaaacataatcatctagataatggaatgtaaaaaacctgctgggtcagtctcccacacggagtcagcattttactcctccatttcactgattgacacgtgtcaattttccgacgactcttctcataattcatcctttgaccggtagacttcagtcaacagccccgctctcttctatttattactatgactaaactttttttagctttttaatttaaaacccaattttccatactattttttttttttaaaaacttcttaaaaataatttcataggttgatgagataccaaacgcatcttaatattttctccttaatttactttggttatgtctttctatgataaaactactatttacgtacatatgcacatacacatataaactatatgctctatatcatatggattacgcatgcgtgtgtatgtataaatataaaggcatcgtcacgcttcaagtttgtctcttttatattaaactgagagttttcctctcaaactttaccttttcttcttcgatcctagctcttaagaaccctaataattcattgatcaaaataatg

SEQ ID NO: 12587 - DNA, 3000 bp, Unknown; identical to SEQ ID NO: 12572
  misc_feature (1)..( 3000): cDNA_ID_2709197_gDNA_ID_2214559_Annot_ID_185834 3000 nt of promoter + ATG

SEQ ID NO: 12588 - DNA, 3000 bp, Unknown
  misc_feature (1)..( 3000): cDNA_ID_2709189_gDNA_ID_2214559_Annot_ID_134857 3000 nt of promoter + ATG
gaccaccttcccgaggatgaacagccatccgataaggcagatcagagccaaccacaagcctacccagctgaaaataagtatccgatctagttataggaaatacaaaaccttgcaaatgcataagatctgctcctatacactcatataagaacagaatataaaacctttcctacttacaggttgttccgagagagaattggtgtttagatcaacacggcatattaatatgacattagagattccacttcgtccctctccgcctccgccggacaaaacgatgcagctccgggaagaagaagaagaagaagacgactcatcatcatcttcagatttctccggatccattatgattttggatctgacatctacctccggaatccagtcggcggcgtaaatcggtacaccgtaagtctgcatattcgacggttgattcgtctctgtactctgattcgccatcctccgtgtctgtctctcgagctcaatgccaagtccccactgattcgtaaaaatactaaatacaaaaaaaaatattaatgggctaacttaaggcccattacagtatttataggcccatcataatatttcatttatcgctgaattccggtaaagtgatagcggttggacccggttcacgggatagagacgggaaagagtacggcggtacggaggtcaaactcggcgagaaagagtacgtataccggatcctttaatttttataatattttcatttatcaccccaatactattgatttgatctaaaaacaccctatagttgtgtaaaattcttaaatcgatgtgttggtgatttttgacgtaggtatcatctgtttcgggacgaggacatccttggtacattgcacgagtaaaatgcaaaggaagtctctgagtcagctagtgggtttcttggtggaataataatttttcagtgactcgtttcgatacatgttgttgaaatttgaaagttttgttatttctcatcattttgttcctccttaaatttggcccttttataactgtctttatcttatgtctaatcgttttctgtgatttatatctttgtatttagtgtgctacttatataagttaaaactctacacgaataaaactcaagtagtgagatttcgaagatcaaatagtttgtaaactacgacgaaaattacaaaaattgcaacttgcaagtgtcactaactataaatcacgacattcttccctttcgaaaaatcttcatttctcgacaaaaaatttaggtttccaatgatgaccacaaaaagtggaaaaaaacgattctcgtttctgaaacgtttcgcttccgcgttttcattactgtttctatgctagagagtattagtgccttgttgtcatggtcatatatctcaattgaaaatctcctaaaactatatataaaatgacatatagtattttactaaatttaggaatcttttcatttatatagtaaaaaaataaaatagtgtcgctgttgccaaccactctctatccatctcagtttgcacatgcaacacaaccacatgctaattgctagtgaaactctcatactgtttaattaactccctaaatatttatcaaacaaatgatatctacgttttttaaaaaaaaaacatatctttagattatagagttatacaataatttccacatacataagcttccacgtatccaaatttaaataaatattttttgtgtataaaatgtaatccaaagatggagatctaaatctactaattaactcacaagtcaacatttaaatatgcttagaaaaataattgttttcgatctatgaaattatgtggctgcattatagtattaacaagcaatcatgcttagaaaattataatattgttatcaatacaattacaccctaattccttaccaaaaatacgtgccgtttcaagattagctaaatagagcatggaatcaacattgcttgtcgtgttggctttctcttcggagttgttaatttttaatttaatatttttactattttcatcacattattgaatacgaataataattgtattaaacaatcattattggaataagacttagatgataaagatattctaatcatttataaaatacgtagatgttgactttttttttttggcaactatttgaaatatatttgtttccaacgattattattttataaaaaataatcataaaatttgtgacctgcaatatgacattaatagttaaaaaaaatttcgtcaaaaggaataattcacaattttaaatagataaaaattgtaaccagaagatataccatcatatatatttacaaattgtattattatctattcataatacaaaacatgacaaaagaaattggttgagttcttgtcgggtattttccatatctcacacaaataaatcaaaaattgaaaaagattacaagacacaaacaatccaaaaaattaagtatcaaaaggcaaattttttatttttatctttagtttctcgtagtgcaaatattaaagcggttaatttgatacgtaaaattcgtgttcaaccgcaacatattatttacgtaaacaacatttttcaaaaattgcattaattaattttggataataaaaaaaaaggtatatactactaaaatatggagattaactaaaactgttcatcaagaatcttcaatatatatctttaaagagatttatttcgaattttattaaagaaaaaaatttgaaatctaaagggcaaccaaaaaaaaaaaaaaaagacaagaggagaaagaaaagcaaaggaagggcatgtgactgatcacggctttgcctccaccgcataaagctcccttcacagatacatacactctctttctctctcttccggcgtttattcttcttatttcgccaccgtcctccgccgccgtggtggacttatatctctgcgtttcacgacctgccgccaccgccggcgataggtttcaatgatgaattaaggcgttggccagagagagaagagagattgagatctgtcgat

SEQ ID NO: 12589 - DNA, 3000 bp, Unknown; identical to SEQ ID NO: 12580
  misc_feature (1)..( 3000): cDNA_ID_1974269_gDNA_ID_2214559_Annot_ID_134861 3000 nt of promoter + ATG

SEQ ID NO: 12590 - DNA, 3000 bp, Unknown; identical to SEQ ID NO: 12579
  misc_feature (1)..( 3000): cDNA_ID_2781800_gDNA_ID_2214559_Annot_ID_134862 3000 nt of promoter + ATG

SEQ ID NO: 12591 - DNA, 3000 bp, Unknown
  misc_feature (1)..( 3000): cDNA_ID_2712314_gDNA_ID_2214559_Annot_ID_134864 3000 nt of promoter + ATG
agtcaacagtcaacacatttatataagaaagtcaataaatattcaatcaatcaaagaagcaaaataatttcccgctcacatttttgtctctctattttttcttcggtaaacctctttgactaactatcttatcagaatctctctttccttctcaaagattggatctttcttcaaacttcagaaaaagatcgctaagagatttcttgatctgtgaaatcagaagaaatagtttttcagaaaatgagtccgcatgttttagatcttcctaagggttgtgaaatctctaacgatctcacagatttcgtaagattcattcttattatatccaaatctcttttatctgaatgatccaaattcaaattacaatttctctcttctttctttgctatgttttcaggttcactatagagtcgaggaatgtatacaaggctacatgagcaaagaagaaactgcgagttttatattcgatacatttggagtctcactaaagtttaccagatttggttaattcttcatctaaaagcaacttcatttttattcgatcatcaatgggtctgagacaaaacgtttaaaaattgaatctttaatgttgtagtttggtatcttcttgaaaaagcaaatccagatttcttcagatgtttcaaaacacattgcgagaatattcagaatgcaccaagtaagctataacagaaaccaataaaccctagaaaaaaaccctttgtttcttctcacccaagtttcatttgttgggtacaggtgaagaagtaacgtctaatgtagagattgaaaattgtaagtcctgaaaaacgaataatcagaatcggttttgagttctttttgtttgaatctcttgttattgttgtgtagcttttgaagatttagcagaggcaagtacaagctttacaaaaccagataacaaacctagagcaaagcgttcaaaggggaaaaataaacagaagcaacatccaatttctcctattcattcttgtaattaaacttctcttgtttcttattgtggtttccgaaatctagataaatttgtttgttgacatggtctttgcttctgttagtgatcgagactgctccaaatgatgcatcatcacaagtgcctcaagaagcagctactgctaattctagtgataccccaattcctgtggagaaggtttcaagtaaagcaaggcggttcagggctcgaaagaaagcgaaacaagaaaagtcacaacaagctccatgttctccttgtaatcaaaacttctctgtttttcctcagtttctcatcctgtgtttgttttgctaacaacatttattgtctttgtctccttttagcaagagggacttctgcggatgttgagagggctgaggtacctattgctgatgctgagataattttgaagcagatttcaactagaatgcgactgcttgagagtatcatagaacaagtacacaaactacttagtaatgtacttggaccacctccttctgctgctaaagccctcaagaaacagagatcatggaaacaagtgagaggtgattatgaacaagcagagatgcttcatgatctgaatcaacaagtccaacaagaaatgccgagaatggacatcccggggaatcaagctagcgacaactccaacgaagaagatacactatatgattgatagagagcatattcttacattagcatgcttagtttgtgattaccagaatatattcctaagctctatgagactttatattgttggttacgttaccatgtaccaattacaaaagagaagaaaccagtatatatattctatcaaatctcaatccatattattgtatggccaatcacaacaaaaaccagaacaaaaatgttgtgatgcatgatcttaatgagaaggaaccataaggccaaaagacttgttgagccaagccttccatctccctgaagtcttccgggttgttgttgttgtcatcatagagtcttcaaggttttgagtctctaacttgttagacaacacaaagttccttgatcccgttgaaccgattttcccctatggatcgaatgctacataagagattcaaaaacattaaccttagtaaaactgatgaaaagtcacaaattcaaagaggaaactgtagataccttcagaggcacagtaagggcaataaagtcggaaaaagctggaatctgatccgagaagtggaagcctgctttcacgaacataacatttgagagcataatttatgacattggatacagtttcatcttctttgacaacgaaacgaatcggaccagcacttcctaagacattgatgctaacaaggaacctgttggtagtcttcgatttctggtttctctgatgcttgttgttgtacaacattatcaaatttcaaaatcagaaaggtttattaaaaaaacaaaccgtgttgaggagttcaagggtcgacgccgatgcaacggtagtaccagccttctttggagaagccaaatttgaaagaagatgcggcggagagacgacgaaggaaaaagctcgcccttgcggttgtgcaatgggaaagcatatattctctggtgatcggagttgtttctaccattcaaagacgctaacagagatctgagcaagaatgatccacgatcaaggaaacgaaattgggggaaaaacaaaactagggtttgatggtggtggtgggtgagggtgatgagtgagagatcaaggaaatgaatggtgttatatatcaaatatgaatgaggttagagatgtaatatagaaattagggttttgatgtagaggaaggatgagaatggttgacccgattcttcttccgcaaggaaagacaaacccattacaagcaccacaaagcccatctagctcagttggtagagcgcaaggctcttaaccttgtggtcgtggaaatccagttttaaaaaaggggtgtctttactaggtcggaaggacagctgacgtggcaggggcgaaaaaagaagcgttctagggttttcttacgtttctcacaagcatg

SEQ ID NO: 12592 - DNA, 3000 bp, Unknown; identical to SEQ ID NO: 12577
  misc_feature (1)..( 3000): cDNA_ID_1808283_gDNA_ID_2214559_Annot_ID_134868 3000 nt of promoter + ATG

SEQ ID NO: 12593 - DNA, 3000 bp, Unknown
  misc_feature (1)..( 3000): cDNA_ID_3025755_gDNA_ID_2214560_Annot_ID_134870 3000 nt of promoter + ATG
agaaattctctccaaaatttcttatataaggtattttggagatgatttcttcactaatcaagaaacccacatattttttataataaaatttatctctctaaaataagagatttatgtttagaaaccattggtggagttgctctaacattttgcaagttttcgctaacagtttctatcatttctaggaaggtcaattttaaccctttcaatcttgtgatcataggttttataggtaagtttgtaagaaaagatataaaaatatgaaatactttaatattaaaattaatttcaacacaaaatactttcaaaatttagtttcttacacatcataaaataagaagatagatatctataataaaactaatctttttttatctattattaattacaatatcatatccatgaatcaatctgttatccatacatttttagagcagctcacgtgtactaacctacaaaatctcttttaatctaccactataaaattagatatttagttgttttgtgcgtaattacaattgtcattgtgataggaggggacatatgttatcggtcgattggtagtaggcaaccatggtaatcttcatttacaggttcttgtaaagaaaatgttgatttgcttgagtggtcctagttttcttctttggattaaagttagtttgcctactatatggtttcgatttcttccgatttcggtttaattttttttgctttgtaactttagtacttatgttttccttgcataggcctttgatcccagagaactctcgttttccttcggttttgtttccgagtactttaattttgcctattcgtttaatttttcttgtttggattgtgttgtagtttggtttttcagcaaatttcagttaaaaaattcagatgacaaaacaaaagaaagtttgtattaagaagaaaaataacaattatgtgtattggctgaaagataatactctttttgtttcttattattatttttttctatcaaatatttttcttaacaattatgtgtattggctgaaaatgttgtattattttctaatgcaacatttattaaatttcaagaaaaataattaaatactattggtttagaacaataagaaattgtaaatcacaaaaaataatacatttatacttaacttttactattttttttatttgttttaaaattttagaaaatatattattaaaaagaaatagattaataattaagttcatttttaattggttgatgttaaaaggaatcaattatggattttctatttttttggatggcatttgtggattttgcctctttttgaatagtttgtggattttatcatttttaacctacaaaaatataatttaatatgtgttttatcgtcatatttaggttagttagttgtaattgttcttaaaatttagtatttggtataaagtatatacttttaccaaacaaatccaaaatttgtatattttttaatattaaaagtggtaaaccataaaattttagtaaaaataataattttaaaaaaaaatcgacgaaatagggcaaaatcaacgaatctctgtaaacagtaaacttataggagtagaaactaaatttttattttaatatagttagaacctgcataggtcggaccctaaaaatatgttctggatttaattatttagaaagaaaaatatagaaaatgtatgtatgtcaaaaagtcttggaccataattggcggagagagaacctggggacggacaaaaaagtgacaatttgctccgacattaaagataattaatgaaatcaggtataattaaatgaacgcataaataaatgaagagagatgatgatatatgtataatcgtaaacgcatagagtagagaggacacatggagccacccttgtggtgtccgacaattacttttaataatccttccttttaatgaacttctattattttgcttagatatcatttttttttcttctatgtatgataaagttctacatttctggtttgtaatcttctaatattttgatagtagagagttggaataccataacatgttggaaatgttttccattttgaaaaccaaaacttttttttttaaaacaatttttagctatcgttatcaataagttcatcacttaaatgtttttgggaagttcacagtattttggaagatattctattaaatatcaactatttttctagttttgtgtgctaattttttcctcggttatctaatgttgtggttgattttattgcaaaactatgtctaagtttgtatggttagaacatcatttgagcaatataattaagtttgtgcaaaaaagaaagttgatcacttagtattaatttttcattatataatttgatcaagatgcttgcttaatccgatctagataataaacaaaattatctaaacagtatgaaactacaagttcctaatagttaatgttttgacatttacaaagcaactaagtaaaatgttattaatgaattggttactttttttttggtaaaaagttaaattcatatcatttttaaatttttgacagaaaatacagaaatcacagaacaaatgaaaacacgctattgaaaaattaaaaacaacaatattattcaaaaagcttttggttgctactgaatgaattggttacttgtttagattgggtaacaaaattctaaccaaaactagaatcactaatactcattctttaccaaataatacttcaaattcaaataagagtttgattgtgaaagctgtatagctgtacgtatcatgtccatattacagttgtaagccattgttacaaaactactaaaaacaaaaataaataatagaaaggtccgagaaacttgaataaaaatttagaatttttaaaacattattatcgtaaataaaaagagaacctcccaagaaacaagtcgtccttatataaagccaaccacacccctttagcttctctcaccatcatcatcatcatcatcatcatcatttctctctatctctttctaaaacacaacc

SEQ ID NO: 12594 - DNA, 3000 bp, Unknown
  misc_feature (1)..( 3000): cDNA_ID_2709213_gDNA_ID_2214560_Annot_ID_134871 3000 nt of promoter + ATG
gtatagctgtacgtatcatgtccatattacagttgtaagccattgttacaaaactactaaaaacaaaaataaataatagaaaggtccgagaaacttgaataaaaatttagaatttttaaaacattattatcgtaaataaaaagagaacctcccaagaaacaagtcgtccttatataaagccaaccacacccctttagcttctctcaccatcatcatcatcatcatcatcatcatttctctctatctctttctaaaacacaaccatgactgtttcttcatctccatgggctctcatggctctctttctaatggtttcttcaacaatggtaatggctattcctccacgcaaggccattgatgtaccatttggtcgtaactacgtcccaacttgggcttttgaccaccagaaacagttcaatggcggttccgaacttcagcttatcctcgacaaatacactggtacaattactattaccaaatctctgcctaatgatcacaatgcaagttttgatattcccattttttatttggtatataggctaaagcttaatttttaaaggttaaattttcttgagtttaaaactacatttcatttacagattaagtaattagcattaatcatctctattattttacaactcaatatatttaaattttatttaggctttgttttgtaaaaatatatttagatttaacatggtcctactagtgataattatttttaagggctaaattttcttgagtttaaaactacatttcatttcacagattaagtaaatagcattagtcatatctattattttacaaatcaatttatttaggatttgttttgtaaaaatgtataaaacaccttacttttatctttcattaggccccaagatcttaggtacactcactcactaactatgttacatgtgtataaaaacaggcacaggatttcaatcaaaggggtcatatttgtttggacattttagtatgcacataaagcttccagctggtgacacagccggagttgtcacagctttctatgtaagtctctctcactagtcactaataatacttagatcaaatttaaatgattaacaatatttattacaaataaattgtgtgaagctatcatctaccaacaatgagcatgacgagatagactttgagttccttggaaacagaacaggacaaccagctatattacagacaaatgtattcacaggaggaaagggaaacagagaacaacgaatctatctctggtttgatccttctaaggcttatcacacttactcaatcctttggaacatgtaccagatcgtgtatgaataattctatccttcacacttacttacattacactttttcgtatattattatatagtgaaaagttgtcagaattaacatggtcctactagtgataattattgtttttttttcatattcggtgcagtttcaaattattagtattatttttcttaaccttggggtggccaaaaatcttgatcttatcaaaagtagtggggtcttgtaagattatcttagacagagactcttgagtcaaaaagttgtagactttttcagcttttagattttctaaatgttcaaataagctagactacgtggataggtaacataagtgactcactcattagtctttattgtggggtattcaaaatttaactaaactctaagagtcatgtgttgtaaaccggtgtggtttactaaaaattgatttttctttgatcagattctttgttgacaacataccaatccgaacgttcaagaatgctaaggatctaggagtacgtttcccattcaaccaaccaatgaagctttactcaagcctttggaacgcggatgattgggccacgagaggcggtttagagaagaccaattgggccaatgcacctttcgttgcatcttacaaaggattccacatagatggttgccaagcttctgtggaagccaagtactgtgccacacaaggccgcatgtggtgggatcagaaagagttccgtgaccttgacgctgaacaatggcgtcgtctcaaatgggttcgtatgaagtggaccatctacaactactgtaccgaccggactaggttcccggttatgccagctgaatgtaaaagggacagagacgcataagttactactcttgagggttttaatgaatttatgctatcattattatttgaattatgcttgttcaagagattgatatatgtattgtttgttggcccatgatgtttatgctatatttgggcctaaaattacatgttataattcatatatgtattgattagctatgtattttcatatgttatgatctacttacaagttttattctttaacgtggtaaaagtgcatttggtattaactaacataaacgtgattattattaactattattgagcggccgctttttctctaatttctatgtaagacacatgaacagaagaaactagtcccttcctcacatgcctgctttgcgagactgtttaaaatttacacattttaaaactataaattattgagaaatatcattctatatggatagaaaacttgttatttaggtcttttcaaaatccattgttaccctaacactgttaacataactttttacgcatgtatccttacgttattgtttttgtcagttgtaaagtatacgcgaattattgcatgttgtaggattctaagattgtagtggaatattgcgttcgggagttttttttttttttttttatgttttcttctctcctactaacgaacattcgtgtgctttcattactatataaaggagagagattgcgattgaggcagaagaacataaccctcgtcttaaaattttcttgtgttatcagggttgattgtcaatcgatatcatttccttccgattagagggttcttcattcgttttgggtaattgattttagtctcctctctttgattttgtttcttcatttgttttatctcgctgtgtcttattagggtttttcactttgtgtagacg

SEQ ID NO: 12595 - DNA, 3000 bp, Unknown
  misc_feature (1)..( 3000): cDNA_ID_3025745_gDNA_ID_2214560_Annot_ID_185873 3000 nt of promoter + ATG
ccctcgtgttgaaggaagaaaattatccagaatttatattattccatcacccgtgacgtaatcggatggcacagcctcacaaaccaccaaacgtggcactctccctctaagctctacccataaacttcgctacgtcttatttttcctagattcttattgcactttgatctttgtctcctaattacttaaatagatagattccattgcaatctaacatgacacactctgtttcttacaagactatattttgagaactttgattgaggccagggaagaacgtgaaggagtgtactactatacgggtgttttggctgctcaagttcacaaagcctcgtctgatcatgcatcgtatagagccttgtggcattgtagattaggccatccttgtagtatagtgttttatcttctttatgagaatgtcatcaatcttcacaagatgtttgcaaacttaatagttgtgtatttattttgggctaaacaaagacgagaggtttttcctattattattaacaaaagtttggaatatttttctttagtccattgccatgttttggtccatatagaattccaaccacgaggggggggggaggtggctctctcgttcaatatagacatatctcatgcagccaaatctgaagtttctcaaataatacgaaatttttgtggcatgatccaacaccaatttggtaagctggtagtgtcaatctgtatgacaacgacacaaagttcatgtgtcttacctcctactttagagaacatgggattctccatcaaactttttcgattaatactccacaacaaaatggacgattttaacggaaacacgatcatatcttgagtgtagcccacatctgtctatttcaagggaatcttcccattacattttagttaaagagcatactaaaagcgacacatcgcattaatcgaaatccatctttagtactaaagggataaagatcttatgaaatctagtttggcaaacaccttcatacgttatgctgcgtacatttggatgtttgtgctatgctcatatcccatcacgtgataaagttaaatttgcatctcacagtcgcaaatgcgtgtttcttggttatccttatggtaaaaaagtttggcgggtatatgatcttgaaactgacaagatttttatgacgcaatgttcgatttcaagaggatttctctccctttgcttgccatccatcaagcctattatcttttgtttgcaattgaatctcaatttcatttagatgatgacgattgttttatgtttgtgattattgttctggtttccattgatttatcatctttggaagttacacctacttactatagatattgtttcttggtctatcagatcgattgatctcataccagaaacgatcgatccttctactccctcaacgatacctgtaagcacaagatcgatcaattccacaacatgaatgattgatatatatctctacctcgacaacattacttgcaagttttggaccggtcgatcagttctctaaaccgatcgatccatcaaaaacaccgatccctcaatatgttggccaggtcaaatccgcctcttcgggtcttcctgaactattggacaaaggtctgagaaagaaaatgttgttaatattacttaaagattatattatccctccaagacattcttcttctcacggtctatctcttacttttcccaactcaacttcctcaactttggtttatggtaaggtcctatatctcctttcaaattatttaatagattgtggatttgtagtagaccacatagcatttttggtggatgttcttgatagcaaggaacccaaactttttaaggatgcaattctttattaaaaatgatgtgaagctatgtaaaaagaaattgatgcttttgaagcaaatcatacttgagatattatagagttaccacatgggacaaagtgatcagtagcaaatgggtttataaactcaaattcaaatcggacagttcacttaagcttcacaaggctcgtctagtggttatggaaaatcatcaaaaggagggtattgattttaaagaaacttttgctccactcgcaaagttgacaacaatttattctcttttagtgttgctgctgataaagattggaggtccctcagatggatgttcacaattcttttctacatggtaatcttgaaaaagaggtctacatgaagatgtcatcatgttttaaatgtttggatctatctaaaacatttgtcggttacataattctctatatagcctcaaacaagctacccgttgttggttcgccaagttatcaactacactctgtcacatttgtttcactcagagttatgaaactttctcattgttcactctcaagaatgggaatacgatttttcgtattctaatctacgtcgacgatttcattatcacctgaaacacccatcaatcgattcaaacaacaacttcatcaatgttttcacatgaaggatttaggaaagttgaaatactttctaggcattgatgtgtctcttggccggaatggtttcgacctttctcaactatcatatgctctagacattattaatgacgtgggtttgatctgttgtaagccatctgttgtaccaatggaactcaatgaaaagcttgttttggtagcaagtctgtcatttcacgatccccatcaatattgatggctcgttggtcgttttatctacctcaccatcactcgagcatatctttgctacggtctcccaatttatgcaattaccgcttgttgctcattgaggcggcactcagtcttgtttgttatctcaagggtacaccatctcaaggtattcttctttgttcaaatagtcaattatctcttatggcgtactgtgactgtcattatggggcgtggccgcttacacagtgttctctctacctctattatttatcgttgggattcttcacattcatggaaaacaaagaagtagaaaactgtattttcttcttccgctgaggctgagtatcgtgcc

SEQ ID NO: 12596 - DNA, 3000 bp, Unknown; identical to SEQ ID NO: 12593
  misc_feature (1)..( 3000): cDNA_ID_3025755_gDNA_ID_2214560_Annot_ID_185870 3000 nt of promoter + ATG

SEQ ID NO: 12597 - DNA, 3000 bp, Unknown
  misc_feature (1)..( 3000): cDNA_ID_3025760_gDNA_ID_2214560_Annot_ID_185868 3000 nt of promoter + ATG
aatctgttttattttcattccaagagaggaaaatcgtgaggctgatgccttagcgaaacaagctcttcgtaattttgttgagttgccttaatggccttaataaaattaatttctttgccaaaaaaaaaaaactgaagccggacattaaaactctttgagatcgcactaacttggtaatcaacctttttaggaaacgtcaagcagaaacgaaagataaaaaaaaaaagattaataactctgatattcaccagcttataataccattaattgaccgataactaacataatattctaagggtaaatacctaataatacactaattttgcttagaacacgtcaaacaaacgctttttatttatttttattgataataagcagtattattggttcctaatttaaaaaaaaattgatgaataccttcaaatcctagaaagtaaataaatgaaagattctaaactattattaaagagttttttataatcttgctgattagtttttcataatcttgtaaagtttctcaaacaatctctctattttgataatacttttcatgactttactttgtaaaaaaaaaatgtaaaaagtcatgaaccaataacatagtaatttacatcattaacaatcagagattcttttgtttgaattaaataacacaaaacttttactgactttataagagtatgaatccaataaccccaaatttatgaagattttagattaccttttataaatcttaattgaataacacaaaactttaacataccttaaaaaaatcttgattgcataacaagagatttacatgacactttaagtaactaaaactcttttcaaatcataaacaaataacaccacctaaatcttttacaaggattctattatctcggcaattatttgatatattttacccaaataatcaaccctgactaaaaataaatacaagccaaattctcttctttgttttttatcacacgcctgtaaagaagagaattacaaacatcaaccttctaagcttttgctaggcttcaaaggctatacatgtatgactatattatagagtactctggtggctcaatgcctactcatttatactatactctagaaccctagtccctaggatctctaagaatcaatgagcaaaaatttccttgatctttcaagcatatccatttccttgtttgggatcttccttgatattcaagtctatccctttccttgttcgagatcttccttgatattcaagcatatcccttttattaggatatacatgaatatatttacttagatatagtcttattaagatcaggcaacatgtatgtgtataaataatcttcttcttctattgaataaaggaacgcattacaaaatatttcatggtatcagagcattctgacctaattttttcttcttcttcttctttcctgccgtgctgtcacgtaacttgaccaccgcattttctaaaatcttctaaattcttctatttcgatactaccttctatattttttacacccaccatgtcaacagaagaagcttcttccaggaatcaactcgtcgtcgccaacacgaaaccttccaatccctattcactcagctcatcagacaatctctgagccttgatttcttctgttgtgttaaaggaagacaattactcagaatgggcaatgatatatccctatttttactgtttttaactatgttttaggtataggttttagagtctaattgttatttctagagtcttttctagtctttttcaggtctttacatgtttggatgcatttggagataattaagcattctggagatcaacagacaacctaagctgcagaatcaatccggagacaaaaatgcacgtaggtgtcgaacgacaccacccctggtgtcgagcgacaccaatacctgacggcaattttgagacgcaacttattaatgttttgaagattttcaaattcggcccagaactttctcctctgtttaatgaaggcccatcccgtgttttagacatataattaggtttttaggatcattgtttagacctaagcttggagaggctattctcctcatcttttttgtactttgggagcaaaaccctgtggagactcctttggagaagatcttttactctttctcttgctattattgatttcttatttagactatgatttgtgtttctttgattatgtctgagtaatccacttgttaggtttagggtttctcattagggattcatatggtttaatagatctccccctgctaggttatctgtagaattcttcatctttaattgttcttaatgctagatctagattgatcacctagaacttgaatccaaacaatagatatgcccgccataggtatctgtagttggatctattatttgatgagcctggtttataggtgtgtaataagaatcggcctatctactaaggtgaacaatcgaactcgttaagaatgcatatttaggttaataatctctcggcttctccggttattcttagctatagatatagggagtttcgcggcacgcccactggttattccataattagagtttgagtttaaaaatggttcgataacaacctagctattattagatctactaaccaatagtttcctgagaacaccctaagcctgacgtttttactttcttgtcttacaacctcacaatctgctattgcttccttttgtttctttttgttttcattactatcttacttagcttaattcaaaatcttggtctattgtgtgatccgagagttttgtggaattcgaccctaaagtactacaatcgatctgttatttgagagagtggtcttaaggcaatttgacctatatcaaatttggcgccgttgccgaagttctctacgattcaccattagattaggattagaattttgtctaagcatttatttttattttttttacttaatctttctcttttttttttttcttgtgtgtttcaggtctttgtctaatcacaaaaccaggaacaagcgagaaac

SEQ ID NO: 12598 - DNA, 3000 bp, Unknown
  misc_feature (1)..( 3000): cDNA_ID_3025764_gDNA_ID_2214560_Annot_ID_185867 3000 nt of promoter + ATG
ctctccaagcttaggtctaaacaatgatcctaaaaacctaattatatgtctaaaacacgggatgggccttcattaaacagaggagaaagttctgggccgaatttgaaaatcttcaaaacattaataagttgcgtctcaaaattgccgtcaggtattggtgtcgctcgacaccaggggtggtgtcgttcgacacctacgtgcatttttgtctccggattgattctgcagcttaggttgtctgttgatctccagaatgcttaattatctccaaatgcatccaaacatgtaaagacctgaaaaagactagaaaagactctagaaataacaattagactctaaaacctatacctaaaacatagttaaaaacagtaaaaatagggatatatcattgcccattctgagtaattgtcttcctttaacacaacagaagaaatcaaggctcagagattgtctgatgagctgagtgaatagggattggaaggtttcgtgttggcgacgacgagttgattcctggaagaagcttcttctgttgacatggtgggtgtaaaaaatatagaaggtagtatcgaaatagaagaatttagaagattttagaaaatgcggtggtcaagttacgtgacagcacggcaggaaagaagaagaagaagaaaaaattaggtcagaatgctctgataccatgaaatattttgtaatgcgttcctttattcaatagaagaagaagattatttatacacatacatgttgcctgatcttaataagactatatctaagtaaatatattcatgtatatcctaataaaagggatatgcttgaatatcaaggaagatctcgaacaaggaaagggatagacttgaatatcaaggaagatcccaaacaaggaaatggatatgcttgaaagatcaaggaaatttttgctcattgattcttagagatcctagggactagggttctagagtatagtataaatgagtaggcattgagccaccagagtactctataatatagtcatacatgtatagcctttgaagcctagcaaaagcttagaaggttgatgtttgtaattctcttctttacaggcgtgtgataaaaaacaaagaagagaatttggcttgtatttatttttagtcagggttgattatttgggtaaaatatatcaaataattgccgagataatagaatccttgtaaaagatttaggtggtgttatttgtttatgatttgaaaagagttttagttacttaaagtgtcatgtaaatctcttgttatgcaatcaagatttttttaaggtatgttaaagttttgtgttattcaattaagatttataaaaggtaatctaaaatcttcataaatttggggttattggattcatactcttataaagtcagtaaaagttttgtgttatttaattcaaacaaaagaatctctgattgttaatgatgtaaattactatgttattggttcatgactttttacattttttttttacaaagtaaagtcatgaaaagtattatcaaaatagagagattgtttgagaaactttacaagattatgaaaaactaatcagcaagattataaaaaactctttaataatagtttagaatctttcatttatttactttctaggatttgaaggtattcatcaatttttttttaaattaggaaccaataatactgcttattatcaataaaaataaataaaaagcgtttgtttgacgtgttctaagcaaaattagtgtattattaggtatttacccttagaatattatgttagttatcggtcaattaatggtattataagctggtgaatatcagagttattaatctttttttttttatctttcgtttctgcttgacgtttcctaaaaaggttgattaccaagttagtgcgatctcaaagagttttaatgtccggcttcagttttttttttttggcaaagaaattaattttattaaggccattaaggcaactcaacaaaattacgaagagcttgtttcgctaaggcatcagcctcacgattttcctctcttggaatgaaaataaaacagattttactgaaactgaagatggatgaagaatatcatgaagaatcccatggagtccggcttcaggtttctctaccccatatttcaggattaatacatatcacactctatgtaatgggttttctaagcccattccaactcccatttagtatgatattgtcctttttgggcttacatgctcaagcccgcaaagatttgttacttgattctttcccaaaaggcctcatattagttggagttggacttagcttatatattagaaactctttttctaaagaccacgaacttggacctttggtttgtacctaaagaccacgaacttggacctcctctttaacgaaactttagcacccttaactaggcacccttcttattcgtgaaattcttgagacacctttttatcgtgtcatgtttgagaggttctccccacaccaatcatagtccaagccctagatccactttttcaacctaggttctgtttaataggctttctaagcccattccaacttctatttaatatgatattgtcttctttgaccttagatattcaaacctgcaaaaatttgttattagatttcttataaaaaaatctcatattagttggaattgaacttggtttatatattaaaatctaaatttttaaaatttttgatgtgtgacatttggtctttgtcaaggatactaattgatcataagaatattttgattgacacacttatggaaactgtgtaaatgacgatagtccagaatcttcctctgtaattcctttataaaggattgtacattctcttgtgaataataagaaaacatatcttctttacatggtatcaagagcaaaaagataccctagaaacctctaaattctttttatttctcgcagccgcctctctcctctataatctcttttctttttcttctcctctgttttctatctcctgtttctttctctcacacaatg

SEQ ID NO: 12599 - DNA, 3000 bp, Unknown
  misc_feature (1)..( 3000): cDNA_ID_2712367_gDNA_ID_2214562_Annot_ID_134879 3000 nt of promoter + ATG
tgtaagtttggtgtggttaaatgtgatattgtgtgtcgctctgcaggtcatcgaattcgtaaagaagcatgttggttccggaaatccactgttagctggaaactcagtctatgtcgatttccttttcttaaaggtagctagaacttggatatatccccactctccgcatataaaagctaaacagttgcttcttgagcataatcaatctgtgtattttacagaaatacatgccagaattagctgcccttttccctcatatactcgtcgatgtcagtagcgtcaaggctttatgcgcccgatggttccccataggtaacgataaatactgtaaaactgcatgctatcaatgaggaaaatacttaataagcataatttggatttgttttgtgggggtgaatacagagagaaggaaagctcctgccaagaaaaacaatcacagagccatggatgatataagagaaagtataaaggagcttaagtactacaagaaaacaatattcaaagctaggagatgagtggagttgggtactgcaatatgcttacttactagttagaaggatccgttttagttttacgaattcggcattgttattctcttgacgattgtatcctcaaaacctaaattgtattggtctcttgataaagaaaaacctttgaagatggtaaatattgtttcgttggagatgaagataaaaactgtccattgatcgttttgggttaaattgataattttagaagttagtaaaaaataaaaaaataatttcagaaactagggactaaagtgcaaaaacgagaaaacctgaagctcgagttcatctcttccgatattgtagggatcgcttttgattagcacatttttccgatttttattaaaccctaatatattagataccttttaaagcctcaaaatactcagacgctaattctctatcaaattttgagatttttggtgagtttttcctaaacatttttttaatttctcctcttcagatttttgtaactttttcggcaattcattatcagaattttttgcatgtttaggattagacgttcgcctctgttattagttctctatcaccgatcaggtaagcttcatttttttctttgttcaatttttaatctcactccaagaaagtgagatttaagctttttaatgttgtctatattttcagggatattaatgggttgatctatacttctttaaatctgatcgatcatacaaatccaccgccgttgatcacgaggacaaagtctaggtagatttttggatatttcctagcaaaaaatcgggaggtttcgttcttgatgttttgagattgagtttggactttggtaatagagagtctatcaaactagtgaaatcagtttatcaacccataaatatcattggtcatctatcatttctaaaccgactataagtactaaaccatacatgtctagatacggatttatttcgtcgaaacctttcaagattgtttactaaacacaattttgttatcaatggtataggtgaattatttcgtaaaaccattgctagattcagattgatgttttagcacaccccaatatcctctcaactgcgcgcggagtgcttatggaatatcctgttgagtgggtttaagacgtctgtaatcatttcctatgtaagttctaactatagtaatatttacagtaaaacctaagaaattgattaatctaaaaaggtattaatttatcgataaattaataaaattgtacaacttttgtaaattcttaaaaaaattcgatataaaatgtatttttttctttataacaatagtaattaaaagtagaaagcaaatattaagtttaaaaaacaataaaactttttttacatgttgttaaatattagaattgaacactacaacaaattaataaaaattgaagaaaaaaattactacagatattttacatatgatatttataatatatattagtaaatttataaaattattaatttatactattgatgagaccatatattattgatttgtatcaattttcacattggtctaaactcgggaccggaaaaatttattaatttatagagattattaatttatcgatattaatttatagaggttttactgtattatgcattgatatatcattcttaaagatgaattgtgtaatatactaattttatctgatttaacctaattaatctggactaacatattcagcataatcaatcttgtatacatattattctagcagaattaatcttctcgatatgttgttatttttgtgagttttgagcaatctattaagaaaaagtgctgtctatatgatgctcaatcatagaggttatggtcaaaactaacatttttaacatttaagtgtagaggagaaaagtttatagttaagtctcagaaaaaatcatgtcaacttattccattgatagataccatccatcgtaccaccactgcccgcgacatgcaaaccttctccaaaagtaaagcgttaagtctcttaggagtttaaccaccttttgtgaattttggtgtactccattttgcgtcttccatagatttctttcaataagaaagattatgataaaaaaaattaggatttgctttggacttatcgcttgcaatttaacatgttcaaatacgcaaaacctatatatagttaacaaataaagccacatgagtattgattactaatttctttgtttgcttgtttgaataccaagaaaactttagtgactgtaaaacgctaaaatacacttttcttagagaaaatttcactgaaaaacaaaaagatatacatagagagatttcatgttagaataaggtttctacgagtatttcataagttatattatgtatgaattaattaactattgcacgaaaggagtttatcttcaatatttttttaattccggaattatataggttaattttgttggctagagagaaacttgtatatatatatatatatataaataattacatattattttacagatgacacaagatg

SEQ ID NO: 12600 - DNA, 3000 bp, Unknown
  misc_feature (1)..( 3000): cDNA_ID_2712363_gDNA_ID_2214562_Annot_ID_134880 3000 nt of promoter + ATG
ctttaattaccattattatagctaggaactatggttaactatttgatgattttataattgtcattagtttagttacaagtttgtaaccaaactgtttttttttttttgtttttttaattgaaaattctttgatgtaagttccaaaaatgacatgatagtgtagaagaaatagatgataagtagattgcgaactttgcttagttatcctctttcatgttttaatgactgaatattggcaatttttaactttgtaatttattttcccatggaataaccaaacaaaaattaaaccaactctacggatattataaccgtttaggatgagctcgattggtgtagaacatataagtggacttacactttttgtgagccagtcatattttgttatgtgaacttctaagtgagaaaggttcgaagcatgcgaatccattgttttgatgttagatgttttgggagatgcattcaataaagaagccttcttgataaacagagatccttgtgagttttgatgttaggctttaaacgttcaacatcattacagcacccgttttgttttgtcttttctttttacgatgaagatccttttgacacacaaaataaataaaatattgaaggaagttccaaaaatgacatggatagtcatgaaattaatagtcacaaatggtttcttcttcttattcttcgtctaatcttttaagtcttgatgaagaaacagatgatggtatattgtgaactaatatatggaataaacaaaatgttgactgtcacacatgaatttaaattgttatggatttatatctacgaaaccaaaagggtgaatatcacatatggattaagtttgtcttagatatctatacaatgaagtttaatatattttagctcttcttgtcttcgtgtgtttttcttttactttcttataaatttttttgggtacatacaacgatatatgtgttttgttgatcaataaaaagttcaccttatctcgtagagaactaatcgagtgatggacggcgtttgttatttaatttgtggttgaaatttatcatctacatgactacatcatctacaataaaatgcaaaaatggctatattcttcataaaattccaaattctagtcacaaaatatcaaaattcaaagaaacgcaaattaaatacacacaaacgaaatgttctttccaagtaaaataaagagtgatcatagttgttcgaagggtttctcgtcatcagaggggttcttgaaagcagtgcttccgaagagcatgaaacccacggcgaatccggcgatagcgacaatgaaaactccaccgttaaaggacataacggcgagcatcacgagataagcaaggcctgtcttgagtgtgtagactgcggtctgaacgagccccttggcgcggctagtggagccacgtccacgaaggatcgaagaatgggcaagccactcgacgataacagcaaggaggaagacgacgatgagacatagaacgtacatgccgagacttgtcccgggccagccggagaagagtatctccgtgttctttccccagaagaaagtcatatgcatcatgatcatgttggaattggtatgatttaccattgatgatggtgatgatggtggcatgttaccatgatccattatatgataagtttctgaaattttttgtttgggacaaaacttagagaaaatggtttcgtatttattgtgatgttcttgttatcatgtggtctcttaaatgtgtttgtggttgtactcacgttttgacttgtcaaactttgtgtagtacaagtagaagtcaatactaattttagaaagccttttaaatacctattcagttattcaacttattttcatgatataaatggtaacacaccatttgtagaattgtggtggaagaaaaacgatttacatcatttgaacataatttgagaaagtgatgaaatttatattcgtagtggaatttaacaagttattcttctaaacgatatttacttataaatcaatgacaacaacattgtgttaagcttatgagtttcaagttcagttcaatcaacaaaatgcaactctccccaattcatcacttgcaaaactctaaacatagaccaaagaaattaggcaaacccaaacctacgaagacttatcaaaatataaaaatgtaaatttggctcaaaaccttggacaagaaacatatcaatctaggtctaaaattcactggttcgtcacaacccattctagaaaattcgaaaacaaggacaaaacgaaccaatacagacatatagtggatacaaccatagaaatgttatcaagatcaaacaaatatacaagatatataaaaaagttttctaatatacgatatcaaatcagttgtaatctcaagtgttagtcgcaaatgtggtcacagttatgggattgtaaggtagcaaatcagttgtaatctcaagtgttagtcggaaatgtggtcacaattatgagattactttgcgaattgcgacattagtcaatttctatacaaaattaaatctatctaattattttttgaccaatatggtatatgttctttttactgactaaaatagttataattatattttttaagtaaaacatgttaattaagtttatttcgccgttttttttttttatttgtttggctttgtttttgggtcaaagagaccgattttttctcttttaggttaccttcctccgattagtcttactgaaagaaaaaaatgaacaaactctccaacgctttctctgtcctggctttcgccgatgaagatgctccaatggcttcttcttcttccactggtatcccctgtttccctcttccgatttgattacaacacaaaaccatgtttagatttttgagactgaatttgataatatattgactaaattaatcagtgatttagaggtcaagagtcaattaaagtattgacctttaaactttagtttttttactcatggcactgtctcttgtggctacaagatttgttggtttgagaatg

SEQ ID NO: 12601 - DNA, 3000 bp, Unknown
  misc_feature (1)..( 3000): cDNA_ID_2709235_gDNA_ID_2214562_Annot_ID_134881 3000 nt of promoter + ATG
tctggttcaagacaaatcttaaactctgcaacatctggtttgacattggtgaatacagacggatgactaaggtataatgttgtttaatcaaatcttttgactgacgctgattatgtttagtgatcctagtatggacaataacatctattattgcttgccagattctgaaggaactccataagtcttgtcaaaaggaagatggaactgatgatcagaagaaaggaagtcagctgcttgaggtttatgcaattgaaattcagatttacactgaaacgaaggacaacaaaaagcttaaggtaaatgtcataagctacatggtttcttacaattttgagattctgcaattttattgctgcatactttcttctggcttttgtgactgagactcaacaacactcttgaatggatgcagcaactataccataaggcacttgccatcaagtctgccatacctcatcctaggatcatgggtataatccgcgagtgtggtggaaaaatgcacatggcagaacgtcagtgggaagaagcagcgacagacttctttgaggcttttaaaaattacgatgaagctggcaaccaaagacgtatacagtgcctgaagtatgtttcctatgatcttctcatctctttatcctttcttatttgataccctctggtcacttgattattaacatggtataaaagtaaatataaaagatgtaatggatgattaaagcaaagcatattatttagatttgacttgggacatggttttaggtgcatatgagcattattcgattactcttgtccagtaactttctgtgatcggtccaaacatgttagagttaatgatctttgttttttttttcttttggctatgcaaaggtatcttgttctggcgaatatgctgatggagtcagaagtgaatccgtttgatggccaagaggcaaagccgtaagtcatttccgtatatattttttgttgaacactcgttttggttcgttgcttcatagttggctctctgcaggtacaaaaacgaccctgagattttggcaatgacaaatttgatcgcagcatatcaacgaaatgagatcatagagtttgagagaatactaaaggtaaaaagtgaagtattattgggttgttttttcaactcattatatatgaaaacgacactcatggaatggtttttggaatgtagagtaaccggaggacgataatggatgatccattcatcagaaactacatggaagatctgctgaagaaagtgagaacacaagtgttactgaagctgattaagccatacacaaagatagggattccgttcatatcaaaggaactgaacgtgccagagacggatgtgacggagttactagtgtcgctgatactcgacagcagaatcgatggtcacattgatgaaatgaaccgttacttactgagaggcgacagtggcaatggaaggaagttgcataaggcggttgataaatggaactcacagctcaagtctctttcttcaaatatcaccagccgagtctgttaacttggaaacctctcttttggatagattttgtgatttggcgttgattctttgtggattatctgtttctcttcacatagctggatttgatggagtttataaaccacttcaatgccaagaaaaaggatttgaaacttttcttcattctcatttttaaaattgatttcttaactttgcagcaactagatagtaattgcaagcgatgggtgatatgcaccggaactcttacaaataacgtggatgtctttttcgagtaaggttacgactatgaatattaaaagtgaaacaaatctgaacaagaaaattaggttcgaataatttaattagcttttaatttgtcaatctttctggatctttgcttgttgttacacactggccagtgggccagttgccactgattaaattttataataaccattcaactcaaagtaaactctgcactataactctcatatatcaaatgtcagtcaagttgagactgttaaagcgaagctgcataaaatgtgtttgtccatataaaaattgaacattattatatataaaaatacaaacttatctggtggtataccatctagattagatcctagtattgtccttttttttttacaacagattagtatcttttacatgttcaatcttttgtggaagacaaaattacttaaatcgaaaaatcttgttagttattgtcactatcagtaagtcaataaacaaacattcatcacaaaaacaaaaaaacaaaatcttcactagtcacaacaaaattcgccccaattctttgatccattaaaaaaaactaatattatcatttttaatcattattatttcagaattgtttggcaaaaataattcaacattaaaaaaagaaatttaatatcaaaataaaataaaagaaaagaaaagagaaaacagatccgaattgagttcatcatcttaaaactttgaaatcggttactgtgcctttttttttttttttttttttagtggttacaagttacaaaactcaaaaaaagaccaaagacagcaattaatttttgtttctttctgttctaaggatctttgtctgctactgaaactccttaaagcaaaactgtaacttctcaccaaaaacgaatttttccaacaaaaatttaataatcaaaataaatcttcttcttcttcttcatcgtttatcacgacctctgtctcttcgtctctctcaaaagccattttaaatctctctctttctcactcaatctctctgtagctatcagatcttctcttatgttgatccccaacaaaaaattaaggttcttttttgctttttaaataagtaatatatatatatatatatatatatatatatatatatatataagattgagatattctctgtcttgcttcttctttacccttttcttgtttccaatcaaatcctctaaagtttcgttctttgttctaagttttctgaaggagtgatatttgtttgtggtgtggttagagaaatg

SEQ ID NO: 12602 - DNA, 3000 bp, Unknown
  misc_feature (1)..( 3000): cDNA_ID_1015820_gDNA_ID_2214562_Annot_ID_134882 3000 nt of promoter + ATG
ttgttataccacgttcttccaaaaaaacaatttatttaggtaaataattaatcaagcattttcatattatattcatgggtgttctaatttatatataaaagattattcaaggattcttgatatttaaattcatctgattttcttcactttgagcaacaaacaatgggagagataatgaacgttgactttgtaaactgtttgatcttaatcctcctctgcctcctttcaatcctctgttactctttcttcttcaagaaaccaaaggatggtttcaatttgccaccgagccctccctctctaccgatcattggccatcttcatcatctcctctctctttttatgcacagatctttgcaaaaactctcctccaagtatggacctctcctctatcttcacgtcttcaatgttcccatactccttgtctcctctccctcaatagcctatgagatctttagggcacaagacgtaaacgtttccactcgcgacttccctacgaatgaggggtctctcttcctcggatcatttagcttcattaccgcaccttacggagaatactggaagttcatgaagaagctcatcgtcacaaagctcctcgggcctcaagcactcgagaggtcacaacgcatccgtgcaaatgaagtagagaggttttactcaaacctattagataaggcgatgaagaaagaaagtgttgagattgctgatgaagctatgaagctagtcaacaacataatctgcaagatgattatggggaggacctgttcagaagaaaatggtgaagcagagagaattagaggcttggtgaccaagtcagatgccttgttgaagaagtttttgctggcggccatcttgcggaaaccacttaagaagattgggatcacactgtttaaaaaggtgttcatggatatttctctcaagtttgacgaggtgttagagaagattcttgtggaaaacgaagagagacttgaggagaatcaacaaggtactgacataatggataagctcttagaagtttatggagacaaaacttccgagtataagatcactagagaccatatcaagtccttgtttgtggtaaatattcatctcttataacaaatttagcgaacaccaatggtttttcttgactaagaaacgtttgatactacaggatcttttctttgcaggtactgacaccgcaacacacactatagagtggaccatggccgagatcatgaacaactctttgattcttgagagattgagagaagaaattgattctgttgtagggaaaacaaggttgattcaagaaactgatctaccgaatctcctttacttgcaagcaactgtcaaagaagggctaagattgcaccctacgatccctcttgtgttgaggacgtttcaagacgggtgtacgatcggaggcttttctatacctaagaagacaaaacttgttgttaatggttatgctataatgagagatcctgataactgggaagatccactggagtttaaaccagagaggtttctagcttcttcaagatcaagccaaaaagacgcaataaaagaagaagttctaaaatatctttcattcggaagcggaaggagaggatgtcctggagtgaatctagcttatgtgtctgtagaaaccgctattggagtgatggtgcaatgctttgattggaagatcgacggacataagatcaacatgaatgaggttgctggtaaaggaacgttgagcatggctcatcctcttaagtgcactcttgttcctcgaagtgtaaccccattaacttcaaagtaggcaatctacttcttgactttgtgttgttttttcttaatctcatcgtttcacatcttcaccagtttattggttacctttggtttaggtcaatttggccttatgtccactttaatattgtatgaaacttaaaccttttgtatggttcataattttattttcttaagaataacgaaaatgaaaaatgcttgctttacttttaagatttaaaagcagagcacacacgctcctagccaaacaacaccaaacatgcattaccccccatcaatctcaacgcttttcctcctcaatccgggaatgcaaccacgctggttctctacgagcggctaaagtggtttataaattataattgtgtcttcgccacaaactttagattgcagcttcttctattcttttacagttttttttttcttgcatcatttttacagaatttatgtgagcaattcattttcaaatttcttatctttcttttaataaaattattaagagaaaaaacttataaaatgtttattaggttttcattattttatatcatataaggctattaaaattttaaatcctcctttttaagacaaatttctgattttgttctcaattttgaaaaggtctatctctaacttaatttccattttatttattatctataccatataaatttcttcaaatctcaatcaattaaaaatttctattttgcttaaaaattaaatgattgcaaatttataactaataatttctttttttaccatatccatgatataatttattttaaagttaaaaaaatattttgattcatattatatgtgtatatatatatatatatactgtatatgtatatatacatatatatctgatcggactattattatctcttacctactcggcccaatagtaatatttcacaaatccagcaacaaatcttacttcttccaccttcttcttctcttcttcttctcttcttcttctacttccgcaaaaaccctttgagaaagagaagcaaaattctctaatcgttctttctctgccctaatccacgtatcgtttggtgttcttcttcatcgaatcgacatggcttcaggtcttgttcttgttttgctatgtctaatcttctactctgaaacaatctagggttcgaaagttcccgaattcgactacttactttgttacgaatcgatagtgttttattgatttgggttttcgatttttgtgtagatgctgacatg

SEQ ID NO: 12603 - DNA, 3000 bp, Unknown
  misc_feature (1)..( 3000): cDNA_ID_2709251_gDNA_ID_2214562_Annot_ID_134883 3000 nt of promoter + ATG
gagactcatgagtgagtgtttgaatagtaaaaaacttcttagctggatctgaatatgatttggatttaatactactgaaaagaaaagattccatctatctactatcccacttcttccggaaagataaacaattgtgtttacgtaagaaatgaagcatgtcatcatattatattcaattattcatgggctcttgctatatacatctgttttttcactttgagcaacaatggaagcaataatgaacgttgactttcaaaactgtttgatcttaatcctcctctgcctcctttccttcctctgttactctttcttcttcaagaaaccaaaggatggtttcaatttgccaccgagccctccctctctaccgatcattggccatcttcatcatctcctctctctttttatgcacagatctttgcaaaaactctcctccaagtatggacctctcctctatcttcacgtcttcaatgttcccatactccttgtctcgtctccctcaatagcctatgagatctttaggacacaagacgtaaacgtttcctcgcgcgactttcctacgaacgaagggtctctcctcttcggatcctttggcttcggcaccgcaccgtacggagaatactggaagttcatgaagaagctcattgtcaccaagttcctcgggcctcaagcactcgagaggtcacaaaaagtccgtgcagaggagttattacttaaacctattagataaggcggtgaagaaggagagcgttgagattgctgaggaagctatgaagctggtcaacaataccgtttgccagatgattatggggaggagttgttcagaggaaaacggtgaagcagagagagtcagaggcttggtgaccaagacagatgccttgacgaagaagtttatcttggcaggcatcttgcggaaaccgcttcagaagattgggatctcactgttcaaaaaggagttaatggatgcttcctgcaagttcaacgaggtgttggagaagattcttgtagaatataaagagaaagttgaagagcatcatcaaggtactgacatgatggataagctcttagaagtttatggagacgaaaaagcagagtataagatcactagagaccatatcaagtccttgtttgtggtaaatattcatctcttatgagaaatttagcgaacaccattagtttgtcttgactaagaaacgtttgatactgcaggatcttttctttgcaggcactgacacctggacgcacgctatacaatggattatggccgagatcattaacaactcgtacattcttgagagattgagagaagaaattgattctgttgtaggaaaaacaaggttgattcaagaaactgatctaccgaacctcccgtgcttgcaagcaaccgtcaaagaagggctaaggttgcaccctccggttcctcttgtgttaagaacgtttaaagaagggtgtacgattggaggcttttatgttccggagaagacaacacttgttgttaatgggtatgctatgatgagagatcctgaatactgggaagatcctcaagaatttaagccagagagatttctagcttcttcaagatcaagccaaaatgatgagataagagacgaactcctaaaataccttcctttcgggaatggaagaagagcctgtccaggagctaacctagcttatatctctgtaggaaccgcgattggagtgatggttcagtgctttgactgggagatcaaaggagataagatcaacatggatgaggctcctggaaaaataacgttgaccatggctcatcctcttaactgcactcttgttcctcgaaccctaatccctgttacttcaactgtacagattcctagttcttgacattctgcctttgtttttaatctcctggttaattggctacctttgatttagttcggtttgctttatctctggtttgttgaataaaacttgaaacatttcgtatggttcataatttccttctttcaagtacatttagtattgttttactagtgatcgtcgtccatttcgtattgctcaattcaacttgtttgaagcaaattctaattagcttcacatttaacttagaggatcaaataagttaacatggttgatggaattgatcatttggatttaatgaatgaaggcgctttccaaatacaatcattgtgttgtatatcctctataactttcagtggtaaaagagtgagtcgagtctattctagagtgaagtttcttccaagcagactactcacattcacaagtaaagacaagacttctgctgaatgttttttcatatttaatctttaaacttttccacaaaaagatatcgttcattttgaaagtaggaatatgagatagaagaagcaacgaaaacaattagaaaattaatcataattcacaatttagagacttacgttattttttggtctatgtctagtttttaaaaagacgtagttttcagaaaataagaaatactttttaaaggttaaaacaaaataccaaactcgaagattctacccattcaaccgatttttactaaaatggaatacctgaaccgacatagcctcgcagagttaaattttccagccatttattatggttattctggttaacatgcaatggtcaaagatgagatcttctatggtctttatagtctttatgttagttgggtaattgaatatccaaatcatatcaaatactaattgacgtatttaagggtcacacggttttcaaagttactaaattaatgatttatcatgagtgtatatactatatagtaaaaaacttatgtattgattactatctatattattcaaaaggaaagattccatctgtctgttgttataccacgttcttccaaaaaaacaatttatttaggtaaataattaatcaagcattttcatattatattcatgggtgttctaatttatatataaaagattattcaaggattcttgatatttaaattcatctgattttcttcactttgagcaacaaacaatg

SEQ ID NO: 12604 - DNA, 3000 bp, Unknown
  misc_feature (1)..( 3000): cDNA_ID_3025851_gDNA_ID_2214562_Annot_ID_134884 3000 nt of promoter + ATG
gcattggaactgggtacgatctctccgtcaccactttctctcccgatggccgtgttttccagatcgagtacgccgctaaagctgtcgacaacagtgggttagttggctttatcttcttcgatcttcgccctttagtagatcggatttagcttctgaaaactttgagattttggttatcgacacgaattagggtttgttaaaagtctttccctttttttttcttcgcaggactgttgttggaatcaagtgcaaagatgggattgttatggtttgattcttcctccttcctctattgatttttatactactttgtcactttcttcagtgggtttagtctctcgtgctgtgatttaaccttggaatgaagtattcacatttttgttatcagaattgtagatttgatgtaatatataccgtgtaaattttgacccaagatgacacattttacagtcccttagtttcatttcctgttcgatatgttgtgaatctgttgttagttttgggttttgtaagattttacgcagatttttgataaaggaatggtcttgctaagtgtttatcatttggtggtttttagggagttgagaaacttattgcatcaaagatgatgctaccaggttccaacaggagaatccattctgttcatcgtcatgctggcatggtatgtttttttctcctaaactataggaaattagtttctgctgaggatatgtatctttcaagttttttgtaactactattgtgtctagtctcgtagtatattgttttgtttcatgattatgggtatttctacttctgtcatgtcaggctgttgctgggcttgcagctgatgggaggcaaattgttgcgcgtgctaagtctgaagcacgaagctatgagaggtatcaatgaaaacatcagtagcttatatctaagatttattattatgaaagaactgttcaactcctaaagcttttctcaaggggatgtttctcttagttaaacgttcaaaatattttttatctgcattttgttagattaaaaatctaaatatatgggtataagatgtcaatgtgtatgttctcctttcttcctacatggctttgcataactttttccgactgtgtaaccaactctaccttcacttgtgataatttagtgtttatggcgatgctgtacctgtgaaggaactttctgagcgtgttgcaagttatgtacatctgtgtaccctgtattggtggctcaggtttgtccaattcatctacgtctttggtagtcacctacgcatttctcctacttgaatgaattataagaaaatggtttttattttgtaggccttttggctgtggggttattcttggaggttatgatagagatggacctcaattgtacatgattgaaccatcaggcatatcatatgtaagttatttctgcccgtagatatgtgtctttaagtatgaaattttacgttatttttccctgtcatcatatgaattctattcctgcagagatactttggtgcggccattggcaaaggaaagcaagctgccaaaacgtaagctacatcgtgaatgtatttggtatcatactagtattttctaggattctcttatagtggatatgcgtagtcactaagggtatatactatgtagtaccactaggattgatcaatttaacttgtccgaaggaaattctaactaacttaacagttaaatcaaagaaatcatttaaacttgaaggatcaagtgagctttcatggttgataggattgatgattctccataaatgttattaagaactttatgacagatgtttctggattgcataccttttggccgcctttgacatgtgtggaactagtttcaactaaacggttatagatttagttatcaaaaaggcaagggtatgcaagtgttctgatggatcagaggatttcttgcagggaaattgagaaattaaatttatctgagatgacatgcaaagaaggcgttatcgaggtggcgaaaatgtgagtagtgcttgcttctcatgtacatgttttctggttctcatgtgctttctataaccaggttcattttatagcaagatgtgatgttactttttcatgtgcagcatctacaagctacacgatgaagccaaggacaaggcttttgaattggagatgagctggatatgcgaggagtcaaaacgagagcatcagaaggtaaaattttataagtgcttgcttatgaaggatgatttaaggagatattcataaaccatatataaattggactcgtcgtataggtccctgatgatcttctggaagaagcaaagacggcagctaaaactgcgctcgaggagatggatgctgactaaaactgaggagtgtgttgaatttagatccgtcttattgcgtcgtttgatgtttcttatgtactctgaattgaattttgtctggagggacagttgttgcagtttcgcatgaaccattggagtcttttatcttattgctatcaacagttgctacgatgactccttcactagaattaacatccattaaaagtgaccacatgaataactatacaaacaacatttaaaaatttactcacttctcgaatactcttgacctacctaatctataatcattatatgtcaatttcatagtagaaagtcatgattcgttttactgtgtgaaacagatatatactagcagtagcaaaaactaaactaaaccgagaatctgtatttataatgcaaaatcatttgcaaattcagatagatatcaatttcatagtagagagactcatgagtgagtgtttgaatagtaaaaaacttcttagctggatctgaatatgatttggatttaatactactgaaaagaaaagattccatctatctactatcccacttcttccggaaagataaacaattgtgtttacgtaagaaatgaagcatgtcatcatattatattcaattattcatgggctcttgctatatacatctgttttttcactttgagcaacaatggaagcaataatg

SEQ ID NO: 12605 - DNA, 3000 bp, Unknown
  misc_feature (1)..( 3000): cDNA_ID_2709247_gDNA_ID_2214562_Annot_ID_134885 3000 nt of promoter + ATG
atctgccttttaatttaaacaattacgttctacctcacgaataactactgtatgcatacaccactttttatatgtttttgttaaaatgtagaatatattgaatcaagaaaaacacgaatgttatttacaaagctgaaagttgaagtggggaaaaagagaactgaagcttgaaaacttttgaaagaaaaaatgaaatggaagttatgtttttctttaaccctttttcgtatttcctaaattttatctcttgttttaatcgttacaaatgataatacttttttctaacagtttacttattttcttatatgaaccgtaaaataagaaaaacatattttaatttgactcaaattatatggattattgccaacattcctctaaaaaataggggaatttccaaattgaccaacaatttaaaaataaataaaaaattctaagcttttaaaactaccgatataatgttttcagacatttttcctacaaattttaatcacacaaataaccctttttttttttaacaaacattgcaaactataaaatacaataaaataaaaaagtactaataccaagagatagctttttcaacgaccattacaatggtacttcacataatataaaataaactaaaaacttccaaacaaataatttaacccaaagtcacaaaatagttcataacatgaaatttgggacgaatgcataataatgaacagtcaaacatagaataaagcaataatcagagttgttcaattcaaaaaaagaaagaaagaaaaagagagaaaagatatgagaatagtttcctcactttgccatcataactttgacaaactcttcataattgatctgaccatctccatcaacatcagcttctttgatcatctcatcaacttcttcatcagttaacttctcaccaagatttgtcattacatgtcttaactcagctgccgagatgaaaccgttctggtccttatcgaaaaccctgaaagcttctttgagctcttcttcagagtcagtgtccttcatcttcctagccattaggttcagaaactcagggaagtctatggttccgttaccatcagcatctacttcgtttatcatatcttgtaactctgcttctgttggattttgacctaatgatctcatcactgttcctagctctttcgttgtgatgcaacctaaacacaaaaccacacatttctctcaaatcagtaacagattttaacaccaaatcttcaaattttcattgtaatttactctaataacacacaaaatcttcaaatttcattttagttactctaacaactgtatcaaatgaacacaaaatcttcaaatttcattgtaacctactcaaataactgaatcaattaaacaaaaaatctacaaatgtcaatgtaatctacttcgattattgaattctaagatttgtgtcaattctaatcacaattagtaaaatctggaagactaaaacacgattaagttagagattattatcgagatagatccgattgcgattataatttataatcaacgaacgataaagatatcatcaaatctcgcgtttaatgttaatgtgaatatccagagattttatggacaacgaagagcatcaaattcctaaagccaagactaagtgatactcaaaacaccaaaaaaaacgcaagtgagtctattatgaatgaaaattatacaaaagaggaaagatctgagagagaagaaccatctccgtctttgtcgaaaaggctaaaagcttccttgaactcagagatctgatcatcggtgagctgatctgccattttttggtttagatgagaaagagagaagaagaagaagaagaagaatcaacgttggtgtgtgtaatgagaggattgttgtgtggaattataaagaaggaaaaagaaaaggcccattaggcccaataacaataatttcgaatctgattctcttttttattcttcttttgttttgttctccactgggccttattgtgttttcaattcgactagctttacttaagagggaggtgatgtatatattcccttgtgaaaagaaatagtattgttgttttgccgacaaccatttacatgctttgaatggtttagttcatataagttactgatcttaccatgcgtaccaatactaagtattcaacgagttggtagaatgggattactagtgatataaaacggtaaaaaaggtttagctttgtgtttaccatggattttaaactactttttaattaagttaaccaaagaaaaagttttagcattataagaaaatttagaaatagtagtactttttatttactgtttttgtaattaataatcatctaggagttaggacaaaaatcactactttgttgttggaagggtcacctaatgggtagttaagcatcatgaccttcacttaaagatttgatattaaacaagatccagttttcgcaaaactgtcatacttttttgatcgccacaactatgtctctcagtttggctagagatgtagtaaaaaacaaacttattgtatccatcacaattataggtaatttactgtcttggttttaaaaacatgtaatgttgagcatcccaaagtttgtgtgtcccaatgctagagcatattatagtcttacctctagtgagttcataaagaagtgttgtatgatcatatattttgttgagtaagagaaatatttctttcttcctcatgtggttgattattcaaaattatacaaaagaggaaaatcacttaaaaatattcacgataccgttaaaagattaccaaagaatgggccaaatcataatattaataaagcccgttaataaccgaatcgacccacccgacaaaacaacccgaatcgttttaatatccaacccggagtcagacggagctccaaagatttggcttgtctctggcttgagaacaaagaaaacccctttcttcgatctcagcttaaatcactcgacgaagaagaaatcagaaaagagtcagagaaaaaaaaaatcaaggaagatg

SEQ ID NO: 12606 - DNA, 3000 bp, Unknown
  misc_feature (1)..( 3000): cDNA_ID_2712355_gDNA_ID_2214562_Annot_ID_134887 3000 nt of promoter + ATG
aatacaagatcgtaacataaacgtgaacaagctctactaactacgaataatgataatgggctccatatttaagttatataggcaaatgtttttgacttttgtaacaaaatcaaatttatcttcacttttcctaaccttcctttcgccaacctcctcacctgagacatgaagaagaaactctcatggatcttagagtaaatacataaatttcacagctcgtctcatcttgtacattgatttatacattgtctcatataccatcccttacacagtattaaacaccacttgtacagagttaaacacaccatcttgtatactatcttttacataatctcacattatcttgtacacggccttgtacatcatcttatacacctctgtttataccatctcatacatcccttcacgcacacagcctagtatattattttgtactgaaccatatgaattatcccatacaccgtcttatacactacctcgtatacatttttgtaaattgtccgatactctcatgtgatgtaattttaaccataaatacacattacgcatatgcgtggtatgtcattggagtaactaaagattgaatcaaatccacgggaaaatgccataacagtataacacattaaattatgatgaaatcatttgccataagacggtatgagaatctacggtctcactaataccctaacatgcatagaataaaagaagggataaatgaaagcaattaaactatatatagtagataattgaaaactaaactaacaaaattaagaactaaaatgagcaaataaacaagatagataaattgaacaatcaagatgttagaaatcatgcaatcgatctacatattttcaagataatgaacctctaacaattaggctaattcatgattagtgtggtaaaagcctctaacgtaacttagccaaattcaaaatcaatttggtaaactatcacaatggttaagaaacaatgcacacaaattcctttaagttacaaagcatccgatcctaaatatcacttgctagatggttaggccagaaatcgttttctttcaattttctttgggtctgaacgtagacacaactcaaacacctctcttgatcttgtatgctttaaaatgtggtctcttcaagtcgggtatcttgtttgttttggttccgagtgcatctgtctttagccacctagctagctagaaggtaattgtagatatccattttcaccaactagctagtttttgtcctccagctggcttggctaactacgtacgttccaaatgtcaaacacttaaaaactatatgtcaacactaactaactaaatttattatatcctatatctcaagtgtacacaatgtataatattaataacataattcaagcacctcctgatcttatatacttcaaaaatgtgatgtctctctaagtggagtatcattttaattttggttccaattgcatctgtaattaaccatatatagctaacttgccgatgtgtgtaatataactaaactatagagaatatttgtagataccctcattctccagctggctagctatgtaagttccaaatgtcacacacttgactatttgtctttctccacttataaccttaatcacagatcaagaatcatctccaattatagttttctttattgaatccacctaatctctattcaccaatttataatttttataattgcggcttagatacctttttagtcaataatcaaaaatggattccagtgaggatcaaccataaacgagatcattgaagcacataaactaattgacaataagttacatagtttaggagacataaaactgtttaaattttatattgtgcttaataataatttataattattgtaacacagttgttaaatccatagttatgtagcatgtacgtgtcaattaatgcgcacattcaatattagaacacagaaggtttgtctaccaccactaccaattgaaattaaaaaatttaaaataatctagcgggacacaaagcgaagtcaataacataagtcaaccattttaacggtcaagattgtaagagtagctctactatgatggagccgtgacgtagaggaacataactgaaagcgaagaatcctcgatttatgctactgtcactgaaccattttcctctcaggtcggagctaaattttgagagtaaaataaaaaagcaaaagagagaaattgaaaaaaaaagaaagaaaaataatcctctcttgtttcggctagggtttcgtttttgtttcatcgataaactcaaaggtgatgattttagggtcttgtgagtgtgcttttttgtttgattctactgtagggtttatgttctttagctcataggttttgtgtatttcttagaaatgtggcttctttaatctctgggtttgtgactttttgtgtggtttctgtgtttttcatatcaaaaacctattttttccgagtttttttttacaaattcttactctcaagcttgaatacttcacatgcagtgttcttttgtagattttagagttaatgtgttaaaaagtttggatttttcttgcttatagagcttcttcactttgattttgtgggtttttttgttttaaaggtgagatttttgatgaggtttttgcttcaaagatgtcacctttctgggtttgtcttttgaataaagctatgaactgtcacatggctgacgcaattttgttactatgtcatgaaagctgacgtttttccgtgttatacatgtttgcttacacttgcatgcgtcaaaaaaattggggctttttagttttagtcaaagattttacttctcttttgggatttatgaaggaaagttgcaaactttctcaaattttaccatttttgctttgatgtttgtttagattgcgacagaacaaactcatatatgttgaaatttttgcttggttttgtataggattgtgtcttttgcttataaatgttgaaatctgaactttttttttgtttggtttctttgagcaggagatg

SEQ ID NO: 12607 - DNA, 3000 bp, Unknown
  misc_feature (1)..( 3000): cDNA_ID_3025817_gDNA_ID_2214562_Annot_ID_185906 3000 nt of promoter + ATG
taagtctgtgaaaggtttcctctgggtaccatattctcaggagcagtatcatctcggtgaagtgacactggtgccatacgcggcagattcagatcagaaacagattgagctctggccccaccatcgttaaggttaaatctgcgtatcatttcatcctggcgcggccacagcaaaggggttgtgtcagcagctgatagagaggtcttgtcaccactaccaattccaccaccatgtgagctaggaggcgcagctctacctatccttttcctgacaactgaaaccttctttccaccttctctgagttgccctaaagcaatattataagcttcagctgtaattgccccttcctcagcatacttgatggcttcgcgacataaatgattatagcggtgtatcgagctatcatgcccattttcactgacatgctcatctaactctaccatgctcttggcatttcttgtccaccgtctcaaaatataatgtggtggcaaagtgagtatattagtgacagtaaacaccgtcaaaacatgtcggcagagtatgccggagtgctcaaacatttgacagctgcagtttgctctcatttcagggtagcaaaacgttactatataagctttgttgtcattttcaaaatttgcaaccctaaatgtgctggtagtaccatcatcttcaattctgtttgccgtgtgagcgaatgtctctaccaactcttcctggaactttccaaatattttccttgtaaagagatttgcagcctgattctccatgggtgatggcgtcttcaagactggaggtgtgttgacagtgtcaagatctgcttcaatctccatctcgaaccagctctccatagccctttcgtacagcctaaagaacatcggaagggttgtctgctgattcacatatccatcgaaaaaggaacccgaataaccttggctaggaaacactgcagcaaaaaacgaatcccggaaataaacaggtacccactgagctcgagcattatataaagaattaagccattcatgtcttcctaagtcatatttgtcaatgacagaactccaggacgattcaaactcctcaatcgtttcagtaaagttgatacaattatatagctccacctgaaaactaggatacgcaagacacacatgagccagcttttcctgaccttctcttagcacatcccacttattaatacagtgacgagcacctggaaatacctgaccagcagcaatctgtatggctctatcttgatcagtcaccaaagaaaccggcggttgatctctcattgctgttagaaaagtcttgaacagccagataaatgaagtgtctgactcgtccaaaataagtgcacagccaaataagatagcctgaccatgatgattcacaccagtaaatggcgcaaaaggaacacgaaactgattgcacctgtacctcgtatctaaggtaaccgtgtcaccaaaatgagtataagcaaccctagatctcgaatcagcccaaaacacatttgacatctgattatcttcatcaagctgaaccgcatagaaaaagccaggattctctgcctgcatcctcttaaaatactccaacagattatgtgcatcccgtccaatcgttctcttcgtgtttgtagccatagacgcatttctagctcctctgctattagcatccatagaaacatacatcataccactaggcacattaaccccttcttgataactagatttctccgagttagcaaaatgcctacgaggacgaagacaatgaagcatattagaacttgctaatccatgagtatgctctttaacaaactttgtaacaacccatttctcatgaccttgcaactctatcctaaccattgcatcacaactctcagaaagccttctctttgaccttttactactactactacacacaaattctcgaacactaacagacccatcagttctaggaagaagcttagaagtaaaaccaagctgcctcgagtactcatcatagaaagatttagcttctttttctgaattaaactccataccaacacatggctctgcaattccaatctcatcttgcacccctaacgagttatccatgttgttctgtccactgcaatcactaggttcaacatctccttcatctcctatctcatgattccccattgacacattctcttccaccaaatgaacatccataaccttcacttagtagagaagttctaatttcacacaaatgtttctcatcttcatagtctacaaaaaagtactattagtgtttggagatcttcttccgaacatataaatatgaggactttttgcatctctcactctccgattgtttgttgagagagagagaaacccagaaagaggagaaagcaaaagagagaaagaggagcttacgtcagtcagtgatgcgaagaactcagaactcagaagaatcgaaagtcgtgaaattagggagaagggcaacaacaattggggaaaattgagaagaagctatggcagctatttcgttttcagattcgaccggaggaaattaaactcctgcttcttctcagtcgttcgcgaggaagaagagattcaagcacgaaaccgacgtcgtttcgtgcttttgttggtttttttttttcaatttaaatagcgagacctcgttttaatctaaacccaacaacagaaagccctcataaaaagtgaggcctcatttgaaccgaacccaacaaccaggaaagcccttgatacaagagacaacgcgcgcgaaagcatttcatcttcttcatctgtcttttttagttgagccctaattcattttcggatgacaacttcatttccttgtattgtcgtcataagaatctcaggttctagatgattctctcttctcttatttgatctggttccatctcttcaccgtaccagtgtcaatcacgaatccctttgttttgaaccctaatttatttaatacgcaacacaagcaatcaatacaagagtctcttagcatcatcggcgtgggccaaat

SEQ ID NO: 12608 - DNA, 3000 bp, Unknown
  misc_feature (1)..( 3000): cDNA_ID_2709225_gDNA_ID_2214562_Annot_ID_185903 3000 nt of promoter + ATG
aaaaacatcttagacagagatgtctcaccctgatagcgacccataaagcgaccatgaggcctttcatcaccataaccaggcctcccacccatttcacggtcatatcctccaccatggtcatacccaaatctaacatgcaaagtaaaaattgagtacagattaggaaatctcgaaaacgatggaatataacaaccatcgatacaagaggataatcaacagttatcagctaagcaacaatgcaaacacagttcccatatgactttgaattataattcaatcggtaacaaattaactctgatgtaattccaattgaagtgtaagcataagaaatgaagattaccttctatcgggtggtccatagccaccacgaggactaccacggcgaccatcatagccattatcatccctccgataacgcttttgaggaggcgagcgacgctgaggaggagagtgtcgcctatctctatacggtggcggaggactcaagctaggacgtctcttgtaatccctacgaggcggtgggagaggcgaacggtcacgttcacggcgattaggcggaggacgttcgatgtctctctcgtcacgacgctctcgtgaatctctctcacggcgtagcggaagctgctgctggtcttgttcctgttcctgctgcggcagagaagaagaaggcggtggaggaggtggtgaggaagaggttgatttctcagggagacggttatcgacggaatcagacggaggaagattaacatcggccatttcgttcggaaccctaaatcggagaatgtacgatttcactcgaagcctctgtgtctctccctctacctttacgggttttgctgctgttactgttacagtgagctttatttccaatagggccttactctcagagacccatcttcgtcttcataaataggccttactctcagaggcccatcttcgtctttatgaaaatacagtatttggatttctatgttaattatttgtccacacctttgactattcctccatttcatcgaagcaaaactattttaatatttcagtcagattctttcccatcatttccagaaaaattcttcaaacaattctgtaaattaagccaataataagtcttagtatctctgtcaatttgataagattagtttctattttttatgggatcactatggattattttttcataatctgtctatggatttgattattagtaaaatactaaaatgtgagttgacatgtaacaaaattgttttgtaaagcaattgactaagaccatagattaaggatgtttatcataaactaatgaatccttaaaaaaataaaaagacaaacaaaaaaaaggtgtaagaaaagtaaccggagtagaaataacaacggcaagagaaagttaccgtttttggagtcatccgtcaaaatcgtctttacaagcaagcaaatgctttattgcatgttggtagtcacacacatacacacacaatctcctttttctcctctcgcataagattcctcttctctctctctctcttctctctacccatctgattcgctgctgactcacacacgacacagaccacctctctccttcttcttcgtctcctgtagaagaagacgttttgttttcttttgggtttgatcctctcgcgtaactccaaagctctcaaaggacatctctttaggtatcaccgtttctccatcttactgttgtttcttctacttgtgtgaaaaatctcaccttttctaggttttcttctactctaatggtccaatttcatttgggtttctttacctttctataaaaatctctcttttttgtcaaattcgtgcacttttcaggttttgattttcgattactctaagaaaacttcttaatttgttcaatcagttttgtgttttgtctgcggtatgactttggttatgctctccttatattctctctcgccctattttgggattccgattacgaaaaagttgccttcttatgtgattctgattgtttgtcatctatccgatggttctgtgaaagttttactctttccataaggattttgcttgaggaactttaaacggcggaacaggttactaagttaagagaataggttagattgtgttaggatttcaaagtggaaatttgttctttaattgttgatagatagttgctttgagggttttttttatttggtatgtatgattgatttgtgttgtgttgggagcaacataagcttgatttgtatttgttgccttggatttaatttatgtatcttcgttgtgtttgcttgggatttctttgtttttttctatatacggaggcatgagatttgagtttgagatttgagagaatgatcatgtctcgctaaatagcaaatatcctgcaatgcgtaattttcatttgttttatatatcatgatgcaatttggtaataaagggcactgttcttctctcatattcaacatgaatacaatgatactctcactcacacctttgcattagataacttagtggaacagatgactcgctattacttaattctctcttctagttatgttttggttatttctgatcgggtcttgccaggggtcagtgcattgatccctagaatacagtgtcttgagaggctttaatactttttttttttttgaagtggttttgtgattgttgtgtttgtttttgttagagttaaggatcactagaatataatcagaaccactattttactgaaatcaataactgaaatagaaccccaaaatacagaacacagttccctcggtctaaaccaagcctatgtcgcaggatggatctatccatcgtcctgcttcctatttattagaatctccaaaaccacttaacagaaaatttcctagtcggaatagttagtgagtcctaattaacatatgatcactccccactaattaaagtttctttttctgaatttgaagctattctagtagttctgcaggttgtaaatctaactcatgttactcttttttttgcatgtaagcttggacaatg

SEQ ID NO: 12609 - DNA, 3000 bp, Unknown
  misc_feature (1)..( 3000): cDNA_ID_3025833_gDNA_ID_2214562_Annot_ID_185900 3000 nt of promoter + ATG
agctaggtggctaaagacagatgcactcggaaccaaaacaaacaagatacccgacttgaagagaccacattttaaagcatacaagatcaagagaggtgtttgagttgtgtctacgttcagacccaaagaaaattgaaagaaaacgatttctggcctaaccatctagcaagtgatatttaggatcggatgctttgtaacttaaaggaatttgtgtgcattgtttcttaaccattgtgatagtttaccaaattgattttgaatttggctaagttacgttagaggcttttaccacactaatcatgaattagcctaattgttagaggttcattatcttgaaaatatgtagatcgattgcatgatttctaacatcttgattgttcaatttatctatcttgtttatttgctcattttagttcttaattttgttagtttagttttcaattatctactatatatagtttaattgctttcatttatcccttcttttattctatgcatgttagggtattagtgagaccgtagattctcataccgtcttatggcaaatgatttcatcataatttaatgtgttatactgttatggcattttcccgtggatttgattcaatctttagttactccaatgacataccacgcatatgcgtaatgtgtatttatggttaaaattacatcacatgagagtatcggacaatttacaaaaatgtatacgaggtagtgtataagacggtgtatgggataattcatatggttcagtacaaaataatatactaggctgtgtgcgtgaagggatgtatgagatggtataaacagaggtgtataagatgatgtacaaggccgtgtacaagataatgtgagattatgtaaaagatagtatacaagatggtgtgtttaactctgtacaagtggtgtttaatactgtgtaagggatggtatatgagacaatgtataaatcaatgtacaagatgagacgagctgtgaaatttatgtatttactctaagatccatgagagtttcttcttcatgtctcaggtgaggaggttggcgaaaggaaggttaggaaaagtgaagataaatttgattttgttacaaaagtcaaaaacatttgcctatataacttaaatatggagcccattatcattattcgtagttagtagagcttgttcacgtttatgttacgatcttgtattgatagaagaatgttttcacttgtcttcgactgaatcagtgttgccttctctcaggttatatctttcgtctatgctttcgtcaaagcaaaaaatccctaaattagatgaattttatgccttgactcaaggcataaattcatcaaatgtggtatatagagcgtatttagcttcatatatactattgagtttccagagtcgtacgagcgctatcaagtatcagaagcgaataaaaataaaatatccttacgaaaaaaaaaatcgtctacaaaaaataaacatcattgtcatgtaagaaaaagaaaattgacaaactaaatattagttcttaaacagttgttgacccttcctctccactaaatcgttaaccaagctttcaaaatcaatgtctctaaccaattctctttcgattgataatatagccaactcactcaatctttcttgtgacatagtcgaccgaagatacgatttgatcaacttcagctttgaaaaacttctttaagcagatgcaaccgaaactggaatcgtcaacattgttcctataaagcaatggtaccttcaatatgagacaaaaattatatattaaatctgctttgaaagcaaagtgaaatttttgtctccaattataaagtaacataactattctaatgagcttttgctatttggatctaatgttatcatattattacctctacaacgttcatccttttctagcgcttgttgttgttcatcttttgcatgcggatcatatatgcgtgtaatctggtcgttgtcaaatttttattaattagcatttcaagccattgccattgtcaacgaatattcagtatttattagaaaaatcaacagaaatttaatatctatttagttttgttgaaatttaaagatataaatcaatatttactataaatttaattttagtaatatttttccgatttagattttgttattcccgtttttttatattgatcagttttagcgttttttagcggtgaacagtagactcaactcggattggactagacgggcgatcccggtagaacaggtccgaacgcccggtctggttcccaaacactgcaattaccgcatcttgtgttgtggaccggaccgactatgactgaatattgcattcattttgatcctaaaaatgtcaatcaatgctcatttatttattatatattttggaaaaaagtgagaaaaaactgaaacggtgcgacgttattaaatcttttaaatccccccaccaaagcatctgcttcttcctcttgtctctctctctctctctctctctttcatcttcaaactctacaaacccagaaaccaccacacagtaattaatgtctctttctttcttcccatgtgatctttaacagacttttcttcttattctccatctctgaagttgtggggattcatcaagacttccttatctgtttcttttataaaacaagagagagataccacttttggtgttctttatttgcaactctttcaggcaaacactctttgtctcttttcttatcttattattgtttctattttttgttgataatactttcgattttttttggctctctgttctttctagatcgtttggttttattgtctataatattcattttgacaatctatgtattgatatgagaacattacttcttagtctctttagtttttttttttgtttttgacccttaagcttgatttgttgtttttagcttctggtgatttgtttgatcaaagaaagcttataagtttttttttctttttcaggttaaagaaatcgataggctctgttcttgattgtggtggaagagac

SEQ ID NO: 12610 - DNA, 3000 bp, Unknown; identical to SEQ ID NO: 12606
  misc_feature (1)..( 3000): cDNA_ID_3025837_gDNA_ID_2214562_Annot_ID_185899 3000 nt of promoter + ATG

SEQ ID NO: 12611 - DNA, 3000 bp, Unknown
  misc_feature (1)..( 3000): cDNA_ID_3025841_gDNA_ID_2214562_Annot_ID_185898 3000 nt of promoter + ATG
ggttttgtgtttaggttgcatcacaacgaaagagctaggaacagtgatgagatcattaggtcaaaatccaacagaagcagagttacaagatatgataaacgaagtagatgctgatggtaacggaaccatagacttccctgagtttctgaacctaatggctaggaagatgaaggacactgactctgaagaagagctcaaagaagctttcagggttttcgataaggaccagaacggtttcatctcggcagctgagttaagacatgtaatgacaaatcttggtgagaagttaactgatgaagaagttgatgagatgatcaaagaagctgatgttgatggagatggtcagatcaattatgaagagtttgtcaaagttatgatggcaaagtgaggaaactattctcatatcttttctctctttttctttctttctttttttgaattgaacaactctgattattgctttattctatgtttgactgttcattattatgcattcgtcccaaatttcatgttatgaactattttgtgactttgggttaaattatttgtttggaagtttttagtttattttatattatgtgaagtaccattgtaatggtcgttgaaaaagctatctcttggtattagtacttttttattttattgtattttatagtttgcaatgtttgttaaaaaaaaaaagggttatttgtgtgattaaaatttgtaggaaaaatgtctgaaaacattatatcggtagttttaaaagcttagaattttttatttatttttaaattgttggtcaatttggaaattcccctattttttagaggaatgttggcaataatccatataatttgagtcaaattaaaatatgtttttcttattttacggttcatataagaaaataagtaaactgttagaaaaaagtattatcatttgtaacgattaaaacaagagataaaatttaggaaatacgaaaaagggttaaagaaaaacataacttccatttcattttttctttcaaaagttttcaagcttcagttctctttttccccacttcaactttcagctttgtaaataacattcgtgtttttcttgattcaatatattctacattttaacaaaaacatataaaaagtggtgtatgcatacagtagttattcgtgaggtagaacgtaattgtttaaattaaaaggcagatatgttttggggaataaaatcaaaaatggatggtaagtagcaaaagctagatagatgaaatgagaatctccaaacctttaattatgactgaacttttttgttggtaaccagtattttttatttttacttttttttgttacaaggcttagtttcttctttttcttttaaatattatcgaaaatcttgatacctaattattttaaaatgtgtgtaatttattaggagaagagggaagagagttatggcagcaaagcgtagtagcaattctgctgaatacaaagaaaagaatggtcgccggaaaagtcactgccgtattctctgagctccgaccatttgcttcttaattccttttctttatatgtttgtgtgcaataagagatttgtacctctcacacccattaaacggattttaaatgtcatatcttgtttgaatatgttaaatatttactatactgttatataaaaagttttaaagtactatcaatatagtaagttcatttaggcatttcctatctaccacaatgtttaattttcgtctacaacatacgcacacttatcaaacttgaatccaagtatatagcgacaacactaaatccgagttatgatacgacggtggcactagtacagaaacactatcacaatgtttttaagatattagcaagagaaaactcagaaaagatacacgaccaatattaggagactttaactaatactctggcgatctaactgttataatttatcagttgatttaggcgttaggcatttgctatctatcaacaatgtgggcgggcatatggtctaattcttgtgagatgataatacaattaaaacaaagaaaatacttttttaggaactaaacctaaacttaaaagtctttctaatcagttgctatttaagtattttcataataaatcaagaaatgcaaattgtacatgaattcgaaaagcctctcgttaagaaaacttatgattaagaatataatatccaaatactagtttataacaccaaatgcattgaaacactttgtgtcacttagcatcaaacattaaacacttataccaatttgaatttaacatggcaacaaccgatatcggaaaacaaaatccatcgcgtatattaatcggttgaatattttggtcagatgcaactaattgttccctttctctatgatacttcaatttgtatgggacaaaatggaaatcttatggataagaaacaaaagaaaaaagagttgtgtgaagaaaggtcatgcatatacattaagtgaagctttaggattcatgcaaaacgctttagtaacatatttcttcattttgtataagatttaacaagtaaaattctattcaaaaattctagtaattaaatgatttatagataggggattaacagtaaaaatacatctaacaatatttaatctaaaatggcaatagtatttaatctaaaatggctaggaatagcatccattgctttttgagaattttcctcttatgcaagtaatcctttcctttctctacaatatttttcattccatagttcataattagaaaaagctccaatgataagggacaaaatggaatatttatagacaaaaaataatagaaaagttctttgaatggccaataaattaaaggagtaatataaaaaaaaatgcgtataggaaaagcaacaaagatgtgtgtgaaaaaatctcatgcatttacaatgaagttgaagcattagcgttcatgcaaaaatgttatgctcattggctataaatatatatcttcaagaaaacaaaataaacaaaagagagaataacaaacaaacaaaaaagagatg

SEQ ID NO: 12612 - DNA, 3000 bp, Unknown; identical to SEQ ID NO: 12605
  misc_feature (1)..( 3000): cDNA_ID_2709247_gDNA_ID_2214562_Annot_ID_185895 3000 nt of promoter + ATG

SEQ ID NO: 12613 - DNA, 3000 bp, Unknown
  misc_feature (1)..( 3000): cDNA_ID_3025851_gDNA_ID_2214562_Annot_ID_185894 3000 nt of promoter + ATG
ggaagatgagtagcattggaactgggtacgatctctccgtcaccactttctctcccgatggccgtgttttccagatcgagtacgccgctaaagctgtcgacaacagtgggttagttggctttatcttcttcgatcttcgccctttagtagatcggatttagcttctgaaaactttgagattttggttatcgacacgaattagggtttgttaaaagtctttccctttttttttcttcgcaggactgttgttggaatcaagtgcaaagatgggattgttatggtttgattcttcctccttcctctattgatttttatactactttgtcactttcttcagtgggtttagtctctcgtgctgtgatttaaccttggaatgaagtattcacatttttgttatcagaattgtagatttgatgtaatatataccgtgtaaattttgacccaagatgacacattttacagtcccttagtttcatttcctgttcgatatgttgtgaatctgttgttagttttgggttttgtaagattttacgcagatttttgataaaggaatggtcttgctaagtgtttatcatttggtggtttttagggagttgagaaacttattgcatcaaagatgatgctaccaggttccaacaggagaatccattctgttcatcgtcatgctggcatggtatgtttttttctcctaaactataggaaattagtttctgctgaggatatgtatctttcaagttttttgtaactactattgtgtctagtctcgtagtatattgttttgtttcatgattatgggtatttctacttctgtcatgtcaggctgttgctgggcttgcagctgatgggaggcaaattgttgcgcgtgctaagtctgaagcacgaagctatgagaggtatcaatgaaaacatcagtagcttatatctaagatttattattatgaaagaactgttcaactcctaaagcttttctcaaggggatgtttctcttagttaaacgttcaaaatattttttatctgcattttgttagattaaaaatctaaatatatgggtataagatgtcaatgtgtatgttctcctttcttcctacatggctttgcataactttttccgactgtgtaaccaactctaccttcacttgtgataatttagtgtttatggcgatgctgtacctgtgaaggaactttctgagcgtgttgcaagttatgtacatctgtgtaccctgtattggtggctcaggtttgtccaattcatctacgtctttggtagtcacctacgcatttctcctacttgaatgaattataagaaaatggtttttattttgtaggccttttggctgtggggttattcttggaggttatgatagagatggacctcaattgtacatgattgaaccatcaggcatatcatatgtaagttatttctgcccgtagatatgtgtctttaagtatgaaattttacgttatttttccctgtcatcatatgaattctattcctgcagagatactttggtgcggccattggcaaaggaaagcaagctgccaaaacgtaagctacatcgtgaatgtatttggtatcatactagtattttctaggattctcttatagtggatatgcgtagtcactaagggtatatactatgtagtaccactaggattgatcaatttaacttgtccgaaggaaattctaactaacttaacagttaaatcaaagaaatcatttaaacttgaaggatcaagtgagctttcatggttgataggattgatgattctccataaatgttattaagaactttatgacagatgtttctggattgcataccttttggccgcctttgacatgtgtggaactagtttcaactaaacggttatagatttagttatcaaaaaggcaagggtatgcaagtgttctgatggatcagaggatttcttgcagggaaattgagaaattaaatttatctgagatgacatgcaaagaaggcgttatcgaggtggcgaaaatgtgagtagtgcttgcttctcatgtacatgttttctggttctcatgtgctttctataaccaggttcattttatagcaagatgtgatgttactttttcatgtgcagcatctacaagctacacgatgaagccaaggacaaggcttttgaattggagatgagctggatatgcgaggagtcaaaacgagagcatcagaaggtaaaattttataagtgcttgcttatgaaggatgatttaaggagatattcataaaccatatataaattggactcgtcgtataggtccctgatgatcttctggaagaagcaaagacggcagctaaaactgcgctcgaggagatggatgctgactaaaactgaggagtgtgttgaatttagatccgtcttattgcgtcgtttgatgtttcttatgtactctgaattgaattttgtctggagggacagttgttgcagtttcgcatgaaccattggagtcttttatcttattgctatcaacagttgctacgatgactccttcactagaattaacatccattaaaagtgaccacatgaataactatacaaacaacatttaaaaatttactcacttctcgaatactcttgacctacctaatctataatcattatatgtcaatttcatagtagaaagtcatgattcgttttactgtgtgaaacagatatatactagcagtagcaaaaactaaactaaaccgagaatctgtatttataatgcaaaatcatttgcaaattcagatagatatcaatttcatagtagagagactcatgagtgagtgtttgaatagtaaaaaacttcttagctggatctgaatatgatttggatttaatactactgaaaagaaaagattccatctatctactatcccacttcttccggaaagataaacaattgtgtttacgtaagaaatgaagcatgtcatcatattatattcaattattcatgggctcttgctatatacatctgttttttcactttgagcaacaatg

SEQ ID NO: 12614 - DNA, 3000 bp, Unknown; identical to SEQ ID NO: 12603
  misc_feature (1)..( 3000): cDNA_ID_2709251_gDNA_ID_2214562_Annot_ID_185893 3000 nt of promoter + ATG

SEQ ID NO: 12615 - DNA, 3000 bp, Unknown; identical to SEQ ID NO: 12601
  misc_feature (1)..( 3000): cDNA_ID_3025859_gDNA_ID_2214562_Annot_ID_185891 3000 nt of promoter + ATG

SEQ ID NO: 12616 - DNA, 3000 bp, Unknown
  misc_feature (1)..( 3000): cDNA_ID_3025833_gDNA_ID_2214562_Annot_ID_134889 3000 nt of promoter + ATG
agttcaagtagccagcataacaatcatgaaacaatatggaactcttctcttttttctctttttcttttaagtgttaagtctgtcatttttgttggttgttctctagtcaactcaattcaataatcaatatcataagaaaaacacatggcttagccatatttatagggttataaaaagcatttatcttataatataagttatcttctttgctttcatgtagaaagtatattctcttataatttgtttggtcaaacacaattgaataatatagtaacaggttgccaacaattgcatcagtgtcggctactgtggcttcttcttcaccactggcaaattctaatgtaactttttttatccacattgtaatccaaaacggatatttatataataataaggtgaaaaaagccaaaaatggtgagagtgtttttgggaggaagagaagacaaacgttgttgtctcctttattttggaattggaggacaggccatgtgatatgcgttgtgaaaccccaccactcttttagtctcttcatcgccaaaactgactacattcatgcacccattttttggttctttattattcttatattctgaacataatatatagtaatgcaaagatataattgccagttttaacttagtaattttttggtatgattttttattttaatataaaaaagtaacgtagtaatttatgtaagtgtcgtgactatgcatcattcacatttaattcttatagtatatgactattttattttgtcattttattattcttaaacaaaaaatgttttgatatgttctaaatttccaattcaccaagataagttatggatctatcaattttcaataatttacttaataggttttgtcacaatttcattcatataatctgaattttcagtagtgagaatgatgataaacggattcggaaaaaagaaatatgatgagaaaagtggatgtcaaaaaaatattttcagttactattggggtgaggaaaaaagagaatcttctttttttttttttattatactcacaattaggaggctttaaaaaacaaataaaaatacagacgaaaaaaataaaagtagcgttgacgacttaaaaagaaaaaactaaaattgtttaattggaagaaataaactgtaaggctgtgaaatgtagttacagcatatggtagattcttaaatgaatgaaataatatgataaggatttatcggtggttgtggttgtggttgtatttcacactaacaaaaaacttatataaacaagtttaccaaatatgctataatttttctaagaaaacgaaaaccaatttggataattggataaaaaatattgattagtgggagtactgaaagtattttttctctttaaaagatttacatagttttggataagaaatcaccacttctactccaaaaagcgaacatgagacactagatctccatggtattgcaaaacttgtcatcaatactccaaaaagcaaacatgagatgctagatatcctggcattaccatcagctcattttcgttatgtttcatgtttgtaatgatgcctcatgtattatactcaagatattggagaaggtggcgttaagttcaggtgcacttttggcgttatgtgttattagatggtaattgatttgatcaagtaaaaaatgtattaggctattagccacgacagtatatatgcagactatatgaaggaagaatatcacatcggtggctaatagtgaaaatcaccttttaggttattctgcttgtttatacagagcaaaagcatgcctgctaatctgcttatacttgttggtggctttgaggcaaaacttagggaacaggtcagacttacaattagaggcacttgaatgtagtttattgagtctaagctgcactagtttgtggattgagtttaagctgcacagatttcccactttggttctgtttttagtctaattttcctcctgcttggtttctcgtttctcatgtgtgattctgttctgtttgattccttgtaggtgtggtcaagtcttcatcagcttgcctcgtgtttggttctgttcttttctcaaacttactaccactggctgtaagatttactatccaaatgtgctatttacaaatgttaagatttgttgttttatgcttaaaatgcttacgtctagatggtgtttgtgtcaataattggtatcgaattcagatatgcaagttctctctatgtataactgtataactccctctttttgttactgtttctagtggtttcattcttaagacacccacattaaaaaggatcaccaatagattatatttatagcaaagacacccattaaaggatgactaatgaggatcgcctaatgttacctttagaaaaccatcagagacataataaaatccttacacatcaactagttcataaaagagacaaatttagcatgtactcttgtcaaatacagactgattcaatcttagtagttcccatattttattttattttaagatttaacctattcccataaaattattacctgaaaaagaaaaatcatcatagaagtacgaataaatgagagctgacaattaaagagcattacctactttttctgtcctcatctatctcctccattgattacgcttcttgattgaagcaccccacagagagagaaaaaaatagcatacatacattctctagttccttctctcttcttcttcttcttctaccccgcacgaacgtttctggagtatctcttttctcttatctttcactccattacagagcaaagcttgactctttaagttcacatggtgtgttttaaagttccttcttttttactcaatttcgaagctttgtgtctgttttatcaaataatgatgagaaattgagaatgtgggtttttgtgactctttgattcgttgtttagagaattgggttttgggattttgtgttgaattgctcagttttgaagtcatgcagataatatgttcgatgatattcctgttagtgatg

SEQ ID NO: 12617 - DNA, 3000 bp, Unknown; identical to SEQ ID NO: 12608
  misc_feature (1)..( 3000): cDNA_ID_2709225_gDNA_ID_2214562_Annot_ID_134892 3000 nt of promoter + ATG

SEQ ID NO: 12618 - DNA, 3000 bp, Unknown
  misc_feature (1)..( 3000): cDNA_ID_2712347_gDNA_ID_2214562_Annot_ID_134893 3000 nt of promoter + ATG
atcacggcgcactctattgaagttttcaaagcttctaacaagagtatcacttgtgggttcatcaaactcatcatcatccgaatctctggactcttccctttcttgaaaagaaaagtcctcaccatcatcttcctcctctggagttccatcttcctccttaacagatctcgacacatgaccattcccaacatgagaagaagaaaactggttgtcaattggatgagaaagaccaaaataatcccaaggtgcttcaggtggcatggaagaagattcctcaaatggggttgattccatcttttctatagacctgcttggtgggatactggatgaggtaacagtggcaataatagatactggtggtttctcttccactttttttgaagaaaaccctttgaatttcatatgattgacctggaacggactggtactaggaggcgacggaggaggagaatacgtgtcatggtgggaatgtgaagcaggtggaggagagtatgacaaatgagaaacagatttctcgattaaagcaagaggttgttctggtgttgcactagtggacgtgtacaaggaagattcaactggaacttcagtctcagaaaatttcctgagggcagttccggtactcttaagagactgaacgtatgaaacgtgagcagcagctaacaaacatcttccatcgagtgcttgttggacgaatttttttctttctcgacataactgtaaggctttatcttcatctattctggatgttgatgcacccattgtccaagcttacatgcaaaaaaaagagtaacatgagttagatttacaacctgcagaactactagaatagcttcaaattcagaaaaagaaactttaattagtggggagtgatcatatgttaattaggactcactaactattccgactaggaaattttctgttaagtggttttggagattctaataaataggaagcaggacgatggatagatccatcctgcgacataggcttggtttagaccgagggaactgtgttctgtattttggggttctatttcagttattgatttcagtaaaatagtggttctgattatattctagtgatccttaactctaacaaaaacaaacacaacaatcacaaaaccacttcaaaaaaaaaaaaagtattaaagcctctcaagacactgtattctagggatcaatgcactgacccctggcaagacccgatcagaaataaccaaaacataactagaagagagaattaagtaatagcgagtcatctgttccactaagttatctaatgcaaaggtgtgagtgagagtatcattgtattcatgttgaatatgagagaagaacagtgccctttattaccaaattgcatcatgatatataaaacaaatgaaaattacgcattgcaggatatttgctatttagcgagacatgatcattctctcaaatctcaaactcaaatctcatgcctccgtatatagaaaaaaacaaagaaatcccaagcaaacacaacgaagatacataaattaaatccaaggcaacaaatacaaatcaagcttatgttgctcccaacacaacacaaatcaatcatacataccaaataaaaaaaaccctcaaagcaactatctatcaacaattaaagaacaaatttccactttgaaatcctaacacaatctaacctattctcttaacttagtaacctgttccgccgtttaaagttcctcaagcaaaatccttatggaaagagtaaaactttcacagaaccatcggatagatgacaaacaatcagaatcacataagaaggcaactttttcgtaatcggaatcccaaaatagggcgagagagaatataaggagagcataaccaaagtcataccgcagacaaaacacaaaactgattgaacaaattaagaagttttcttagagtaatcgaaaatcaaaacctgaaaagtgcacgaatttgacaaaaaagagagatttttatagaaaggtaaagaaacccaaatgaaattggaccattagagtagaagaaaacctagaaaaggtgagatttttcacacaagtagaagaaacaacagtaagatggagaaacggtgatacctaaagagatgtcctttgagagctttggagttacgcgagaggatcaaacccaaaagaaaacaaaacgtcttcttctacaggagacgaagaagaaggagagaggtggtctgtgtcgtgtgtgagtcagcagcgaatcagatgggtagagagaagagagagagagagaagaggaatcttatgcgagaggagaaaaaggagattgtgtgtgtatgtgtgtgactaccaacatgcaataaagcatttgcttgcttgtaaagacgattttgacggatgactccaaaaacggtaactttctcttgccgttgttatttctactccggttacttttcttacaccttttttttgtttgtctttttatttttttaaggattcattagtttatgataaacatccttaatctatggtcttagtcaattgctttacaaaacaattttgttacatgtcaactcacattttagtattttactaataatcaaatccatagacagattatgaaaaaataatccatagtgatcccataaaaaatagaaactaatcttatcaaattgacagagatactaagacttattattggcttaatttacagaattgtttgaagaatttttctggaaatgatgggaaagaatctgactgaaatattaaaatagttttgcttcgatgaaatggaggaatagtcaaaggtgtggacaaataattaacatagaaatccaaatactgtattttcataaagacgaagatgggcctctgagagtaaggcctatttatgaagacgaagatgggtctctgagagtaaggccctattggaaataaagctcactgtaacagtaacagcagcaaaacccgtaaaggtagagggagagacacagaggcttcgagtgaaatcgtacattctccgatttagggttccgaacgaa

SEQ ID NO: 12619 - DNA, 3000 bp, Unknown
  misc_feature (1)..( 3000): cDNA_ID_2712343_gDNA_ID_2214562_Annot_ID_134894 3000 nt of promoter + ATG
tcaaatcaagagctaatttactttacctcgttggtaacattcgtgactttgaaatacccttcaaactctggtttgggtgtatattccagatcttctatgtctttgccaacacactgaattaagaagtgcaaagttaatactacaaattttatcaaacaagattgaagtggcccaaatatttaaaagaaataatagagctgagatatcaaccagagatgatatatccaatggaaaattgttaagaaaaaaaattcatgttttaaattacatagcaaaacgttatgttagtccacaacaataagtcttacagtcacacatcaatcaatcaaacaagcgggataatttcgtatggatcatatctgatttatcttggattaagaatgcaatcaaaataatccaaattcacataagggctatatagcagcttatctacgtttatgatttggaaacggtcatcatccatcatgtaatatatcatcattgattagatcaaatccaatgcaatacaaatgtatgcagcagttacctctctgttagtaattagaaaaccttgcccatcaaccatgtaggatatcatcataatttgatcatattcagcatccgggaacttcaatggaagctttactgtctctatatcgaatgcacaaacgcgaacttctgcgcgttggagaagatccgtcctcttctctagtatgacatcagtgctggaaatactgacattgtaccattgcccactacgcacatctggacagcgagaacacatcatgattttgacaaccttgagggctaaactaggattaaaagtttgactaaataggttaccattatcaattgcaaatcggacatgataaggaacatcgtactcgcggaggtccaccacagagtctaagcagtcttgaggacgttgttctctacattccaagacttggaaattataactaaggaacaacatagttttaagggataaatttgtaagaactctggaaatttataagaacaaaaatacattgccttaccgttttccagacaagatggattcgtaagcttcaagtgcattaaattttgcgaggtttcgttcgacaatatgcaacagatccctctttacttccaccaattgttgcacagtgtcaaatgatactttgagatattttttttgcaggccagatagatgatttttctgctcatgaacataagaaatcaagaaactcaaattggtatggtaggtcaaagaaaaggtcagcaaaagtgacaaccaaacaagaggtactgaaaacgttcatatcttgcataatgttgccactaaagaagaagcattaaacacttaaacatttactagcaaacgttttttgagttacaagaacgtttttggcaggctagatagatgatttgagcacatggaagcaagatcagttttggacttattactagagctgctcaatttgaagttgcaagaagaggaaaataactaaaagttgtagcaaatgtaattgacatgagtcctctatatagagagaaagaaacgagtaatcaacaggtagttgcaaactgcgtaaaaggagttatgctttagtgacttacaagataaagatcttctttgtgaacaatctgaatatcagcaacttgtctttcatatcggcgtctcaagtaggcttcaacttccagttccatattgtcctgtaaaaagggcattgcagtttagttgacatataggaagaaaacactcgagtacagagagaacatatatactttggtggcggcatacaagtaagggcggaacttgtacttagtcttaaaagaagagccgtcctgaaagaaacaaaaagggttgagcaactgatacgaagaaagaagctaatatagtagcaatgaccacagctgacctgagtgacaaagaaaaggtccacacaactaaaggttttcccagtatcggcatcttcccaagatgactgccaacaacgtagtataataaccaatcagtgagtgtacttagaagttttcagtattcagagaactaactactagggaagtcacaaaacgtgacttactgatgcaaacgtgagtagccacccgagccgcgtttccccttgggagaaaagcccaaatccaagtttagtttcgagttcatctgccgctgaaactttctgcacattcaacctccgatcacatctccttccgctcatatttggcccacgccgatgatgctaagagactcttgtattgattgcttgtgttgcgtattaaataaattagggttcaaaacaaagggattcgtgattgacactggtacggtgaagagatggaaccagatcaaataagagaagagagaatcatctagaacctgagattcttatgacgacaatacaaggaaatgaagttgtcatccgaaaatgaattagggctcaactaaaaaagacagatgaagaagatgaaatgctttcgcgcgcgttgtctcttgtatcaagggctttcctggttgttgggttcggttcaaatgaggcctcactttttatgagggctttctgttgttgggtttagattaaaacgaggtctcgctatttaaattgaaaaaaaaaaaccaacaaaagcacgaaacgacgtcggtttcgtgcttgaatctcttcttcctcgcgaacgactgagaagaagcaggagtttaatttcctccggtcgaatctgaaaacgaaatagctgccatagcttcttctcaattttccccaattgttgttgcccttctccctaatttcacgactttcgattcttctgagttctgagttcttcgcatcactgactgacgtaagctcctctttctctcttttgctttctcctctttctgggtttctctctctctcaacaaacaatcggagagtgagagatgcaaaaagtcctcatatttatatgttcggaagaagatctccaaacactaatagtacttttttgtagactatgaagatgagaaacatttgtgtgaaattagaacttctctactaagtgaaggttatg

SEQ ID NO: 12620 - DNA, 3000 bp, Unknown; identical to SEQ ID NO: 12607
  misc_feature (1)..( 3000): cDNA_ID_2712339_gDNA_ID_2214562_Annot_ID_134895 3000 nt of promoter + ATG

SEQ ID NO: 12621 - DNA, 3000 bp, Unknown
  misc_feature (1)..( 3000): cDNA_ID_2707655_gDNA_ID_2214563_Annot_ID_134898 3000 nt of promoter + ATG
gatctgaagccttcagctttcgatccaaaagataagatatggaggaggtttccgcgcgaaggaaccaagtacacacctccacatcaatctactgaattcaaatggaaagattattgcccactagttttcaggttagacaaaaaaattcctttacctatttcacattgctacaaatcctgtcttacttattgacatgttttgcttatggtttaattttccaggagcttgaggaagctattcaaagtagacccagctgattacatgttatcgatctgtgggaatgatgcccttcgagaactatcatcccctggaaaaagtgggagttttttttatttaacaaacgatgatcgttacatgataaaaacaatgaagaagtcggaaacaaaagtgagttcttttcaagttaccggttagagagtgttggctggctattaccaaaacttttcagattgcaattactgagcgtcttttttgtcttcttaatgtaggtgcttctggggatgcttgcagcatattataaccatgttcgagcatttgagaactctttggtaatcagattctttggtctacactgtgtgaaattgaatggaccaacccaaaagaaggtagatacaaaaaattaacactttatgtggcatggttttgaaacgtttggtttagtttggtaactctcttggtttgcatataatgcaggtccgattcgtcattatgggtaatctgttttgttctaagtactctgttcacagacgctttgatctaaaaggatcttctcttggccgtacaactgacaaacctgaatcagaaatcgattcaaacacgatcttaaaagacctcgacctgaatttcattttcagattgcagaaagcatggtaccaagaattcatcaggtaaaaaccattatactttactctatccatagtttgtttgtgcttgtttcatttctcatggttcattgtttacatcacaggcaaatcgataaagactgcgagtttctagaacaggagagaatcatggattacagtcttctagttgggattcacttcagagaagcttctgtcgctggagagctgattccttctggagctcgaacgcccattggttcgcttttgtccaatctaaaaactacttttcccatcagcaaaaatgtatcattcacagaaacaaagtaattgtttgtttatctacaggtgaatcagaagaagaatcaggccctcgtctttctagagcagaggttgatgagcttctttcagatccctcaaggtaacacaacataagatatcaattaacaacactttcaaaactcaaaaccgaaacacagaaacatggattttgaatatggttgtgttcttgcaggtgggcaagtattagattggggacaaacatgccagcacgtgcagagagaacgatgagaaaaaacgacagcgagctgcagcttgtgggagagcctacaggagagttctacgaagtggtgatgatatttggtataattgacattcttcaggattatgatatcagcaagaagcttgaacacgcttacaagagcatacagtatgatccttcctctatatctgcggttgatccgagacaatactctaggcgtttccgtgactttatcttcaaggtcttcacagatgacaattgagatggtctcaagttgtctctggcgtttttagatttcttgattcccaagtaagagctctgcaaataggctaccttgcaaatatgaagttcgacgaatcccatttcgtttgttcgtttgtttcaatttatagattttgtatcaagctttgtaatcagctaaaagccatagcaatgaatattcttttttcttgtatactttttatgtaacctttcataatatgattaagattttcttgtctggaaattcttgtaaatgaaatgattttaattatcgtggtggttgattcattttatattttaactatacatttgcagtatagtgttgtcaatgtgacgtagttaacataaaagaaaacaagttgcataatttcttttacagatacttttccactaaaaatacttcatcgacaactacataaaaaattgaagtggtttaaagtttatagaatttacaaatgtgattgtatattctaaattgggaacaaagaatatttgatgcaccaacaaaaagattcgttcaaaaacaaaagagattcttgaaagaaactagagtttttatttctctaaaaggtggaaagtttcttggtcaggtaattagatactgaataaagacatgaagcaaaactttataaaagatagacaactttgggcaatgttagttacgtaggtgatgatgatatcttttgttttcttcaataaagaaataagagtaaaagattccaataattgttctaaggttaacactcgctgttgttgtcgctttatgtggtaaacgtatagagaatctctttgttctcttctgccatttgtccccttacaaaattaaatttgcgactcttcaaacgctatttaattattttaaattgattacgtattcttgaaattgagccaagcacttgccatttatttacatattaactacttattcaacattagatttgtagtctatattcattcaattgttctaaagtacaatctgtaaataaagacatgcgtcaccaaacgcaccgctaaatcttagaaaatcgcgatcgcgtttgaagacaaaagaaagctaataaaactagcactttcatcaactttacaacaacaaccaaataagcgacggcgattagagagtcctgcgtagtcgtgctcactgatcactcttagctcgtgccgtgatctgagactgagaaaacatcaccggttgggttttctctacgattccggtgcaccgtacacttcaccgcagtggataaatctctgcttccattttgactttttgaaaataaaactacaacagtcgcagagagattaaacttcgaaatccgatcgatcgctttctctctcggcgtttcttctcaggagcttcattcc

SEQ ID NO: 12622 - DNA, 3000 bp, Unknown
  misc_feature (1)..( 3000): cDNA_ID_2709259_gDNA_ID_2214563_Annot_ID_134900 3000 nt of promoter + ATG
gctttgcttgttgatgctgttggtactctccttgttcccgctcaacctactgctcaggtctctcaaatttctctgttactttgtgtgattcaacagttgaacaaatgcttcacatgtttcttgctctgtgattgaaattttttagaaagctatgagcattttgaggattcatgtttgattctgagtaaaaatttgatgcttattgttatgttaagaatgtcttaggctttttatgatctctgtttgttcttagaagagtagatagagatttttattgtgtagattctaagatgtgttatggattctgattttgtagatatataagaatattggagagaagtacggagtggagtactcggaggctgagatacttactagatacagaagagcttatcagaaaccatggggtggatctcatcttaggtatttagaatcatcttctttctctttttgtttcttctactccaagaaaatcaccactaggcaaaatgttcttttgtggctttctatttgtttgtatgacaacttttaatacttgatcatgattatgactctagtgatgcatctccgtacaaagatatctggtttaatactgactctttcgaatatacatttgctgtggaatctctgttggattcataaatgggtctgcttaagacatttacttctgtgctggtcttgatttttgattctttgtttgtagatatgtaaacgatgcaagacctttctggcagtatatagtgactgcatcaacaggctgctcggattcacagtactttgaagagctttacagctattttactacagaacaggtttgatctctactactacttctccatatgcttcagtaatagttttggttctttctcttgagatttctccatttgctttcccaggcgtggaagttatgtgatccagatgcagggaaagtgtttaaggctattaaagaagcgggtgtaaaagttgcaatagtctccaacttcgatactcggttaagacctctcctacgtgcattgagatgtgaagattggtttgatgctgtagctgtttcagcagaagtaagataacctcttttcgtttatatatttttgttgatgatccgaaacgttttgggagtgagtgtgtaaatacttaaggtttttggttgaatgtttaacaggttgaagcggaaaaaccaaacccgactatcttcttaaaagcttgtgagttattagaagtgaatcccgaggatgcggttcatgtaggagatgaccgtaggaatgatgtatggggagctagagacgcaggctgtgacgcttggctctggggaagtgaagttacgtcatttaaacaggtaaacgaatctctctggttttgctcaaatctctcaagaatttaaaaatcattggtttacttgaaatgaatgtgcttttgttttgttctgcaggttgctcaacggataggagtgaaggtctgaagcaaaagcatatgagagaaatggttcagagacatgttcagacttcagttttagcttcttctttttttgtgtgagcagttttgtatattccatttctcttttgtagcataatgtgtgtaatatatgttgcggctaatgtagaaaaccagaaaacaatgtataataaaagatcaataataagcttcatgatcgttcttaatccgaaccgaagtgttgtactgttttcgacatttgcttataaaagaaggagaattgagttctttaaatatgtgatcaagaagagatcaagaaaaatggaaatttagagttgaacctaggcaacgtatggacaataccaaaagttgccaacatatcaatggataaatctaatcaaactgtatctgtgattattgtgggttgtattttaacattatgttcataattgttgacaaatagtcaaatacttcacattttagagattatctacatataatgggctacaaacatgtaaactcattgcaaaaaaaagaaaaagaaaaagcaattatcttagggccaattgtttttagagaagcccatttagatctttggatttaaagaggcgtaaatagaatgaggaaaaatccaaaatatctccgtctctcttttatcctcgtccatggataatagaatagaatcaaggcttttggcctgaccgagatgaccggagttgacttgtgtaatatgatcagaaaggctataatataatacaaaataaacgatagacactacaccatataagatgtaattaataaatttaaataaggaatatacatttgttaaatatttgtaaacacttaatgcctacgtatatactacatagaaatggttggattcaggagaaaagccttaacatattccacgtgatttgctcgtgcctctcaatagtccacgtccaccaaacccgtgtatcctcgtgtacttcttctcagtgtctgtctcttttcttccagctgcgtcataattcatatttttggtcttagtttacttaacgtatttgtggtagaaaaatgtgattgcatattctgtatcttcttatagtagttgttcctatttaactgttattttttgctaactaaataatttgcttaataaatcgaatttctattttgacacattataaaatatttagaatttttgattaatactcatacattcatattcatgtaattatacgatacaatagtgtaaacttatgttataaattacgataagaacattaggatattaatgcctgtatccggaggtcaacaggtgatccttggaacatgctcctacttgggggaaaagtgctcaaccacgtgtcaacgcatgtccactcgtgacccaatgtattttaatttattacatatacaacacagagtcattagtatttttcttgtgtccgtgtgtgtgtatcagtgtatatataaacaaaaatgagtgtccacataaataatccaactaacacatcagcataatcccaaccgaaacagcttctagagagagacaaaaaagaacagagtaactatctaaaactcaaaatg

SEQ ID NO: 12623 - DNA, 3000 bp, Unknown
  misc_feature (1)..( 3000): cDNA_ID_2709263_gDNA_ID_2214563_Annot_ID_134901 3000 nt of promoter + ATG
aacatactgtagctctgaaagcaaaaacgtattatatttgcaagtaacacaatcagatctgagctatttagtattatgatgaacggaaacgttaaaaaaacgtttactttgttaaattgcttacaagaggagtcagtatttttatactaatacttgactgttattatatactcacaattgtcgtcaaaaaagtatataataactaaaataaaaaactagctaaaccaaatattattactttttgctaaaaaaagtaaatatcatcagaggaaagttagattgtgccttgtcaaaagacctagatgcaaatacaataccatcatacatatctctttggttactcactagtcactagtgaacaaatgaaattaatatcacaatttcaacggatacagttttgtcaactagcagtactcatggatatatatgttccacgctaataatattatattttaataatctaaaatactgcaccaactaaaaatttaatcactatcctctgtaacttctgggatcaaaataatatttctgtttcttattaattgattttctttgaaaaaaattgtttcaaaaatattaatattttagatttttatacaatattaattagttataattgatgaatatcaaattttaaaataaataactaatattattagtttaaaattataaaaaatataaatcacaaaaagtaatatatttataatgagctttaatatattttttgatatgtgtgtttttttagaaaatcaattattaaagaatagaggaagtatattacaaaccagtagaaataagccaaaaaataaaaataagaaaaaaaacaaaattatatcctttttcaaactgaaattttcaatcgagtgaaatatttcatatatcaaatttgaaatacctgtttaattttaatgtattaaagtaatgacagggttagcgataagttgacaacatcaaaattgaatcatatgggtagtttaatcagctggtaaaggctcgagttattttcaatattttttacttttttttttgcgtccaaacccataaaataagagttgaacgttgaaagccatatcaagcatcgtatgcttcaacagctaaactattctctgtggttccacgtgtaaatgccatgctctctactaacctacggttcttacacgtctccaatggacttcaaacccatcgttcgaaatgataatgttaacttctatacattccaaaaacaatcgcacaataccaattcaaaccctcctccttcttttggtaatatcactaaaattgatctaaatgaaagaaaagaaagcaaaaagggattagaaacagaaaccatgaaccgaccggtataggagatagaactgaaatagcactacttagaccaaattcaacatttctgataaaataacctaaccaaaccattatctaagcaagagaagaggctagcataatgattagaaaacgttattactttttaaaaatgggtatcgaacgttactacgttagacactcgagttcagagagatcttcattactggcgtttaagacgtttcatctatttcccgagtgatcctttttgaacccttggatgttcttcttattcttattttaccaaatgaactttctaagtaagtaaacattatgaataaatcatatgcttcgaaatctatttaatacttaactgttagttttactggaaaaggttggataaagaaaaacttgagaagaaacgtcgtttttgaacgttaactcaaaattctccaaaatgggtccaattatggatttatgtttccttatccataagactttttctaatcttctttaacatcgtgatgtcttattataccacatagacacatacgtataaaggactcattgtctatccaaagaaacactaaaccaaatcttattttgttcgtttttccatacgaaatgatgaaatcgaccaaaaagctcatgaaataaaccaaagccataaaattttgtggaacaaaacattttccttagccatgttggtgaattcggcattttgttaatagtcaatcaaattatgcataaaatggcccaaaactatatactccttaaattttgtggcccatatttgtcaacacgtgggcccgtttgtcaatttataagccacgaatttctaaagaggtccctctaaaatagaccagttcttcaattgtatccttatattactttgcatgacacataattggttagggcccaattttcccacttcttttcttttcatgacttttatccaaaaatatttgtggataaaactttttatccttgtcgatgtgaaagctaaaatttaatgaagcttaagcttaaccgtttttccacgaaataatagtatccttctcgatgtgaaaataaatactacaagaaaactaattgtatgcatttattcctttttattggctaatttgatgtttcaacaacgtaatatatcatcaatcagacaagtagacgtttgtgaattcttgaagaatatctgcatgtaaaacacggatccatatatcaataatcaatatatagaacaagataaataattctgattgaaaaagaaataatgataaatctttttttactttttgtttttttataaagaaagataaagctatttttgtgtgtcaagtacataactttaatctggatctcaactttaaaaaccaaaattcaaaacacaaccctttcttcatatctcaggattataagactcatatggtttctttaacaaaaaaaaaaaactcatgattaaagattaagagtgtaataacaagtttttaaaaatgccacatcatcagttcttctgattagcggatagggtagaaaaactgtagacggataataatatgaaagggtataaccgtaacaacacatctctctttatgcgttaaagattctccgcacacgcttcttctccttttataatccccagacgaagacgaagccgaagataacggaacaatcaaatcaatcatacagaagcagctaatg

SEQ ID NO: 12624 - DNA, 3000 bp, Unknown
  misc_feature (1)..( 3000): cDNA_ID_2709265_gDNA_ID_2214563_Annot_ID_134902 3000 nt of promoter + ATG
aacatggctaaggaaaatgttttgttccacaaaattttatggctttggtttatttcatgagctttttggtcgatttcatcatttcgtatggaaaaacgaacaaaataagatttggtttagtgtttctttggatagacaatgagtcctttatacgtatgtgtctatgtggtataataagacatcacgatgttaaagaagattagaaaaagtcttatggataaggaaacataaatccataattggacccattttggagaattttgagttaacgttcaaaaacgacgtttcttctcaagtttttctttatccaaccttttccagtaaaactaacagttaagtattaaatagatttcgaagcatatgatttattcataatgtttacttacttagaaagttcatttggtaaaataagaataagaagaacatccaagggttcaaaaaggatcactcgggaaatagatgaaacgtcttaaacgccagtaatgaagatctctctgaactcgagtgtctaacgtagtaacgttcgatacccatttttaaaaagtaataacgttttctaatcattatgctagcctcttctcttgcttagataatggtttggttaggttattttatcagaaatgttgaatttggtctaagtagtgctatttcagttctatctcctataccggtcggttcatggtttctgtttctaatccctttttgctttcttttctttcatttagatcaattttagtgatattaccaaaagaaggaggagggtttgaattggtattgtgcgattgtttttggaatgtatagaagttaacattatcatttcgaacgatgggtttgaagtccattggagacgtgtaagaaccgtaggttagtagagagcatggcatttacacgtggaaccacagagaatagtttagctgttgaagcatacgatgcttgatatggctttcaacgttcaactcttattttatgggtttggacgcaaaaaaaaaagtaaaaaatattgaaaataactcgagcctttaccagctgattaaactacccatatgattcaattttgatgttgtcaacttatcgctaaccctgtcattactttaatacattaaaattaaacaggtatttcaaatttgatatatgaaatatttcactcgattgaaaatttcagtttgaaaaaggatataattttgttttttttcttatttttattttttggcttatttctactggtttgtaatatacttcctctattctttaataattgattttctaaaaaaacacacatatcaaaaaatatattaaagctcattataaatatattactttttgtgatttatattttttataattttaaactaataatattagttatttattttaaaatttgatattcatcaattataactaattaatattgtataaaaatctaaaatattaatatttttgaaacaatttttttcaaagaaaatcaattaataagaaacagaaatattattttgatcccagaagttacagaggatagtgattaaatttttagttggtgcagtattttagattattaaaatataatattattagcgtggaacatatatatccatgagtactgctagttgacaaaactgtatccgttgaaattgtgatattaatttcatttgttcactagtgactagtgagtaaccaaagagatatgtatgatggtattgtatttgcatctaggtcttttgacaaggcacaatctaactttcctctgatgatatttactttttttagcaaaaagtaataatatttggtttagctagttttttattttagttattatatacttttttgacgacaattgtgagtatataataacagtcaagtattagtataaaaatactgactcctcttgtaagcaatttaacaaagtaaacgtttttttaacgtttccgttcatcataatactaaatagctcagatctgattgtgttacttgcaaatataatacgtttttgctttcagagctacagtatgttgtccacaacttcgcaaacatacttttaaataagagtctagaaacgcttgcaatttgttaaagagcgacctaattaataaataaacgtgagtttctagtaattactgatgtaattaaaatgatgcgtaattataaaaatatacacctgtttttctctagcattctcgaacggtatttaattttgccgatttgcatcgttcaattaactatatacaacaaagttgtttcctaattagactccatatataattggattatcaaacaaattcctcaattccaaaatgctttcaaaatttgtattcgaaaaataaatttacaaaatggtatcgatgttaaaattatgaattttgaatagaagctacaccattaaacaattttcatcaatggtttctcattgaaaaactgttcaatataaaaataaaatataatcaaaaaatatgaaaaagaatataattagtttctcaagtgagaaactttaaaaaacgcataaaaatacttgtatatcatctattgatcaaatattattttattattaaactttaattatataactaatatttattaaaatactaatattttttttttttgagaaaccatgaaggtattttactgatagagatgtttttagctaaagctttaacttctttttttgaaaaaacaaaagctcgaattaggcgaaaaaaaactagaaaagataaaaaagatttcaaagaattaaagattctatataatctttctcaatcaatttatgagacttctcgatcatatctattagcatggattatagtgatcttttgatatgattttctttacattttatatatgtgtatatatatatatatccccttaaataaatatgtcattaactcattatcttccctcactcgacatagttgactggtttcttgtcgccaagttttgctgcccaactataaatatgtgctgtgctcatgcactcttcaatataagtgttttgtgtaactaaaacaaaat

SEQ ID NO: 12625 - DNA, 3000 bp, Unknown
  misc_feature (1)..( 3000): cDNA_ID_1807035_gDNA_ID_2214563_Annot_ID_134903 3000 nt of promoter + ATG
agcaacccatgccatagaggcgcaaaaacatgacggtaaaccccagatcgcggaagcccaagttgaggccaatgaccctgttgtagagccccagcaagactggggtggccgtggtggttgtaggtggggatgttgcggtgggtggtggcgtggacggtgcagatactgttgcaggagtcaagccgaggccagcgaggttgtggaaactgttgagcccaacgatgttgagcctcagcagggtggccgtggtggtggcggtggtggtggcggaggccgtggtggttgtaggtggggatgttgcggtgggtggtggcgtggacggtgcagatactgttgcaggagtcaagccgaggccagcgaggttgtggaaactgttgagcccaacgatgttgagcctcagcagggtggccgtggtggtggcggtggtggtggcggaggccgtggtggttgtaggtggggatgttgcggtgggtggtggcgtggacggtgcagatactgttgcaggagtcaagccgaggccagcgaggttgtggaaactgttgagcccaacgatgttgagcctcagcagggtggccgtggtggtggcggtggtggtggcggtggccgtggtggttgtaggtggggatgttgcggtgggtggtggcgtggacggtgcagatactgttgcaggagtcaagccgaggcaaacgaggttgtggaaactgttgaggcccaacaagctaagccatgaattgcgtgtaatacaaactctctatgtttgtatgcatgcatagctaattaccattacgtacgtatgtcaaaataaagcaaaaatagtacctaagaaggtacctagaggtcaataaaagaaaacgtaggttcatataatatgtattttgttatgtagtgtttcttttctcgtggatgttataaataataacaactgttttttaatttattttttgacaaatttcgagtcataaccaattcatattatacgggtaacacaattgagttaagtcaaattccgataggaaaaacggaataaaatggacttaatcatttgagtaaagaaagatccccaaataataacaactgttttaataccatggattataatattttgttcacagtttaaattatgaagaggcatgcatgtagctaagctagctagctcaataaaagccataggttaatataaaatggaaccaaacagaattattatcctaaaagttaagaataaagaataactgattctactataaaatcgtaaacattaaaggtgctgctgtaaaatcatgtattcgaggggaatatctcgtctaattatgtatgaatcaagtatatttgtattaatcaattttagtttctacattagttacttgtatgggtgtttttaaatggatagttttaaatatataaaaaaacattttctgtattcctaaaaagtttgatgttctagagttttcacatatattcaaaaataatcattgtttaattattggttaatcatttttaaaaattaaatattttttaacaattttgaactaattgtagtataaaatagttaatcattatgtcttaaaatctaagatttattaatattaattaataaaaataaagtaaaaacctaaaaaatcaatctttatgtaacaaactacaaacacgtaaacatcaatattttatgaaaaaagagagtaaaaatatgagtgtatttaaatgagaactgtgtcttcttagagacatttaaaactcctatttttgggatatttttaactttactattatttttcgtgaaagatatttgtgaaaaattgttgaatgaggatggtcaaatagatatacccagttatccacttacattattttcatgtttctttttatttgtattttcattttttttgtggtttcatttcttaccttccaaaacttccgaaattattcgaaattacgccactactctcggtcaacctcacgacgatgtcgttccttttgtacttggcccaaaccgaatggatccagtccactggcagttccaagccacatgttcaatatgcctacccggctactccgaattctggatctatttctgttgtcggataaccccaaaagcctttccacaaaaatttagtagttttcctaaaatttagacgttaacccagtaatataggattccacacgtggtggcatcgatcgacaactataaagtaatcaccgtttttactccaaacgatgcctgcgaatgctatgttgcttagaacttggaagagtggtcaattgtttcgtagttgggtcatacttcattagtctaccgattctgtctccactcatcgtactatccctcaattaatcaattaaattaacaattacgagctaatccatcatataaacatgctccttttattaatataaagtataaacatgttctttgtttaagataatataagataattttaactctataaagtagataacttcggtccgtggatcgatatcctatccattggtcaatcgaagggcttcattcagctcacatgacaaaacctgattggttacaccacatgttgtgccaactttaagaaggcccgtataagcatcggctatatagaggtcacaagtggatttgtcaaaggcaaggccgaacggacgaacggtcgtttttggaatggatagaagctaacattatcatttcgaacggtgggtttgaacttttaagtccaagaataggactttgtgaccactggtggacacgtgtaaacacgataggttatgatcagatctattatatatggtctctaaagatcatataatttttttttaacattttcgttatagaaatatccctataaatatatatgccattatcttcgatcacgcgacaaagttgactggtatcttgtccccaagttttgctgcccaactataaatacatgtgctgtgctcatcatacacttcactaacaaaatcatcttccctcaataaaccaaataagctaagtgttttgtgtaacgaaaacaaaaa

SEQ ID NO: 12626 - DNA, 3000 bp, Unknown
  misc_feature (1)..( 3000): cDNA_ID_2709268_gDNA_ID_2214563_Annot_ID_134904 3000 nt of promoter + ATG
cggtcgcatcctcaaatggagcggtgaagatcttggctggattgaattcgcctactcatctccccataggtttgttttatttatggatgaagtcatgcaccaataataagtagactgtttcaacgcaaatatttgtgtttgattatattactggttaaaattttatatttatatcttggttattatatatttatatctttaacaaacattatacacatttttttggtaaatttaataatgtttgaaaacacttaattatcaataacattggttatagacaacacaattatttaactatattttaattttgtgttgtaaatatatgaagaaaaaattgttcgagccataaggtggaacctgcgtgtggaaggcctttgggacttagcttcgagaagaaatcgggagatttgtatttttgcgacggttacttaggggtaatgaaggttgggcctaaaggaggattggctgagaaagtcgtggacgaggtcgaaggtcagaaagttatgtttgcaaaccaaatggatatagatgaagaagaggatgctatctacttcaacgatagcagcgatacgtaccacttcgggtattataacatcacttctctaataatttttttaattaaaaaaaaaaaactgaaaccaaaaaaattggataatttttagtgttctatgttgagaattgagatggttagaaatgataatttgcatgtttgtattttataattttacaaattgcaaaccacaaatgaaaataaaatttctccttctaacgtttgaggtttacaattattagataaaatctttgttttaaattatacttaagattgtagcttcatcatctgagaagaaagatagtaattaaccttcaggtttttaatgttcgctcgtgtttacaactttttttttttttttaaacgtataaagtaaaagaaaaatgttcttaagacaacaaaatcttaatgtggggatattttgaaaatgattttttttttataaacgttacattattatttggagcagggacgtattctacgcttttctgtgcggtgaaaagacaggaagagcaattcgatacgacaagaagacaaaagaggccaaagttataatggaccgtcttcatttccctaatggtcttgccttaagcatagatggttcgttcgtgctttcttgtgaggtcccaacgcaacttgtgcatcgatattgggccaagggacccaacgccgggacccgtgacatatttgcaaagctccctggctacgcagataacatcagaaggaccgagacaggggatttctgggttgccttgcattccaagaaaactccattttcgaggttatctatgatccacccgtgggttgggaaattcttcataaagacgttgaagatggagctcttggtttttctttttgaaggagggaagcctcacgccgtggctgtgaaactttctggcaagactggagagattatggagattcttgaggatagtgaagggaagaatatgaagtttataagtgaggttcaagagagagatggtaggctctggtttgggtctgtgtttttgccttcggtttgggttcttgaccgtcaatgatttatacgttttacattatataagtttctcatgtgtgtggatttgatgataattacaggtttaaacgttaaagtttttgctgtatccggttagatatgcatctaaatacatcaaactcttgattttattaatttactgaaaatatgggttcttttttcttgttaggtaattttggtttctttatggttttctctccttttaatccgaggacccatttttgagtttgaatatctttagagtttgttttttttgggtttattcttgcagatgaaaatgtttcttttaatctttgtatatattacttcaaaacaaagatatgcctatttatgaaaacaaaacaaaacatgtacgtatctctatgagttttcttttaattaaaaactttacaagaaatttgaaacttgtgagtctacgaaccggcttgcgcagtccacttaccataacaggcagtattagagtgggatatttgtaaattgaggaagtcactgcctcactggtgacagtactttgtagatacctttctttaattggttctgatgtgtttggaattgtttgtttggaaggatttgataacaaataaaatacaagcaaaaaaaaaaaagatatggtcagaactcagaaggcaacacaacgaataggttgccgagtggggctcatgccgttgattcttctgctcactgccccttctcctgtctattcacttcctttgtcccttatttttatctttatttttggtggtgaaaatttatgtttcatttatacaagctaaaatgtttttgttataagtcaaacaaaaacaattattattaataatattggaggcttttattgtacttttggtttgaaattttcgaaactacgtctcttaattctcatcctttgatattctgtgcaaatgaatatttattttccatatagatagatattattttttttgttggataacatttacactttacccaaacttgtaaacatgatttcaccaaaaaaaagcttgtaaacttgaatggaaaaaaatcagagtatataaaagatagtcttaaaattggacaatgaagtaaatgtggccctcaatatccggcatttgcaagcaaatcataccatctacatgtatatatactaaaatgaaatgctttattaggaaggaaatctttgaacagaaaaatagaaataaggtaagacaagaaaaaataacaatgaattacaatccacaaatcccaagaatgagaaaatttttaatttcctaaagaatattttgacacgaattcgacatgtataagataaaactattaattatttcagacgcctatatataaccaccataactcttactctgttaccaccacaaagacaaaacaaaaaaaaagaggaagcaattactataggggaaaaaaaaatctgaacaaaatg

SEQ ID NO: 12627 - DNA, 3000 bp, Unknown
  misc_feature (1)..( 3000): cDNA_ID_2709272_gDNA_ID_2214563_Annot_ID_134905 3000 nt of promoter + ATG
gattatttattataacaaaatctagaatccatgtaatagccaaacaaaagtaaatatttgacttgttctacacatataataagtacatccgatctttacattgaaattttcatactctgtgatttgactggttgaaagaaacgtattgtgtaattatcatatcttattcagcgaatattttgtatttgacttgtaattttgatattgttctatattaagtacaaaattatatccatgtgcataataaaataagattaaagattggtataaatgcaaagtcaatgtcacgaatattactaacgcatagagagacgttggcatgtgacatgatagaagatacggtggatcgtatctggtggcgtccatctttgctttacatatatagactattttatgattaatactaaagttataaaaacttttttctaagggagttttaagaaattaaactttaattgtgtaatatgttaacgttatggaaaagatgttacttaaaatcacccaattaatagaaaaatagtatccaatttttgaaaacaacaacaattgatgcgtattacgagtggttgtacccaatcggtcttatagttgacaaaatatgtaaaacaattctgtatcgataagctacactattattagtatatgtctttatttgtttcggtgtgtataaattagtatcgaatcacgttagctcatcgtgatatcattaacaataactagattattatataaaagaaatgagcttatgttcttaatacggtgaacccaaacctcagccattatattaaaaagatacgaccgtacgttgagatctattttgagaatatgaacagctcgacttgtcgacaaaataatatgaaaaaccgagttaataacttttgcatattccgaaaacttcggttgcttttagttgtgcgatctcaaattttcactgatttttgaatagaaaacggtttatatggaagtatatatatcatgtaacataatgttagcagaaacatattgttagcttttagtcctacaacacaaaacaggctactgtcaaggttaggggttacccttacgtattttagcgagaatattttaccgaataataccatttataacattgaaaaattaatcattaaatcgtatggctataatcaattctctacaaatctcatcgttttctgttttcctattgataattttcacaatttataaactacgtcgttttatctgtccagaaaaataaaacatttatatacaaaaatgtattgtatgaaaatttaaaaatatattccaaatttctactgcttaaagaatcccaaaaggaacaaaagaaaaaacgagtggctatctcaagagattagaatcgttcttgggatcaggctttattcaaatggcattttgtggaaaaggctatatatgacgtaattaccattaacctttttgaatggttactatatattatatacgaactcttttacgtgtaaattaaactgggataacaaagtccatttcatgtgaattttaattaagttaaaatgtagatgatccttatttttcctgtcccaagatggtttcatcattagtctttgatctgtaaaaaaataaaatactaaaccgaaatttaaaatgcccttacaagcgatgttaggacacaatagacggtatatggccagtgcccctccgatagagcacaaggccaagggaaagcaaatattacacaccaaatctttatattttatgttacgtatcatataatacaataaataaataaaagattatatgattatgttcgtgtaactctaccaacaaaaaatctccagttgattataaagctaacattaaactcctttctaaagccacaactaatttatttggttggtttagaataatgttattatataagggtgtagaccaaaatcaatctcttgaaggagcgagcaagctagggttaaagagatcgatgttggtctacatcgctgaccttaatattcataaccatataaatattatatattttaaaaaatcataaacgaaagttacataaccaggtaagagtaagatacggtatacggtattaccgcgattattgggctgatctggacatgttattgggcttattgaacttcaaatacaagtgatgaggccgcatattctattttcctttttggtgttatgatcgactaaacaaagaaacttcatacgctaaaactgtataacttccaccaacgcaaacaagagccaaaaaccaatatttctaaacaaaccaccaagctcaccctcactgcatatctccttctccgaaccacctttagccgaaccattgatatagtttctcaagcgatgacggatccgaattgacggcaagttatgtgtgagccgtgaggaatttgatgcattagtgaactacttgtcgcaacttataatcttgtgggttgcaaatagggttttaatgttaaacatctttctaatggttgtcttaatcggtaagaaaataaactgtaaaagtgctttacaaaaacgtgactctttttcttttcaccacaaacagaataattctaacataagacagagagacacacgtcacaaagtgaaaacaaagtatccccatttaaattaaaacagtttaacaagataaaatacaagtccgattttttcatctcccaaagattctcacagttaaaaatagaaaatagaaaaagtatatattctcacaatgctataaacgcttgaggagcatctgatttatcaataaagagaactaaaactttacaaatccaaaaacaataaaattatataaatccaactactttaaacgattttccaactagaaatttcgacttgatgattatagtgtcactgttttgcgtatctttatttaaatctaatagtctcatggttcccacatgttgaaggaacagaataactaattagaaaactagtacttatttatcgataaagaaaaatattattcttaaagacaaaaaacatgtaattaaaagtagtaacatg

SEQ ID NO: 12628 - DNA, 3000 bp, Unknown
  misc_feature (1)..( 3000): cDNA_ID_2712373_gDNA_ID_2214563_Annot_ID_134906 3000 nt of promoter + ATG
ataaataatcggaaaacgtttttatcgtcgtcaaattagtgagctcagaatacgactcattaagtcatgacaatctgataaagacacaaaaagattccaccaaccggttgatttctggttaaataagaaaaaaaaatgtttttctttttactgttgaaaatattgagacacaagagaaatacacacaaaaattgagagctgctaccatgagtccatgaaggccaaaaaagcccgaagacaggggaaggtgctggtcaccgtcagttatattatctaaccatttctaaagattattaaaaatattttatccaccacaatgtgtgatccgatttacatcgactcacttaatgccttcatttaccgcacttgttaatagacgtcttgttcttcaaatttgtccattttgtaaaattgtagggtcaaaagttgtgatgatgaagttatgaatgtgttgaagaggaggaggggtcctctatcatcaaagagtcatggacggttgtgctgaagtttcatgagacaagatctcgatggaagatctatttgactctttttttagggtttttttgaaattgaaagcatgtcttcccgacacatcgtgcattacaatttcatgatcactccattaattcatcaaatcgcttttatagtcaacgccatgatcctttgactcttgcttcttgagctctacgattgctggactcaattcttttttccgatagtttttcagtatggtggtacatatatgttttggtggtacactagctagttttgtacacataattttgtggcggtaaaaaggtgaaacgtgcaatattagtttaagaaattgagattactaggatccttgtatcatagccaatggtatgtcaacaaacaaaaataaaagccatagtcttatacaatggcggatccaggaaataattttatatggagcacaattataaaaaatcaataaaaagacatagcaaggcttgaacttgggttaatgtggggcaccattaagtaaaataccactacactacatacatttttaattacataatgcaaacttatataagatttatataattgagtatcgggcacatgccccacccaagaccaacgtgtgtccgcccctggtcttatacattgtcatattgctgcggataacaaataaaacaacaaaaattgactgtatagaaagaaaaagaaaagagataggaaatgtggaaagtgagagagcaatatggaacccactagacccataagagagtattggttattggacggacttttcatgtgtctaccatactttggatacgtgtcgtccatataaagatgatgattgatgatgatagtggtgatgatgggcatgaccatgggaggcaaatctttggcagagaatcaagtgaacattgccatgtctttgccactaccacactacctaactatttagtaaattttcttattcttttgccaacgaatctgatcgccaagtataatacgatgagcgcaaaacactatttcacatttaggttacattttttttatttaatactgttcgtagatgtaaaagcatttaaaaatagtatctataatacttagaatataaaacatcatttatactatatattttatattgtggatttttaacaaatcccattaacaagagatacttgtagcatgggaacttacaactaaattaccgttatactactattttcctctctaaataatacattcatctcttcttatttatctccaaccactaaaaactttgactggtcatataatttttatgttaccaatcatcataattaagatttaccaatttaacttcacaaaaaaaaagatttatcaatctaatttactgattgagtattacaccagagaccaaccacatttgtactaaaagtgagaaaaagaaaacataaaaattatatccaataagtaaatgatacgcagcaaaacacgtcacatcgactcgcatatgaatacacaaaccccacaacataaactgctaaatagaaatagggacgatgttgtggtccgacgaaaatcttttccactagtcactctttcaatcaggaccattacaaattatttcgaatgtttgtgcagagtataaataaaaacaaattgaatattgtaaatacatcaacgatccaccgtaaaaacattcaaaattctattccttttttttttttttgggatttaaaccactcttaacattcaaaattataagcaaattcttaattaggttcaacgattatttgatcggtgacatcccagcagctcaataaacatatattaaaatcgaaaataaaaaatactgtcatcacaaaaactcgttattatttaatctcttttaaaacatcttgttttcgaacatcttgctaactaatgtataagtttttttgtttttttaaacgttaaactacaattctttttgacaatgaacggttttttctatatatatatattttcaaatggctgttaaaacccaccaatagcaatgcatgtggttgtggtagtatacacattattaaatccctcatcctcttatcttaaaaaaaaaaaaagtctttggtgggctaaacaaatcctttaaaatcttcatatagatttctttccattatttattttatccattatcaaagtcttttttttttttaaatttctttctctcgttgtctccttggaaattactttcatcatttaaaaaacttgcttactccgtaaaccaaagctagatccaattagtcttatttcctttttattcgtctctctctcactatccgagatttgggttgaaaaatacaaacccccttttatttctcctcttctctcctacaagctcattcagaactctcaacatttccggtagagaaaaaaaaaccgttttttttttaatctctttctaaagaaggatatcaaaacaaaacacaaagttgaaaactttgcatctgggtttgtctattttagattcagatcttagtttttttcgattgaatatctaca

SEQ ID NO: 12629 - DNA, 3000 bp, Unknown
  misc_feature (1)..( 3000): cDNA_ID_2709280_gDNA_ID_2214563_Annot_ID_134908 3000 nt of promoter + ATG
tgatatgtgaatttggactatattcgtccatttgatgagttacattcctagagtctagagattcagctgattttagttgagaatcattcaaatagcttaaaaatgttacaagactaattgtaggacgagttatgtcagaaacttgtttcaaatttgacatgaagaaattataagcaaatagtaagtaaagatttcacttcctttttctgttggtaaaagcaaaaaagtacatacatattgaaatattctaaacaaatttagcgcgttggcttctttctttacggataagttaccaagatttccttctttttatacataaaagaaactaaaataacttcttttgcccatcttgcttttgtttatgatgatgatgatattttctttatttattccagttattaaaaggcaaagtaccaaaggaatcttcaatgagtgttccttgtgcgattcagcttcatgtttattctcatataacagaaagtatcagtgcacagcacaatttctctaacagtaaacttatatccaacttttactttgtatgtgtcgtcgggatttgaatgtgtggtatgatattttattttagtcttctataacaattaagtttctataaggttggatattaatttgctctgtttttattaccctagaaaaattatattagtgggagtcattggctagttcacgtttggaagttatgcaatttttgaggatcttgacagtttactttctttgatttcagttataattacttttctgaaattaagctctaaaaataaggatcaaatggatacttaccttagttatcaaatcaaagcaaattcgatatggacgaatcaacatcacaatcgtcttctttagtgttttcaccatcttccacctctaacttacttagacagctcctttccacctgtttcttctctctctgtctttcttttttctctttcttcttttatattctccgacaaaagaaaaagtacaagatacccagaaaaagagtgtagaaactacatttgttcttcttctctgttctgcttcgaaattatgggttcctctgtttctaaaaccgcttcctctgcttctgcttcttctataacatcgattttgaattcacctccggagacggaattcaacatcccttcttcatcggtacctaaagctttcacatttccgatgccgtcgattcatcatccacctgctaaaaaaggcgacacacaccactttgtctctcttacatcgaccacttacggttctcttgttctcgacgacagacaaacattgcctcacatctccgtttccgggaagagtaacaagaagatgcctgaaacagaggaggctcgcgactcgttctctcctgactcagtgatcaacacatgggagctcatgaacgacctcgacgacgaattcgattccgcgaattccgatacaagtaagagtaattccgtcgtaaatttggattccttttctaaacccatcacgaatcgagacgtggttattaatgggtctgcgtatggatcttacgaagatgaggaagattggagattattgccttttaaacctaagcaacctctgtggaaacatatgtctgaagaatcatttctctctgatttagatcctaacattatctcatcttacaaaagagcactgtcctccaaacagctaggcaagaacagtagcaatggccactcaaatcattcggttttagtcagtttaccagaatatgtatcttctagtccattgagttctcagacttcggaaaaagaccaagagaaaccaagattgcttgaaaaagaagataacgagaacaagatagtagtatacttcactagcctcagaggaattcgaaagacgtatgaagattgttgttgcgttagagcgatattgagagggtttcaggttgcggtagaggagcgtgacatctcaatggactccaaatacaggaaagagcttcagaatgcactcggcgaagagaaaccggtttgtttgcctcaggtgtttataagaggcgtccgcattggtggaattgaggagatcaagatactcaacgatggaggtgaactggcagagatgttaaaagattttcctgcttgcgaatccattggagcctgcgatagctgcggagatgcaaggtttgtgccgtgtactaattgtggcggtagtactaaagtgtttgaggaacaagaagatgggtttaagagatgcaatggatgcaatgagaatggattggtacgttgtaacaagtgttgtctttagtaattggattcgtttgagtgatgttgttgtgaaaatgtgaagagaagaaaaagaatctaaagatataacttttgacttaagatatgtttggttggttgtgttctttgaatgatttgtttgttttcatgctgtatattataagaagtggcctaaagctcaaacctagaatgtcaagcctcaattgtttcttcacgttgatctttgtaatttacatgttataaaatgatttttttttccaaacaaatacaaacaggatgaaaatatttatgtaaacctagaactattttatttctttgaaaataatagctaaacctttttttaatatggatatgcaaactgaaaaattagagtttgctgttttggccttttggtcttgtacaaatttgtttttgttacattttacagatgacctgttacggcagtagcggtaacgaaaatgttactaggcattccacagtaattgtctcttaacgtcatctactatcttatctcttctagctattttagtatggcttaccatttttccaaaaaccagtgtcactaaagttacagaacaatcgcctttgactacatcacctgcttgatcattggctaccatccaagtctgtttgtaaacttcatccgctgtcacggtaaaaacgtcacgggtaaactgattattgaaaacgacaacgggtcttatcatcttcaaacccctcacattactcaagctttgcttccttccccgagaccgagagagagagagagacg

SEQ ID NO: 12630 - DNA, 3000 bp, Unknown
  misc_feature (1)..( 3000): cDNA_ID_2709291_gDNA_ID_2214563_Annot_ID_134911 3000 nt of promoter + ATG
cgtttaaatgaatacaataattcacttgcgcaaactaggccaatcacgacgattgtgtatttcaaacttttgtctatatatatacataaatgtatgatactaatatgatgtccggaaaaagaaacaaaaaaaaccgagaaatagaacattttgatgatcataaaaatcatttcattgagttcaaaaaagaaaagaatacatatatatactactacattttgaagaaaaacagagtaagaaaaatgtataaaattgaaaagaagagagagagaatgaaaagacaagtcaaacgtcaaatcgaaccacttccttatcatacgactgtcagtgcccttctgtgttgtcattcttttttctctttttttttctcactttccttttaccccaaaattaccaaacaaagagagaaatagcttcttctttttttttttgtcaaaataattatcctctcacacgtgtgctctcgaacgcacgacgtagataacaagatgtcaagatgtatgccaaaaattttgttcgtacaagaaatcattccatcatctttttcattacatcaaaaaaatctcataatatgttttttcttttcttcaagaaggcatcgcaaattagatgttatagagttttatcaaggttttcacatttatagcaacaaacactatatattcgatgggaaaaaataagaaatttcccttttagaatgaccaaatcataaattaattcttacataccgaatttggttataataatgagaagaaaaacaacaacaagacggaccctatcgatccggccgacacgcttctccatgtccgtcccactctctctcccatccatgtgtatttttttctgaaattattattatttataaagaaaaatgaatttaatttaatttgattggtccagtccaactagttaaatacagctttctcaactggtgaatatatatatgggttcggaccacgactgcgccattatcagagccccgtcttgacttctgtggttggatgtttcacattaatttcattctctacctgattgatttgatttttgtatgttagaagaataatagctttgtttgatgatttactactctttgattttttttccattaacatatatcttgataatcagttaatcactatatcgtatactattgaagtttaataatttacaaaaaaatgcatttttatgataaaatttatataaccatgtttataattttaatttaaaaacaataattttctaataacttgttttgagctactgacaaaaaaatatcaccatatttatgataaaatttagagcttgatttttagtttctacatttaactcatcaaataattatatcaagaataaaaaacatggatcacacatttaattaaaaattattggataaattagtatttaaattatagacatatatagataaaccgcttaaaaaatgttttaacccatagtatttcttagctccttgcccttttctttgttattctattatgttgccatctagtgcagttatccttatttatgaaacgtatcttacataatatacaaaatgtttaacattttatgtatagtattataatacatgataagtcctttaacaaaaacaaaaaaacatgataagtcatcataaaacttatataaatttactcgactataaatgaataattcaatccacaacaaatgcaaatacctttaacaaaaaaaaaaaaatttaaaatatcatcaattaacaacatgcaaatcagtaagaaatattgaattcatgatatgtagtaagagaattttcaatgaatatactccatgttgtttacaaaatttagggattatatctgtacataaataagtaaaatttcgataattttaggctaatcttactaggattagttttattacagttgattactaagtatttactaaagtaagaaaatccagttcttacgtaaaatcaagagaccaaaattttccttcccggatcttctggttagaaaaaaaaaaaaaaaaatagaaggtaaagtaaatttaaataagaaaaaagaaaaagtaaagaggggcaaaggaagatggtgaggattggtccaacggtcaaacagaaaaccatcaaatcagatttcactacagttacgaaatttatttcactccttctgtcttttaacttaattaggcctatgttcttatccaccatcttcctctctttttttaccattttatcccatcctccatttatatgtgtaacgtatccattgtgttgctcaggctttcacatggttctgtatcaagccaaaaagacaattgccgaggatcttggatttattatcttatcaccctactactcaattcatatccctcgtttgtttggaaatcagatttaagtaggattttcattagtcaggtgctaatgatatttcattgtttattaacacttttattaaaattctctcgtttcaattatttccattttccattaatagatttggcccacctttgtattcttttcttcttaataattgttttcctattttagtaaccaaatcactaaatttcaattcattaataatactttaaccctttttataatcagcatcaagacaaaacactgaaacagttataatttttttttaaccatcttagtttaaatatctgagccgcccggttcatccattcaaatctctctctcacttaccaaacccaaacaaatatctaacaccacaaactcaaagcaataaagaatccttctctctctctctttctttctttcttctttcagagaggaggagcaagaaagaagcttcaaaagaacaaagcttaagctttttcccccggaaaatttgttcccctttttcgaaaaactaataattcgtaacttcatagccaacaagatcaataaaaggaggcaacttatttctttcattctctcttgtaaagagtacttgctaaaccctagcttttgttctatagagaatccaagaaccaatcaattttttattttataaaaagatg

SEQ ID NO: 12631 - DNA, 3000 bp, Unknown
  misc_feature (1)..( 3000): cDNA_ID_3025902_gDNA_ID_2214563_Annot_ID_185933 3000 nt of promoter + ATG
ggaaaatttagggttccaacaaaaacgcgatcgcattacccaaaaattcaaatttgcaactgatttcgtcctgtttgaatcactccaattctattgctttcttcgtcgtttgatccaaaacagtgagaagcgatacaccattttttctgggtgtgtgaatttttattttaccccaaattagattagagacgatgagcgacgtcaccggtgatctcgcggcggtgagtgaagccaagggaggttctgacgccgcccggatatcggaggtgaaggcgtggctcacctctcagttcgaagctgtcggcaaagaagtacccaatttcgagtacactcatcgaagcattacccatttgtataatctcgctaccgcttctcaagctaagtctcaggctgccaccattgtcgctaacgattttcgtctcaaggcttcagaatatcgtgctcaaggtacttgcttgtaatccttagctcctaatttgctcgcgtggctgattcgaattatgaaaatcttcttttgggcattatcagtttctgatctgttactatgatttcaaacaaagttgtgtttttttggaaatttccaagttcctctctcttagatctctgggtggaaattttgttgatgtagcggctaggattagagagatattggagagtgcaggaatgtcacaagagagcttaccgtcaaatgtggtctcttcagctcaagttcttgcaaatgtggctaatttgttgaacatacgggacactgaactgagcaggtgactgtactgttagctctctcattagatgtgttgctatctcgaatcgggaaactgatgcagaagaaatatgtatagtttccttgtagcaatgggagacatatctctgaggaagactggagtggaagagaagagggctaaagcacagaaggagtccaatgctcttcttgactatacaaggaaagcgatacagaggctgacgtatttgaagaagtaagtttcgtaataaagcaccatataacttataatatgatcttggtggtggtgtacatgtaaaccttgccatttttcctttgggatgtgacttatctaactttatctgtgtgagctgttacagaatccttgcgcagctagaagatgatgtagtcccttgtgaatcacagatggagaactggaaaacaaatttggaagtgatggcggtgaaggaggaacaatacatacagcagtacaagaagtatgaggtagactccttcttcttttagtttttacattctcagttggtaataggtaaactgagaatcagataccttcctgcaattagctctggtgaggggtatttgagaatcatatacttttatgtaaaaactggaacaaaatggattgttctgtaactttagtgccctttagtgacactggtttttggaaaaatggtaagccatactaaaatagctaggtgcttttgaaacaggatggattagtaagggttgctagtaattgaggatttgattctagggctaaagtttttttaagttttgttactctcatatcataaaaacacacacacactctctgattaagttctagatcgtatcagaaatgcagtgatgatgttcactaggtaagtcaatatgagtttttgaagtctaatgtgcttctagtggtttgttgtgatttatatggatgatttggctccttcaaataatctgacagagtcaagatgaatggttttgatagcagatgttactcaatcgtgttggctacactcctaagatcagccacagagagctggtagaaatggcagagcaccggaaggaattggacaagatgacaaaaccagtccttgatactctacgaagctaccaggatttacctccggtaatcttcatctctggttctccaagcccttattgatctgcattgtcaatctcctctttgttattggtcattgctagtcctggttcacagtagattggttgttcatttctgtaaacaggacaaagctttagctgcactagcaatcgaagacaagaaaagacagtttacagccgcggaaaagtatctagaagaagtattacaatcagcccttgagacaaacgatgagtgatcgatataaaccagaaaatattatgttttgggaatatgtaacatatgttttgtaatgcaacaatctctcggttattaaactctactggtgagatagatcattttcttgtttcagcagttcttcagtttgtctttgcagttcttgagtccgggcattagttgcagctgtcacttctcttataagcgtggtgattaggggaagtaattttttgagttcagaaaaactcaaatggggaattctgcttctctcatactcaagaagatgtgcaaaatcaagaccctgagcgatccacttagtctggtcaagtcgtttgcgaagaagttcacgttcctcattgtacttgtcatcatcatcttcaaacacaaaggatcctcctccattaccttccagtacaatttttgcatgcttgacaatcttttcagttctgtcatgataacaacaattacaacacattcagtcacaaacaatttacttagaacttcaacgaataccaagatccaggaaacatacgtgaagaattcgttctgaatcttaaccaacacaatctaagatacatgaaacatacatgaagaattcgttctgaatcttaactaacacagtgtaagatccatgaagaaacatgttgaatacgaatcacggatctgaatcttaacaaaaccaaaaccagtctacgattccatgtagaattcgaattcgtatacagctactaccgaatcacgggatcttagaactacaaatatgaaagtttccttaaatttgcaactaattacttccaattctattagaactagatccaaaactatatttcttaaaaaattaggtattattaaccctgcgcagacctgccccttgcatggctgtttagtttctctaacttatatagtcaaaaagaaaatctgaaaagacgtttgatca

SEQ ID NO: 12632 - DNA, 3000 bp, Unknown; identical to SEQ ID NO: 12629
  misc_feature (1)..( 3000): cDNA_ID_2709280_gDNA_ID_2214563_Annot_ID_185930 3000 nt of promoter + ATG

SEQ ID NO: 12633 - DNA, 3000 bp, Unknown; identical to SEQ ID NO: 12628
  misc_feature (1)..( 3000): cDNA_ID_3025914_gDNA_ID_2214563_Annot_ID_185927 3000 nt of promoter + ATG

SEQ ID NO: 12634 - DNA, 3000 bp, Unknown; identical to SEQ ID NO: 12626
  misc_feature (1)..( 3000): cDNA_ID_2709268_gDNA_ID_2214563_Annot_ID_185923 3000 nt of promoter + ATG

SEQ ID NO: 12635 - DNA, 3000 bp, Unknown; identical to SEQ ID NO: 12625
  misc_feature (1)..( 3000): cDNA_ID_3025927_gDNA_ID_2214563_Annot_ID_185922 3000 nt of promoter + ATG

SEQ ID NO: 12636 - DNA, 3000 bp, Unknown; identical to SEQ ID NO: 12624
  misc_feature (1)..( 3000): cDNA_ID_2709265_gDNA_ID_2214563_Annot_ID_185921 3000 nt of promoter + ATG

SEQ ID NO: 12637 - DNA, 3000 bp, Unknown; identical to SEQ ID NO: 12623
  misc_feature (1)..( 3000): cDNA_ID_2709263_gDNA_ID_2214563_Annot_ID_185920 3000 nt of promoter + ATG

SEQ ID NO: 12638 - DNA, 3000 bp, Unknown; identical to SEQ ID NO: 12622
  misc_feature (1)..( 3000): cDNA_ID_2709259_gDNA_ID_2214563_Annot_ID_185919 3000 nt of promoter + ATG

SEQ ID NO: 12639 - DNA, 3000 bp, Unknown
  misc_feature (1)..( 3000): cDNA_ID_2709295_gDNA_ID_2214563_Annot_ID_185936 3000 nt of promoter + ATG
caaactgttatggtaaacatgaatgcatagatagatgattttaagtatgcgattaaaattttgttgggatgcaaaatgaaatatgtatgacaagacaagacaatggtgtgtgttattgcatgtgaagagatgtgatggtgacttcaatgacttgacctctcaatctcctcctctctctgtctctctgctggtcctctcttaaatttgttttcttatttttttctttttcttataactaattcgattttttttaatgaagctaagctaccaaaaaaccatctcctttctaattttcgctatagtaattaaatgatcaaaacgcaccaaaaccaacacccatatgtttacatgcatagaatttaaatgtaattcatattatatactaattagcttctttttttttgcaactttttgttttcttatatagcacataaatttttgtaccattgcctcttcacttctatagcttgccgaaattaatataaatattattattggctatttattttgttgtcaatacttttcttgtaggtaataataattacatgaactttttatctatcacatgagactatgagaggtcccttcctagttatacggttatgcgaaaatagcggctttcaaaaataacggtacggccgaggcgtttactttaaacgggctccgtttacttcaagtctgtcacaacgttcgtcacgtgtcattgaacacactatcacctgactagcttaccacaccccagaccaataattattgctctgttactaaacattagccacgtaaaagtcttgagtttaagaaaattgtatagtaataagacaaacttttacttatagttcaataattttttttatgtaattccatatatatatatatatatattatcacatggtatagtatttaattatgtgatggtctccatctacaccagattttctttgcaatgacctaacaaaccaagaccaactttaaccatgtgttgaaagcacttgaaaccgtctatgttcacaggttagctactcaattataactaaagttagctaacgtaatagtatatgaatgatttagttggaatgcgaataataatttttgttgtaggagcactgacttccacatgccatgagtaggcctagagcttaagtctcagtctcattttcatgcgtctctctcactcaatgttccactagttccagtagtattaaatgaataatagagcctttgcatataaccagagagagtgagagacctttgggccaaaagctctaacaaaaattccttttgtttcagagaatagagagaaagagagagagctagagagagaaaatgacaattgaaaaaacttgggagttggagttaagagatacctgaaactttctgtttctgtgatgactgtgaccactggactttgcttttctctatcatctctgctctcaggggctttcttgtctattcatcatcttatatatatcattttcagttaactctacttatcaaaatttacactgtattattgcataaaataagatctggattagactaaaatcttgtattgacactaatcaaacatctcagtgttttctctttgtattttcctcggtcaaacatctcaagatttttttttttaattattttttttcattttacaaatttcgtatctttacattatttgtttgacaagacatatacttctctgatttgaaagcataacaagaaaacgtacttgtgtgattgatacctcagtaacagtttttttttccgctcttcatattatctaccatatggaaaagacattcttatagatcaatatgttttttaaatgaaactatggtctaagacaaaatagctagacacaatggccatgatattttctgtatatataaaaacgaaaaaaaaaaatattgatcaaccagtatatgaaatttaagatcatgtaaataacaaataaagacatttagtagcaaaaaaagaaggatagatcgcgtaataagatacatttatcatcgaacaaatcacatattcatatgccgacccacaaaaaatcacatattcatattacagtcataattcataacaacattcgtcttatttatttgagttgcagacccccaatttatatagtacgtatgtatagtagacgggtttaaggtctacaacaattattcgattttgataactttgaaccatatggttcacgtggacaagagtggtgttttttattccacatatcatatatggtgttgagtgtcgatcaaattagaatccaaggaaaaaagaaactccataattaaatttattattctttaattatacagactatatatagtaatgttgcatttgtggacaagactaattaatatgttttcgataggtaaaatcgaataaaagagtcaatggtgaaacaagttggcgataattaacctttttctaatcgaggggccaaagaaaggtaaaataataatggcccgacaaatgaaattcgatatgatttaatgaggatttaccattaaatttggttgtcactttcatagacttttttcaccaatttccagatctcccactttaccattccatcatttttgggaatttcattattctaaattcaagtatcagtctaattaattaactaatactcctatctttccgtagctattattttataacagttacaaaaatacgtggcaagaaaaagagtgtatttccattttccagcgttcaagattaatgggccatttgattttctaaatattgggccaaagagagaatccatagaagcccattttaaactatcatatcttcccgcgaaaaagatagtgtaaccactttctttaacagcgaatatgaccttcccgtgatagtcactcttttggattccattcaccacctttgatcaattcaagtttgacacgcttctctcgaatccttctaacatataatagatccatcggatcctccaaaaccacaagttaaaaaaattattcaagaaacacgagaacaaaaaca

SEQ ID NO: 12640 - DNA, 3000 bp, Unknown; identical to SEQ ID NO: 12630
  misc_feature (1)..( 3000): cDNA_ID_2709291_gDNA_ID_2214563_Annot_ID_185934 3000 nt of promoter + ATG

SEQ ID NO: 12641 - DNA, 3000 bp, Unknown; identical to SEQ ID NO: 12621
  misc_feature (1)..( 3000): cDNA_ID_3025930_gDNA_ID_2214563_Annot_ID_185916 3000 nt of promoter + ATG

SEQ ID NO: 12642 - DNA, 3000 bp, Unknown; identical to SEQ ID NO: 12639
  misc_feature (1)..( 3000): cDNA_ID_2709295_gDNA_ID_2214563_Annot_ID_134912 3000 nt of promoter + ATG

SEQ ID NO: 12643 - DNA, 3000 bp, Unknown
  misc_feature (1)..( 3000): cDNA_ID_2708769_gDNA_ID_2214564_Annot_ID_134916 3000 nt of promoter + ATG
gatgagacgggtttccagttaccaaatggacatttctaaaagagcattatagaagactctgttacctttagtattctgctaaaaagatggtcaagatctcaggtacaagttctagatgataagcggccaacaaaaagacgagtgttcctatagctatcatcataccgaggcattttcaaactacaaagttaaaaagggacaaaaagaaacacaaattttgatcataacccgtaagaaactatacaacaagaaaataacacttctctaactcaagacataagaaaaggccccaaaggaaagtaaaacttcaatcaaacgccactcagctaattcagagacaaggaagcaattaatcggaaaaaccgaaggtccgaagctaaggaaaccatcaccggagatacatcaaaccaatttaaaatcatgaatcctagctcggaaggcactaaatttcaatctaaattatcaaattcaaaagatttttgatacctaagaaggtgagcactgcgaaatcggaagccctaattttgaaacaaaatggggaagaagataagacgacaacgattgtttttaaaataaaaatctgtacaaataaataaattaatttgaaaatattaaatgggtgtaggagtactaatcggctcaacaaaagtttattctccttgactaatgggccagtgacttaccaattttaacatctactatcttaataagaaaatgtgttggaaatggtccagaacctctaggacttatactttttgtagattactacatctattttttttttaagttgattatgaaattttaattattaaaaatatattcatatgtcaaatctattttggttataaagcaaatgaaaggtgataggattacttatattttgaataaaatggcatgagcttgcatatttgttagagagcttgaattatgggtcacttaagtaaattttaatttataaactgtagttttgtatagaaagtttaaactgtttaaaatttaatattctttcacaaatatacacatttctattataagtttataactattagacttctaaaactgttaaaattatttgttatcagcaaaatcaaactatttatataaataaaacattaataaatgatgcaaaaatcgttaaatctttaaataaccaaaatttctattcaaaaattaaaactaatcaaacaaaaataaaagtatgtactaaagtaattttaagaacaaaataaaaatttccaatgaaatgttactacattatggctctgattggtgatgacaaaaagaacaataggaatatgaatgaaaaagaacaaaaaggaacaaaaaaaaggaaaatagtcataagtaggaaccaagaggaacataagaattgaacaaaatgattatggtaaatggtaaccaaaaaggtgaactaatatttaacataagaattactaaaaaaatcatttattgaattttgtttattaatttcatttaaaattaaagttctgtatgaatttaaaataaattaaattataaatttctcttcaaaacatttatttattttatagtaaaaatttaaattatattacaaatttaaaataaatttcactttaaaacatttatttatactaatttaaaataaattcataacattcattaaattgaaagtttgataaaaaagtatatatatatatatatatcaatatatactaaagatatagaaaatattatatatagaaatataaatattatcataaagctattttaaattgatttaataaataaaacgaattttatttttttgctcctcttggttcctgtacaattttggggtggaacaattttgttctatcattcctttttttttgaaaaatgatgatgaaaaatgtaggacccacatgtctgaaaatggaacaaaaatacgttgtaaatggtaaaaaaactaaggaacaaagaagaacaccactttcctactcattcttttcctcaaaagtggttatcaatcggaacctatgatatatatgtttttatataattcactaacaaaaaaaacaatcttaactaaaactttttgcaaacactattatttttacattaccttccacacatcttatatttttaaatataatgataagtgacaagtttatgatatatatatatatatatatatatactataatttaattcactaacacaaaaaaacatatacaaactttaataaaaaaccatacgataatacttacaacccgcataatatgcggtacacaacattagctattgtgtcataaataacactatacatttttctatgtacattataatttatacactacaatatatatatcactaaaaattattctaatatgtttattagaatataaaatctccaagtacgtgcgggtcagaatctagtttgttatataaaaataaaaaaccaaaatgtaataaaaaaatttataataaactctcataaaaacgaattaaaaaacattactacgttaaaataatcttaaacttcaacagtcaaattataataatgtttataaatatatatgatgatattcttagaatcaaatctcgattttggtagatttcgattcggttggattctcaacatttctttcaaattatctatgattttttttctttctttctttttttaaacatatctgaactctagaacaagcgaccgtgagtcataaataaaaggaaagagatccaaaaatataaatgcaactacttgaaatcgactaaatatatcgaaatcacgtgacaaatcagcattttatttattctattaactttatagttggttccacatcctttcactctattcgatgtattgtacacatctggcacaaatctgcatctctgtcttcttcttcgatcctcgatttcatccacaatatacaatagccaaatttccgattttctcctcactgaatctctagaatccatcgttgattcaaactcattttccgatcaaacggcatatttttccctctcgagagagcgata

SEQ ID NO: 12644 - DNA, 3000 bp, Unknown
  misc_feature (1)..( 3000): cDNA_ID_2709339_gDNA_ID_2214564_Annot_ID_134918 3000 nt of promoter + ATG
tgatctttggaaggtatgacaactggggggaagagacctcagaaagtctttgattccagttagagagaggagcaggcaggagaggtggagtttgagggtccggggagaggacatctctctcaagagggggtcttcttgttctggaagaatcagaggtttcctgggaaaatcttggtacatttgagtgtttttcttgccattagagattccccagattagcagaacccgcaccatgagggtggttagtgtgataaacttgagctttagagctaggccgtgctctataccctgaggataatagtgaaacacttctttgcggaaagacacttctagacctttctccagaggggaggttagttctatccaccgcagaataatgtttatgagaagaggatccgtggccctgagaggaagcattaggagagatccctctaccatggcttttggatgcaacgaagttgtctgcaggggtatagtaattcctagagacaccacctgagcctcgggaatgagtagaggtgggcggtttagatttttctgaagaagaaattaaacctgggcaatccttaatgtcatgagatagtcttagacaatggcggcagtgatttttcaggtttttataatcaagaagcactaaggcttcactaccatcagggaactctaccactatctcttttgttaggggttggagtccattgataagcactttgagtttgacagaagaagaagagatctccatatccaagatttcaccaagctcttcactaatggtttttaacatttcctcttgccagtaatgtttacggagaccttggagttcaatccaaaaaggcagcatagatggaaaggagtcacagaaaactgtcccatttttggagaatgaccatccattggtcataatggtaaggtctattatctagaaccttctacatatcctcttcaaaatcaaatttaaactggaaacacccttttcccagacctgagcccacaacctttcctttgaggttccatctgttggagaggaaaggaaagagagaccagagacgttgagccgctggattagtgagtcgacccatgagagtgagagcatttgctttaataagctctgaagtatctaggtctagagctcagattcgtttgcgagttggagaggagtagcctcttgctaaacttttgcctttaaggtgagcatggattcttgtactcatggttaggtttgggtaataaatgagaacatggtaatagttgggggaaacgaactttcaaggagcaataaattttcaggagcagccggaggaagttgcagataggtttaaacacagttcaacagggttaaaacagggttaccaggatagcagagggaggggatatacctgaaggagagcagatatatcagatggtagcaagaaggaagtttcagagggagaaaacatcaggtccacgctggagaagttcatcagaaacctcgcaaacgcaccggaaaaagctagcctggctagggaccgttgggtattgctaaaaataggagggaaaagtggttgagatccggttagtagcaagtaccatacttctaatagccgtcttgattacagtgcctactagaatgactctctaagggtgtaaaaagacatgaaagctggggttgaaattttttattacagttatgccatttagattttaattttgtttgttttcattatttatgtctgttttaattgaatataattatgagaattgaaaagaataaatatttaattatgtggatattgtagacctattacatctaaacataattacgaccacatataaaacctaattttgagagagccgattaagggcggcaaaaggagaagcgatttccgacgacgacttgagaggcggtatccggcgacgattgttgtttaaatccgacaacgagaggagaagcgagtacggaggaagacaggagagtcgagctgattaattaagggcgactttatgagccgaagctaggagcgatggactcttgaaaggaggttagttattaacaactaagttttggtaatattagtgttaaggaaccgaaatgcatttatgttgtcggcttttgtgtatatgaaagttgtcggaaaatgacggacataatgtcttcttattttaagttgatgaacacaatcttatgtatgtcataaaatgcgattgacgtattcttgaatatgttgtttgagaagcatttgggtgacgaaagagaattaagtgttatgttgtttataatttgaaattcgcgcagttgatttgtacagtagacttaaaaaatataagttgtatgatgatagaggttttgaactgatggtagacataatgcgtatgtaagtctgtctaaaaaaactaatgcatttgattataaagaagtttaggccgttaatgatatgtggaacttgaagaaacagagtgtctgaagttcaacaggcgtgtctgaagcaacacagagcagaacaaaggaacagaggaagcggaaaagaagcagttgcttttgccagcgtggcatgttgattggagtgaagaaaaggcgtatcactttagacaaaggagacgaagtcgtcagacagaggacgtgggcctagtgtcaagataatgatgaggagctagacttggaccttctagataaagtggagcatcctgccttttccgagaaactacataagagaagtttcggtctcttagtagaacttgttcttgtgggttttattggtgagtgaacaaagtgagcacacggttgttgttgtgtttgtgagctgggtagttttagtatctgacatgagcaaatcaggttgttgatgttgcgtaacactgtccaaagttatctgtgattgatcagtttgaaagttgttctaataaagtgtgtttattggagttgtgttctttgtcttgtcaaagtacttagagttcttttactacaattggtatcagagcgggtaaccaatctgagattagtatatctgaacaggttagatcctaatt

SEQ ID NO: 12645 - DNA, 3000 bp, Unknown
  misc_feature (1)..( 3000): cDNA_ID_2709337_gDNA_ID_2214564_Annot_ID_134919 3000 nt of promoter + ATG
agaactgtcttttctttatacttatgtatactttccccggtttcgttgctactgcgggctttacgcaattgatcggatcatctagatatcccttcaacacaacataggtcgtcgaaaggatctcggagacctgccaaagcacgaaagccaaaatctttcagaaaatgaattcctattcgaagagtgcataaccgcatggataagctcacactaacccgccaatttgggatccaattcggaattttccttgagggatattggtaaggaattggaatgtaataatatcgattcataatggattcatatcgatacataagacaaggttctctatcgattcaacaagtgttgtacttatgggaaagcgatagagaaagagaaaaaaaaacaaagatttcacatagaaataaatggatggtgaatgcaaagacccaaaagaaaaatttataaatttatttttgtgattctgatgagctgttcactctttgaaagatatttgacttatttttaaacatttttgttattaatagatcaatccatctgagtcttatatctcacctccaagaatcgtgaaaaatggtatgttttttcttaagtctttggttaagagaaacagaaaaattgcgttaatggttgttgaaatagtagcttatatgttttgtataacaaatttggacaacgtttaagaaatacattttcgctggcgttttcattcaaatccaagccgttttgactatgtgagaaaggtgcttatggagattattgaaggttttgattttctttcgtgtgtttatatagtcaagtcacttgtgaataaaatgaatgtaccatcctcttttttggtcagaaaggtttttatttattaacatttttaggagcatgaaataaataaacatattagatttggcacaataatgtctcgccttaattgacgatgcatggataatgttatgtgtatacctttgtgtggatatgaagcgaagacagatgagagagatgtgattattatctaaatatatttttttttaaatatgcgaggatttgtaaaaagtgaagtattcaaatttgcatttttgtgaagagagattggctacaacctaaaaagtctttctacgactaacatttgaaaaactattccgaaattattatggtttatacatcatgactgatacacatgatgggaagatttaacatagagtaaaaaacgatgatattacaaagaaaattcaatcaattaggcttttttttagattagaacaactctcgtacaaacatatatgtcattaatgaaacatttttagaaaaaactattgaaaaagatttaagcttatacatgtttgaatgtctgctagagttcatgcttgttatcatggagccactttcccgtgacacacacaatcattccagatccaattttgaaacatatttaacatgtattcttgagaaaaaatatcgtatgacacattgtcgcctattaaaaagatgtcgtttttgaaaactcaaaaacaattatcttgtatggtgattgtgtgccctttgaattggtcatttttccagtttcagtagtcctaaatatgcaacgtagttgtgacttcaagtgttttagccactactcactaaactaaaacatctcgcttaggattctaatattgtgtgattgtgaaatcatatttactattattttttactcttacacattagaaattatatgatttttgttataaaaatagtgtcacaaaacagtcacactttgtgacaatgttgcgacgacgttgcaactctcgcaattttattcatatattcaccaatagaaaattttaaatatgttaagttttaaggtttctacaacgatttgaagtacatagatgttaaaaatcattataataccaaaaaatttgatttattttttatgttttaaacaataattctaagcttacgtaatgttatatgtgatgtgaactaatggttttttgaattttcataattttctttgcatttcatgtatttacttattaaattgattgatcttgtttagtattatgatttcattgattttaaccttatagatataaccttttggatcttaaactttaaaattcatatgaatagggttgtgactcataaaaattcatcataaaatattagcattttgcaactattctaaggaaaagttacaaacaagtcattacataccaacatatatttggctgagttgtgacgaacaactgagattgagacgattgtgctaccttttagcaacccttgcagtttttgttaagatattaaccaacataatattgttaatatgttaagtttcaaggcgttgcacaaaaaaaaaaagtttcaaggattctaaattgattttaactactatatctacaaaatcattacaatggcaaaaaatccctttaaagtttttaatgttttaaacaaaattcctaaacttacgtaacgattatatgtgatgatacttataatttctaaatttctaattattcttacatttcttttctttctcattaaactgatttatcttgtttagtatcgtaatttacatgactataacattatacatagattttatttagttagtaagctttaaattcatagaaatatagttgtgactcataaacattagtcacaaaagagtaacactttattattactttaaaaaaaaggaaaaatatcagaaaaatcgtcaactttcaaaaaagagacgaaaaactcgtcaactcacgagacgttgttttaatcacatacttttggttaacctctccaaaaaataccaaagttttgttgaccgagacaaataagttatcgcgttaagtctctgttagtacacgagaaacggggttaatacttcgttaacggtcaccgttaaacctaaacgacttcgtctctttaaaaacaaaacaagcctctgaaacccccaattcaattttagaatctcaaaccctaaattttccaaatctcttctttttcttttacattctcactctaaca

SEQ ID NO: 12646 - DNA, 3000 bp, Unknown
  misc_feature (1)..( 3000): cDNA_ID_2709328_gDNA_ID_2214564_Annot_ID_134922 3000 nt of promoter + ATG
catttacgattaccaatctatccggtttaaggcttccatatgacttcaaacaagccttctcagcattttcgttcttcttcgttcttgctttaggtccgtattgcgcagatagaacttttgtatcctctgaaaatataaacgagagagttccatgtatcccattcaaaaaggataaaaacaactttgtacccataatagatattgagaaagctgataaagtaccttctgaccaactaggagagccatgaggacgatgaaggatattacgcgaataagcaagaggtttcagctgacaagtaagtctttcacgagttatatttcaagtaaaaaaaaaagatataatcttaaaaattgtaactacataagatagttttagttttattaattaactacataataacgaataaaaaataaacataaattagcaaaaacaatcaataattgtttttcacaattttcaaaacaaactcacgcttcacaattttcaaaacaaacccacgctacacgtgggtatttatctagtataatataaaagacatgaaaaaagaatcacatttcaaagactgtttgtactcgaaaaatcgaaattctaaacttgcagtgatctgaattccaaaggaaccgaggtcaaacttggaagatggacacattgagaaaacccaagagagacagaatctatttgaatcttcttgcagaagtctcccctcgcaataaagatgcaacccactccagtttgattgtcgtcacagcacaggataagggtcatgtcatggatgaagtaactaatatcagaaagctgatggaatagcgagggaaaatcaggtattgacagtgtcatcaagtttaaccacaccacattattactagagttaatcatgtcatttgttacccaaatctctgtattacttgatatacgagattgctttaacaatgcaaactgatcgcccttaaatacagtgaggacaagtttatctcgtaagccagaaacatgcttcccacaaggaaggagacaaaagtgcatggatatttctgtggagaaatcaaagcttccgagaaaatgctcacgagtatcttcattgtaagcagtccaatacaaatttccattcaaggacacatattcacctcgacctgccagcattggccattccggggaatcaatgaacttaaacgcttgagacgcacattcaaagatcgcaaatctgtggccgattttcagtgtagtgtcatagaaacgactaaaatacccaaagatcttgtaatccttttcgggtttacaagcatcgtatcctacaccgcaaaaacggaaatctctgtcctccttatactcgatccacccaacctgtcttaaccatggattccaaatggtaaccccttggttccaaaagtcacgaaacaataatccatcgcaagccgtgatcctggtaaatgcccacttctcagccttaaaatgaaattgacaggctagctcacgcacctctatcttcggatcaaagtcgtccaggccgatggttcctatcgaataaatcttggattcgggcaggatgataaattggggacgtgcacaacccaagcttttcttgatgaaccatttgtcgttgagaagatcgttcagtgtttacatacggatcttacccgaacaagggatccaggtggaagccgacacagtatctcttcctccaactcccacggaagcttccccgacgccattacctttctccgacttcggtggctttagaggagaatctatatatataccaccgcgtgtacgactcaaataaataagaaaaggaatatttttatctgttacgaaaatgaaataacacccttttttggggataatattaaataattcttaaaagtaaatgtcaaataattcttaataattatttaggaaagagatttatcttccaataataaaattactgaataattatttctcaaggataagaagttaaaaacatagatttgaggaataaataaaaaaacaattattctttaaattgtttataaaaaagaaagaaatatatctttcaataagaactgcatatttttgtaagaaataagaaaaaaaattcatttcttaagagttaagaacaagaagacaatatttggagaaatattctgtttatatattctgtttttaattgttaaccttgtaacctgtttacgacaaaaatagagaagatctattggttttaatcagcagaatctagcaagaaactagattgattaccattatacgagattacaagaattgatttcgatgcaaaacttaatttgtaaatttgtaattcagctaaaggtagttggtcggtaggtttgacacagaacatataacctaatttttatatgactatggttttgcctatgtgatctctacagcttcattgatcaacttgaaaactagttctaaactttttcacaaaataccaacactgagactaatcaatcacatcaaatctagagcagcataagtattgaatattggtttaatttaaacaaatttctctacatatacaagttaaatgtctgaaaataaacttaatttaaacttttttaaaacaaataaatggttttttaattaatcaatataaaaaaatcgcctttaaattcccttggaaacataaatattgcgcatcggtttaattttttaaaaattaccaaaagaggaaagctgaaaaccaaaaccctaaaataatattaagagccacgttatcctaatagatcaaatgataacataacattgagagccacctgctgccgttttcttcggcgactaacgatgacgatgccgaatcttccaaatgagttggtagaggagattctcagcttttttccagccacatatctgaaacgtttgagctacttgcaaaccatggaaccgtttgatccacaacgacaagagattcgcaagaaagcactacgataacgccgcaaaggagtttctggttttcatgttgaggaagaacttcaggatttgtctgataggcgtcaatctcc

SEQ ID NO: 12647 - DNA, 3000 bp, Unknown
  misc_feature (1)..( 3000): cDNA_ID_2709320_gDNA_ID_2214564_Annot_ID_134924 3000 nt of promoter + ATG
ctcaacatggatcgcttggataatgaagtgtatctctacagtcagcttttcggttctaatcaatggttctccacatggtcacatcaaccccactcgtggaatccgacaaggcgatccattatctccctatatattcatactttgtgctgaagttctctctcacatgatgaaccaagccgagatcaacaagcagcttaaagggataaaactatccacaagaggtccatctatctctcatcttctctttgctgatgattctctattttttactatggcaaatcataggtcatgccatgccattaaaacggttctacgtacttacgaggaagcttcgggtcaagcagtcaatttgcgaaaatcaactattacctttggcaaaaatgttagcaatgacataaagcgaagaatgagaaatctcctcggaatacacaatgagggaggtggcggaaaatacttggggctaccggaacagtttgataagaagaaatctgagatgtttcggtatattgttgagaaagttaaagaaaaaactcaaggttggagcaagaaatatctgtcacaagctggaaaagaggtactactcaaagcagtgctttagctatgccaatctactccatgaatgtgtacaagcgaacaaaagagatttgcaatgagattagtggagtactagcaaaattctggtgcggttcagacgctgaaaatcacggtatgcactggtttgcttgggatcgtcttgctttgccaaaacaggagggtggtcttggttttagggatcttgaaagttttaatttagcattacttggcaagcaaacgtggcgaatgcttcaatatccagagagtctaatggcaaaacttcttaaagggcgatatttccatgattcaaatatcctaaatgcagtccaagggaagaaggcctcttttatttggaaatccatcctacatggtagagatttagtcaggaaagggcttcgattctgtataggtgatggcacaatcgtcgacgcttggctggacccatggttaccaatgcatccccctagaccaagtgactccaccacctagaaacgttctcttgaaacaaagactatggaaattaagaactgctccgaaaatcaaacacttcttctggcggcttctatctacttctcttcctactggtgcaactttgaggtatcgacatattactaatgatgctaaacgtgtgagatgttgcagagaggacgaaacggtcaatcatctcttcttccgctgccattacgctcaagtcatatgaagaggctcgagaatcccaaatcccatctttctcgaccaaactgctccatgggacgataaaattcgcgccatctttaatatcaacacctcagcacgaacatctcatatgagacagttgcccttatggatcatgtggcgattatggaaaagtcgaaacacacttatgttccaacaacaaagtatacactggcggaaaagtctaagattagcgaagcaagatgcatgcgaatggcaagatgcagaagattatgttcaaaaaagctcaagcgggactcagattctaccctcaacggttaatattcaaaaaaattggacactcccacctagcggctggacaaaatgcaactatgatggtactttcaacagagacttgccaagtaaagctgcttggattatcagaaatgacagaggaacgttcttaggagcaggacaagcggtggggataacaacaacaaactctcttgagagcgagttacaagctctggtcatggcaatgcaaaattgttggagcaaaggccataagaaggtttattttgagggagataacaaagaggtagccgatacaatcaatgacaggaatccaaactttgcggtttttaattggctaagagaggttgtggcttggaaaacaagatttgaggattgtcgcttcacatgggttcgacgaaattccaacatggcagcagacacattagctaaacatgcactaccttcacatacttcttatcatttttctagttttactcctcatgtaattacagacatactccatcgagactttgtctctgcagttcaataataagattgatgttgatgaaaaaaaaagaaagtaaacttagtaaccgaaatatccgataaccgaaccgaatacccggaaacccaggattagctatagttaacaaaattaaatggataaaacaaaacgtacggttactacaaaatatccggcccataaaaggcccagtgatctctgaaaacatgcttcatgtcagatagataaaaaaaaaaaatagttattacggtcaaactttttttcctcttctgtgtttaaatttccaaatctcagtgtaccccacaaaacaaaattcgaaaaacctcgcaacgagcgcgagattcaaaaatcaaaatcaacaacacgcgaatcaaaagaaactgactcacacgcgcctctctcctcgaactccgtctcttttctctgctaaaacaaaaatcatctctcttctcgctctctgcttttgaatctctcttttttctctccaccacctgagattttcccatcactttcccggaaaaagcagcgattatcttcatggcttctcactcaccactatcccactgatgcttcagagtatgtttcgctactctctcttccccttaatttttcactttctctgcatttttctgtgttgttctttggaattagagtaatgcgcgatgaagaaaatggttgaatcgttactttagagtaattcgctgttgttttttggttattatcatcgtcttctatccaattttagagcgaattaagtagagattcgattttgtttagagtagagaaaatttcgaattcgctgttgttttttggttattatcatcttcttctttccaattatagagcgaattagggagagatttgaatttgcttcttcgattcaccagatccttgagctacatgtctcagactcaattctaattccttgttgcagttattggatttgaggaaggatt

SEQ ID NO: 12648 - DNA, 3000 bp, Unknown
  misc_feature (1)..( 3000): cDNA_ID_2709312_gDNA_ID_2214564_Annot_ID_134926 3000 nt of promoter + ATG
aaaattcaatttttttatttaaaatataggcttatgatgtacctcttgaatatgtaatttatatataaataatattaactaaaataaaaatctctaattttctaacaaaaatattaacatgcggtataccgcgggtcaatctctagataatacaacttttaaatctttattacctctaaaaaactctaacaacaaaaaaatactgaattttaatattcaattaatgtacaacaaatatcagaagataaaacatgaattacccaagcttaacatatataaaaattaggtgtcaaaaatttatcattcatatacaaataataatttttataaaaaatttatataattttaaataaacatattcacccgcggtacaccgcggataaatatctagtaaaataatcattatggtgaaagaattcattgaataagtttagattgaaagatatcaatttatgatcttatcataattatatatatattagattaataatttttattgtgcctgaatgctatgttattaacaatcttatttattagaatatatgaatctatctaatgataattatctaatactattatttgaaaaatacatttatttaagtggacagaaagttgaaaaaaataacaaatttgctatcgggttaaaaattttatgtcatgaaaaaatccgtttagaaatatgtgtatcctttagactatctacaatggcttattgaaaaaaattattcaatagttgaatgcttacaatggggtattgaataaagaaatgaatcgtatgtggattaaatggtgttgaaccgattcaacattgttgaatctttaaaaatggacccctcattgccatttgtccttaaatgattggagacagaagttgtggggagagttaaataaagataggacatatgttgctcttttatttgctactgagatttatgatattttattttcctctaaattattagaaatcaattatcttataaaatatttatttgttttaaattatttttacactaaaattcatcatttttcaaactctataaataaagacttgtttcatttgatttggacacagaaaaaaatatatttattttcactataatttttttattagtcggtaaactcgtgtctatatttttattctgtttttttcagtgaaatggatccccacaataactcctttaacaactaaaattccacttattatccatttaaaatataaaagaaaagaaaaataatgaaataaaatgttttggggtagggtgttgaatttttaaaaaaaaccattgtagagtgtaaaatttgagtgggtattgaattattatgtggaagaaagaggaaaggatgtggaagagagagaagatgatgtggagggtgttaaatgaaaaaaccattgttgatagccttagagcaggattttaaaagtcagattatcgcatctaatcttggaaattgaaatgcagtgttatgagccgttgattttttgagttgaaccgaataaaaaaatcacgcgtctatatttcatcaaccgaattgcattaatttcaaatattcattgcttatattcctatattgaatttgaatatatcacttctccataattataggtaatcaaatacttactttggatcttcattttgaattttcataaattttcttaacgattttcataattaaataactacttatatggtaaatggtaaacattctcctataattatgggatcatcataatcactaaacatggattccacgattttgtattttgtccatattttttgacataaaaatttatatcttataaataccgtaagtcccatttcaataactcactcagcaatacctcatactctattacattcatttcgaacttatcaccaaaacagatgctcgctaatcctcttccatttgcttctttgagatcactaaagccttacaagaacgcttggcgtattcatgttaaattgcttcatgtttggaggcaatactctgtaaggctggtaaatccatcaaaatgattttggttgatgaagcagtaagtattatattctatgtatttattttccataatatatattgtttctggcaagtatcatattcactgatatatatatatatatatatataaatatttgtatatttttaaacttatagggtgataaaattttatctgctgtgagaagagagtagatcaaaaagtttgaaaagagtttaaccgaaggtgtttggaagattattacgatcgtcactctcaatcctacaagtggtgagtatcgtatttctgacttgaaatacaatattgtttttgttttcaaaaccacggtctctccatggataacgtctcaaattattagtttgtctctcttgctaagtttgacgtgatcttttctggatccgctaacacaaatctcgtcatcggttagtttaacttttaaagttgaacatacatgccttattataaagtcaattatttatattttttctcttctttgtctatacagatgttattggtcaagttgttgaccagactaaaatccaagatcttaatgctaacaacaagcccaccaaaaaaattgatttccaatatgagagacatgcagtaaaagaaatttctatttttattttctaattaaatgtttattatttatttatcaattttttctttctatataagcgacactcgcttggcatgtgcactttagggaaagtatgttaagattgttgataaagcttgcgagaaatcaactgatggtattgttgtttgcttaatacgatttgcgaagatcaatctctataacggtaattatattaatatgcatatatatatgtaatatttcattttatatatacgcagataataagagcatttccaattcatttgatgtttcacaagtctttgttgatacaaaattggttgagttggttctttttaagaaaaggtaaatttttatcccatttccaaaaaaataattactgaaaagatgggactcaagtagactgatg

SEQ ID NO: 12649 - DNA, 3000 bp, Unknown
  misc_feature (1)..( 3000): cDNA_ID_3025938_gDNA_ID_2214564_Annot_ID_185968 3000 nt of promoter + ATG
taatcacccataattgcaaagttagcggtcgtatgagacaaagttttaaaacccttacttagcgctcactttttactcatatacacatgatgaacaaagtaacttgagaattaaattcgtacctgagccttcaattactctgatcttgttatcgtcgccttagtaaatgcagatatttgaagttaggtgtttacagttcttttggtgaagcaacatagataggggcgtaataaatacacaaacacgcaaactgaattatatctctcatcatcattacaattctctctctctttaagtctcggcggcgtattttcttgcagtttttgtcgtctcattaaatgcgggatatgcgaaaatctcgtagcttacactacgcgtatcattagctatagggccaaatctggcatatttattttgcatgttttctttcacctaatttttggttttacatgtacacatccttaaataaatccccgtagaagtatatatatttaactgacccatattagaactatattaatatacaataaatgttataaaattcaaatctaaataaaaacaaagaattaactatatcatataaaagaaaagaaacctaccaaaagcacgaatctgatttacatttcccgtttgcatttttaaaattttccaaagcagaaaaactaaagccaacttttcatcagtttttgccatttggtaagatgagcaaacttaatattaaatgagttataattatatgttctaaagcttggagagtgatgaccagaaaatattttatgaactaccattcaccttctttaatatctctaaacttgttgaagttgtaaaatacagaaaaagataatataaaacaaaaccaaaaaaaacaaataaccattgtatccacgagaatcatgttttttttttgccatccttcatattgtcaaaattgtaaagattgagaatcttcacacttacaatcgaatatgtgaaacatccctacttttcttacttatgccaaaataaacagttcttttaaaaagagattaggtaaaagtctgcgttatgccactggtatttgttttgaaaatgtgtttatatctctaacaattttaaaactgttgatatatcattaaaactattaaaactattgatacatcaattttaaaactattgaaaatgtgtttagtacatgaatgcgtgtagaaggttcttgaatcctaacttgattgatgagacccagcgacgaaagcctaatagatataattgtggaatttggtatgaaatttaggatgttgtgtaagcgtgcagagaattacatggtggttaggacttgattagaactgttaagtgcatggatttggtttgaatgatcaaggtaatatgctagaaagatcaggagtttctacgttttcaaacccctcccacaggttaagtttattgtttcgcttgagggcaagcaaaagctaagtctgagagagttgatatatcatgggtttttactgatttctaacatagttttgggatagttttgagagtctttctagtgattttcgtatgttttgtagtcattagaggtgcatatatacttttgagagctatggagcataataaggaactttggaagcttttcagcaaagaagaccagcaaaaacgttattcatgcgatggtgtcgatcgacaaccttattcgacaaagaaaatccccacgttttaccaagtcttaaagaagtcccataagtttttcttatttgcaaaatagaccatgcacgtttttagtaacgtatatatatatatatatatatatatatatatatttaaggtcattgtttagacctaagaaagttttgtgtaagagacatacttttggagagaagaatcatatccatttagagaacattctgaaatccttttactctatttcatattataattcaatgcaatttattcaaatcaagatttgtgattctttgatcatgtctaagtagtcactttgttgggtttagggtgtctcactagggatttagattgattagtaaatcgataacctgttaggattatttttagagttcttcatctataattgttcttactgctagttctagattgatcacctagaatttgatcttagataataggtatgcccaaaaaagtatctgtcatcagaactattatagatgagccgggtttataggtgtgtaataagaatcgacatgtttactaagttgaagttataaaactcgttagcatgcatgtcttaaattagggatttgccaagccaacacaaggaatctttagccttggacataatgagtaatatagcgaaccacaagttactctgtaatagtgtttgagtttaagaacagtttgataacaatcctagtcatagcaagatctacaatttatctatttcctaagactatccctagacctcacgctttaatctcctgaactcacaactcgatttactgttttcttgtcttttactttcatctactttgtctagcttaatattaatcatcataagtttattgtgtgaacaacgagagcttagtgaaattcgatcattcagtgctaacgacgatctcttatttgagggaataagcttaaggataatttgagctatatcaaatttgaaattttcgaaaattgaatatgacctatgaatgatactttgacagaggtatattaattttttgtttgttttcaagattatcatgattggtcttgtttctaagtgattattttataatttaaaatctttagcaatcaattgctttttttctcaagatcataatgattgtttaagtttaccttttaagggattcataatcgaatctttgttttttttttggacaaatgcttgttttcatacaactaagatagaaacaagtacaatggaaagaggattctaagatcccaaagtttaaaagataacaaaagtaggcattcgccaataccataagaagaaaagcaaacacacaaataaaatatatcaacaaaaattccaagagagctatg

SEQ ID NO: 12650 - DNA, 3000 bp, Unknown
  misc_feature (1)..( 3000): cDNA_ID_3025959_gDNA_ID_2214564_Annot_ID_185961 3000 nt of promoter + ATG
catgtttacaaattctactatacactaacacacaacgtatatactaacacataatgttatactaacacacaacgtatacaactatataaactataagattcaaacttgatatagacttttatactttgtaaattatagaagttaacatttatccacactaattatccaccaaattaatatagaaaagatattgccaaaactaatagacgaattaaaacgttattcccgtgcaaagcgcagagcactgacctagattaatccaaatggtatgatttttttttattttttttaaatatttttacatattaattattctacacagtttatgaaatactaagtgtttttccttttgtatatgcatgttgcaagaattattatatgaccattgtttttttattttttttagtgctgccttttttatatacgattaaagaagtatgtagtttattaataattcttttaagtttttcttctataattctgattttgacaaaagttatgtttatcttattaatttgtcaaatttaataattaatttacatgtttataaaatacattataccccgacacaccatgtatacaactacatatactaaatatacaattatgtacacaaagagacacatcaattctataatatattcaatagtattcatgtttaaatgataccaataataaattcataaatttttaaattcaaaaattatacaagtaaacatttatagacaaaaaaaatataaaccatattagtaatatatacagaagcaaaatttataaaataattaaagcatgaatctcatgtgaagcatgaatcctgacctagtaagtgtttaatcaacaaacttttgttatatatgatttgagctctttgcacatggtctctccttctatgttatctctctttttatccattataaatttgaagaaatttgagttggcgttgttttctaaaatcactattcggtaaaaaaatatatgatatagtcacagcatagagaggtgaccatcaagccgtcgagctttaaagaggagcatccactatgaagcctttactcaaaatcaatttctagcaagataatgtggaatgcctaagttaaggaatccttttgtcctcgtgtccatctttcaatccccaaaatatcttttgtgaacatttccattttagctattaattgacactgaatacctcgctatagactattcagtgcttcagttattgatgttttgactagtttgtttgagatatagtacaaacatagtcaaccctcattttgtatcaacatcaagttctcaagatgggtttgagagacaggaacatgattatgtagatgatcatgactttatgaatgtgggggttgaaggtttagcttctgtttacgacaagatggtaaatgaagaggggtttgatgcaaccaagactaagcttgatgtgtacttgaaagaaagtgttgaaaacacaagggccaatacattgggaacaaaatatgatgtgttatcatactggaagctcaatagtcttaagtttccgattttatctgtactagctagagaaattctagctttgcaagtttcttctgcagcttctgagtattgttttagcactagtggtcggatcgtagagccaaagagaagtttcttaacacattatataattgaggtcttgatgtgtacagaacaatggatgaaggctgactattatattagtgaaaaagttgtggaaaactatgcaaagatggttgaggatattgaagattcggatgatctggagaaaggtataagtgttggcacttgtccgtttcttactttcttttcaaagtctaataattttatgttttcttcaatgtatagagtttgacaatttgtgtaagagactagagacttaaccaagacaagtcatccactcatgaactcaggtacgtgattcagattcttcagtttttgtgacatgtatttgagttttactaattaactatgattaagtttaaaattgttgtgacatgtctgactttatcattcaattttgtagacaagaaaaaaaggtatggtaaagaagttctcaacatggtaaagaactaaagattaaagaagttctcaaacttttcaactctctgttgagttttaactctctattttctctagaaagcctttttaatttgagtttgatttctcgtttgtactttcactctcttttggatttgagttttaactctagtttgtactttttaattgttctattgtattttgaactttgtatttggtaattttggtcaatttggtcactttttgggtataatgtaatggtccgaaatgtattcggttaccatatggatagtaaacttagtaaccgaaagacccgataaccaaatggttatatccaaaaccgaaccaaaatgtgttcggttaccatatggatagtaaacttagtaaccgagaattaaagaatattcgggaacaacaaagggaacaaaacaacacttgagttagttatggagattctcaaagcgatttctaagcggttatttcatcggtttatcctcacctttttggtgacggttcacagcgttttcgccggcgaagtggttcccaaccccattttccctcaggcggttatctccatgcttgatcccacgatcaatcgtgatgtttattcggttcccaaacaccttcatctatttaagcaacgaattgtcgattggggaatggcactttgtcttctcatcaaattctcaattttttacccacttcgattctataaaaacctctcaaaaatggcagacaatctcaggcgtgcagttcagaacatcaatctgggtgcagacgaagagcccatagcgatcccaaaagaaattgtgaatcaagcaattgccgacaatcgtttcatcctgattggcagaccggtgatacctagacgtcagaacatccgctccatagttgcttctttaccgcgaatatggggacaagcagggctagtttcagttcattttcccgacaaaggaatcc

SEQ ID NO: 12651 - DNA, 3000 bp, Unknown
  misc_feature (1)..( 3000): cDNA_ID_3025963_gDNA_ID_2214564_Annot_ID_185960 3000 nt of promoter + ATG
aaacttttctctatctttaatctctcgtagtactaatgttaaagcggattttttggcacgaaaagttcgtacccaaccgcttcatattacatttgtaaacaacattcctcaggattggctcgtttgagtcctaattaattttcggatgacaaaaaaaaaaaaaaaaactcatgtgtaactccacatttaaattcatttgtaactcctccactataaattaaactctacatttaaactcaattgtaacttctaccaatcaataatagtttgtaactcttgtttattaattataagagttttaccacttctcatctataaatatacattctactatcgtccttcaccatattttcaaatctgtaaatctacattatttttatttattttgcatgagcttaaaacaattattgtgtcatatagtaatggtaagagtttgattgtataattttatttttagagattatatgatatgtaggttacattgtactcaattttattttgtttattttatttttagaggttatatggtatagagtttgtatcgtactcaattttttttgtctaccacattacaataatatttatattcatcttaatatttccaattttacgattttttatgaaatatttaaggaaatctttttaaatactaagatcataaaatttgaaatatttaaggaaatatttttaaatattacaatcataaaactaataatttatcataaattttgattttaaagaaaaataaattcaggtaccataaatttcggttactattagctagcatttctaaaattatgttttaaatttggaaaatcttattagacgtaagcatattccgtaaaatattcataatccttaaattaatttttttgtttacattttttggaataaacctaaattgtttgacatacttatatgggaaatttgtaaaactaccctttttttactacccttttaaaataataaccttttgtgttgtccatttttactacccttttaaaataatacccttttgtgttgtccatttttaaaataccccttccattgaacagaatgaccaaatgaccaaattttccaaccaaaaaaaaaatccgccaaactttttttccgccaaaaaaaaaattttccgccaaaaataaaaaaaaattccgccaaaaaaattttcgtgacaaattttttctcagccaaaaaatacttttaaaaattcttgtaaattttttttggcgggaaagagatttacaaaggattttaaaaatgttttaaaagatttacaatggattttaaaagggtttaaaatatttataagggattttgaagggctttcaaagatttataaaggttttttaaaaatttttaaagggtttaaaaatgttttaaaagatttacaagagattgaaaagggttttaaaatatttacacgggattttaaaagtgttttacaagatttacaagagattttaaaaggttttaataaaatttacaagagtttttaaagggtcttcttgtaaattatttaaaaatcttttaaaactccttgtacatcttttaaaactcttttaaaatttcttgtaaatctttaaaaccctttaaaatcccttgtaaatcttttaaaatacttttataccctttaaaaatcttttaaaaatctttgtaaatcttttaaagccctttgaaatcccttgtaaatattttaaaatcttttaaaattccttgtaaatgttttaaaacccttttaaaatcacatgtaaatattttaaaactcttttaaaatcccttgtaaatattttaaaacctttctaaaatcgcttgtaaatattttaaaactcttttaaaatcccttgtaaatctattttacggaaaaatatttttgaaaaaagttttggcgggaatgtttttttttcaaaaatttttggcggaaatttttttttcgaaaacttttggtgggacaattttggcgggaattttattttggaatattttaggcaaaaactattaatatttcattttgttaacataaaacaatttccaaataagggtaaaatgatcattaaaaaattaaagagggtagaaataaaaatggcaaataggaaagggtagaattgaaaaagggtagtgtgcaaagggcattctcagcaattattctactttcagtccctataaatactgtaaatatctagagtttattccatccttaccaacgttagttttaagaaaaaaaattatattttattctaacacaaatcaattgatattaagtaatttttttatcattatccttatatgaattagaatgtaggaaaaacacataaaaataaaagtatagtttgtattaagtctaaatatagtatgaaaataattactttgtatatctaaacagaaaataaaacctacaaattatcatatatctattttattacgtaaaaaaattagaatatgttttattgtacaataaaaaaaattgtaatgaaactcatactacacatttaatctttttacatgtgcgaattgcaagaattatatcgaggatcattgttgctttttaaattttattatcagttatatcaatatattttaaaacaaattcaactcttagataaattaagaatttattgttgaaatttgtggtttaaaattattgattttgataagttatatgtttattgtttttatttattatatgtgaatactcagctaatagaacaggatttgtaaaacaaatatttactaaaatatacatgtttacaaattctactatacactaacacacaacgtatatactaacacataatgttatactaacacacaacgtatacaactatataaactataagattcaaacttgatatagacttttatactttgtaaattatagaagttaacatttatccacactaattatccaccaaattaatatagaaaagatattgccaaaactaatagacgaattaaaacgttattcccgtgcaaagcgcagagcactgacctagattaatccaa

SEQ ID NO: 12652 - DNA, 3000 bp, Unknown; identical to SEQ ID NO: 12645
  misc_feature (1)..( 3000): cDNA_ID_2709337_gDNA_ID_2214564_Annot_ID_185953 3000 nt of promoter + ATG

SEQ ID NO: 12653 - DNA, 3000 bp, Unknown; identical to SEQ ID NO: 12643
  misc_feature (1)..( 3000): cDNA_ID_3025995_gDNA_ID_2214564_Annot_ID_185949 3000 nt of promoter + ATG

SEQ ID NO: 12654 - DNA, 3000 bp, Unknown
  misc_feature (1)..( 3000): cDNA_ID_2709305_gDNA_ID_2214564_Annot_ID_134928 3000 nt of promoter + ATG
atgggacttctttaagacttggtaaaacgtggggattttctttgtcgaataaggttgtcgatcgacaccatcgcatgaataacgtttttgctggtcttctttgctgaaaagcttccaaagttccttattatgctccatagctctcaaaagtatatatgcacctctaatgactacaaaacatacgaaaatcactagaaagactctcaaaactatcccaaaactatgttagaaatcagtaaaaacccatgatatatcaactctctcagacttagcttttgcttgccctcaagcgaaacaataaacttaacctgtgggaggggtttgaaaacgtagaaactcctgatctttctagcatattaccttgatcattcaaaccaaatccatgcacttaacagttctaatcaagtcctaaccaccatgtaattctctgcacgcttacacaacatcctaaatttcataccaaattccacaattatatctattaggctttcgtcgctgggtctcatcaatcaagttaggattcaagaaccttctacacgcattcatgtactaaacacattttcaatagttttaaaattgatgtatcaatagttttaatagttttaatgatatatcaacagttttaaaattgttagagatataaacacattttcaaaacaaataccagtggcataacgcagacttttacctaatctctttttaaaagaactgtttattttggcataagtaagaaaagtagggatgtttcacatattcgattgtaagtgtgaagattctcaatctttacaattttgacaatatgaaggatggcaaaaaaaaaacatgattctcgtggatacaatggttatttgttttttttggttttgttttatattatctttttctgtattttacaacttcaacaagtttagagatattaaagaaggtgaatggtagttcataaaatattttctggtcatcactctccaagctttagaacatataattataactcatttaatattaagtttgctcatcttaccaaatggcaaaaactgatgaaaagttggctttagtttttctgctttggaaaattttaaaaatgcaaacgggaaatgtaaatcagattcgtgcttttggtaggtttcttttcttttatatgatatagttaattctttgtttttatttagatttgaattttataacatttattgtatattaatatagttctaatatgggtcagttaaatatatatacttctacggggatttatttaaggatgtgtacatgtaaaaccaaaaattaggtgaaagaaaacatgcaaaataaatatgccagatttggccctatagctaatgatacgcgtagtgtaagctacgagattttcgcatatcccgcatttaatgagacgacaaaaactgcaagaaaatacgccgccgagacttaaagagagagagaattgtaatgatgatgagagatataattcagtttgcgtgtttgtgtatttattacgcccctatctatgttgcttcaccaaaagaactgtaaacacctaacttcaaatatctgcatttactaaggcgacgataacaagatcagagtaattgaaggctcaggtacgaatttaattctcaagttactttgttcatcatgtgtatatgagtaaaaagtgagcgctaagtaagggttttaaaactttgtctcatacgaccgctaactttgcaattatgggtgattatcgacaggtgcaatggcgatggttgttcggctggttcgaggagaatggaaaagagatgagtacgggtgctatgaacacgtagcagaactagatgggttatgcttggcggtaaaactccgggaaagggacacgttcgctaaagttgttaccgtcgtgaaggagagactgtcactcgggtcggaggatgaagtggagttgtcttaccaatggctgcagtggatgatgggaccagatttggcagagggcaaacccaatacctattctcgatgatgaggatatgactttgtttatggcgatccgatctgatctagaggaggttcacctgaaggtgaagatcatacggaaaatgttgggagcatcaaccgtaaattcccaccgaagcgtcttagatatggggaatatgacctcggaaacgatatccgataagtattggaatagcagtgaaacacgagcagcttgggattccgcagtaacgagaatgttgtatggtatcgtctctggtaatagtgtaaccggtgatgtcggtctagccaaatacggtgcaggaccccatatagtcaggggagggggtataactatcagagaaaacacgggagagactggtgttggaagcgtcgcaccaagaacgctaacctaaggccatccaactgcaaccgctaaagggaaagaacgtgtcttggacgaagagagcatcaatgacttggagttcgcagtttggaggaagaaccaacaggaagtgatgctgcgagagatggaggagagagaaatacgactggtaagctctacggtaggacagctcgtcacgactccagctaaagctacggataacgatgttagagggcaaacaagttcaaacccggaggaagccattcgtcttacacttggcaacgcggctccagttgctgacgtggtatccgtagtggctctatcttcaacagactcgacattcaagacaccggctaagagtataagcttctctagtgaggatctaatggacgaagacgaagtatctagtaacaattgtctggcaaggataggtatgttagcaaatacagttagtcttatccaaataacattcatgttgacttgtaactaaccgcaggatctgataaagtttttcttacccatatacaaaggcgaagacgaggtggcgcactactactcagaccccgacggaccgctgtgtatggcaccaatgaacacccccaaaatgagtagagtcaacaacattgttaggggggagattgttgcaactgaggcacaagttaatgagttaaataccc

SEQ ID NO: 12655 - DNA, 3000 bp, Unknown
  misc_feature (1)..( 3000): cDNA_ID_2710418_gDNA_ID_2214565_Annot_ID_134929 3000 nt of promoter + ATG
ttttgataccataacaaatgaaataaataaagtgaaagcgtctctattcatattaggggaaattaaataggaaataaaagctgaggggtcaaatctaaaagaaggaaataatattagatttcatggtgaggacggtttggtcggtcggtggctccattggtggtgtgggccttcttactcgcttttttcgaccagccagccgttcagccaccgcctctctttttgttcttcttctgttcttcccaaatgactaatctgcccttttattcattctacatacttttttggtcaactccttacaaaaaattatgaatcattaaatataacatatgtatctaatgcaattcaatgtcatttttgtattagatgttttcactttttttttaattgagtaaaatatgctatttttactgaggtaatgcataattattatttttagtaagaaatcatgttaatccatgattatttcttgttaatccatgatttcaattacatgttaggcataaatcactatttagatgtgttattgatcactttcttctttaaaagtaactttaggtatacattataacatgcaaactaaatatgttttatggtttacatatgacatattaagttttatcacaaatgtgaaacacacctttcaaaaaactaattattctaaattttctaaatataaagattttttttattttttattttataacctcattagattaattgtatataagaaatagtatagaagaaaactaaaaactttttaaaaatatgatgtgtacagtaatttaacaaacattggatcttctcacttctctcttttactatatataaagatagttcttatcattgtctttttttacagcactattgttatcattgtttagtgtcaaatgtcaatatacacaccacacatattacctctagttcttttattttttaaaataaaacaattacatttgtaacattttgataattaatggaagctaatgatcaatttgtgccacatcacatttaggggtactaaaaattataatgagagaaaacaaagggcaaaacgggaaataaaaacaaaatgcgacggtcttctcgtccgccagatttggctttcaaaaatacgaaacgaccccacactcactctccactttataaaccctaaaagattctccttctctctctcacacacacccaatttgcatttctttcgtcatcatcatctactctttctgcgtttttcccagctgaataatctaaacaaggaaaagtaaaacagagtaccaatctcagattcatcagctccacttggtaagcactttcaaattcatggtctgtttctatcatttgatcttcttaactcttttttcgggatttctaaccgaccacaaattgattcagatcctttaagttcattttcagaaaaatgggttattagaaagttttgttgggtgccgcttcgtcttcttcttagttactgaattctctaatttgtatgattttgaaatattcatcgatccaagtttcacgtctctctgcgtttagatctctagagatcgaacttgtttgtgatagctgcagattcatcagatgaatcaaatcattttgaagtagtgttgactctgtagtgattaatcttaggatctcttgtgttgtgaacggatttagaagggtttttttctatggtgattaaggtgaagaaatttttgaactgtgtgattactaatctgaacttcttacaaacatttagtggtaggttttggaaaaaaaagtattatactactaatcatcgtcttgttctgattactagattatagtattaattaaatatttaaaacatggtaattaggaacatgatttgggtgttaagcttgcaacttttgaacaaacaaataaaaaaaggttgcttgcaagttgcacagccttaccaatatatatgtctttatctatataggcaacgattagacttagaccaaataagttgacaaatcaagataaacttcttagattagagaaattcctcttttgatcgaatattcttgggttttatacagaaaaagaaatttggttggatattgaatcaagcgttaatgatgtttgtgatccatcatcagcaaccatttcttgtatcgttactctttagtctttaccttaagatttaactttaatgcgttttcgtttgttcttttagttttttttaaccagatgttttataaatagaataatattctggtctttgttttcttgttacaaaaccacgggctcatgagtcatccgctgcatctggtcggcgtaccttatgattcttttcattctctattatatagtcgtctaattatatgtataatagaaatgattgctattagtttaatataatttgctttctagtacttatttgttttggcacaatgaaattgaaaaccactttactttattttcttatacaaaaagaaagaaactttgatgatgatggttttggtgggcactttacacattacttatctttagtttgtttggtaggaatttatttatataataagtgtgcttttattcatttgtattctggtagagattgttggctattgaaacagattcttactctggtaacatcacatgcctgcacccataatacctattgatctttgtcttctcctgattgtttttggattctttagctttctgatctaaacatatgtcattttctaaacttaaaaaaaaaaaaaaaaactgaaacgaaaattagaaatctttattgaattggtatttcaaatagttgtgtaatgagagatgatgtatacctgttgactgttcacattaaatatcttatcttgtttgttttgtatctcttacttgcaagctactgttttcttttttgatgtaaagaaggaactttaaatctgatatattagtagaagtatatcatcttcgaatttcttctcatgcgatatcttatatttcttttctcttctgcagaatttaaagtagccataactgttcgatcataggatg

SEQ ID NO: 12656 - DNA, 3000 bp, Unknown
  misc_feature (1)..( 3000): cDNA_ID_2709350_gDNA_ID_2214565_Annot_ID_134930 3000 nt of promoter + ATG
tactataatctagtaatcagaacaagacgatgattagtagtataatacttttttttccaaaacctaccactaaatgtttgtaagaagttcagattagtaatcacacagttcaaaaatttcttcaccttaatcaccatagaaaaaaacccttctaaatccgttcacaacacaagagatcctaagattaatcactacagagtcaacactacttcaaaatgatttgattcatctgatgaatctgcagctatcacaaacaagttcgatctctagagatctaaacgcagagagacgtgaaacttggatcgatgaatatttcaaaatcatacaaattagagaattcagtaactaagaagaagacgaagcggcacccaacaaaactttctaataacccatttttctgaaaatgaacttaaaggatctgaatcaatttgtggtcggttagaaatcccgaaaaaagagttaagaagatcaaatgatagaaacagaccatgaatttgaaagtgcttaccaagtggagctgatgaatctgagattggtactctgttttacttttccttgtttagattattcagctgggaaaaacgcagaaagagtagatgatgatgacgaaagaaatgcaaattgggtgtgtgtgagagagagaaggagaatcttttagggtttataaagtggagagtgagtgtggggtcgtttcgtatttttgaaagccaaatctggcggacgagaagaccgtcgcattttgtttttatttcccgttttgccctttgttttctctcattataatttttagtacccctaaatgtgatgtggcacaaattgatcattagcttccattaattatcaaaatgttacaaatgtaattgttttattttaaaaaataaaagaactagaggtaatatgtgtggtgtgtatattgacatttgacactaaacaatgataacaatagtgctgtaaaaaaagacaatgataagaactatctttatatatagtaaaagagagaagtgagaagatccaatgtttgttaaattactgtacacatcatatttttaaaaagtttttagttttcttctatactatttcttatatacaattaatctaatgaggttataaaataaaaaataaaaaaaatctttatatttagaaaatttagaataattagttttttgaaaggtgtgtttcacatttgtgataaaacttaatatgtcatatgtaaaccataaaacatatttagtttgcatgttataatgtatacctaaagttacttttaaagaagaaagtgatcaataacacatctaaatagtgatttatgcctaacatgtaattgaaatcatggattaacaagaaataatcatggattaacatgatttcttactaaaaataataattatgcattacctcagtaaaaatagcatattttactcaattaaaaaaaaagtgaaaacatctaatacaaaaatgacattgaattgcattagatacatatgttatatttaatgattcataattttttgtaaggagttgaccaaaaaagtatgtagaatgaataaaagggcagattagtcatttgggaagaacagaagaagaacaaaaagagaggcggtggctgaacggctggctggtcgaaaaaagcgagtaagaaggcccacaccaccaatggagccaccgaccgaccaaaccgtcctcaccatgaaatctaatattatttccttcttttagatttgacccctcagcttttatttcctatttaatttcccctaatatgaatagagacgctttcactttatttatttcatttgttatggtatcaaaatccacatcacgttgattattttttctatttaaagatttgtttcatttccaagttgtgcaattgaaaatgtatcgtcaccgtcctgaaatcgtcactacaactttttcaataagactacaaaatgacaagtttagttatctacacagtcaatatcacaaaatgtttggttcgacttttatgttcggtggctataaatgggttttacaaagttacatgaacaataataattatggtttacatgttaaatgtatgactttgtttatatatgagcttaaggaagtatttaaaattcaaaagtggtcaagttagccaaattggcggctattgaaacgtccacattgggtcaaagttcaaagaaacgcagccaatgctcttccggacttttcatcgtactttttttgttattaagaagaaaaactaagaaagtcacaagagagaaattcaaacaaaatttttatattagaagtcccaaaacataattcaaattaactaaactacgtcgtactatatgaaattcttattaaaatatctttttgaataatacttctgttgaataatatgtagaagaaaaagagaataaaaagaaccggttcaatctttgtcaaaaaaaataaaaagatttaagattaagccaactcaacctcaactatttttcaaagtgggcgtttttcaaattttctcaaacatagatctttttccaaatgaatacaaaaatataagggtcgacttgctattataaaaagttcctaaattctctcccgtgctcattttgaaaacctccctctttcgctgcaagcagagaaaaagacgacggagaaattttaaatctgaggttcttttagtcctcgcgaagccagatgctactctctattgcacgtctgtgacagaagagctcgattagggaactgaagacaaagacacggagaaattttgaactcgagaggtttgattttgaacctttgaatctctgggtttctgatttcttcgagatttaactaggtagttgaattgaatcctgataccaccttgaagcgtttttgttgtgctttctcagattatccatgatcatgtgatgcactaatttcgtagtattcaattgctgggattctgaaattagcaaaccttaaaatggttgatttgtggaaatttgtctaaccggttaatcggttaacagagttggaactagtgtt

SEQ ID NO: 12657 - DNA, 3000 bp, Unknown
  misc_feature (1)..( 3000): cDNA_ID_2712377_gDNA_ID_2214565_Annot_ID_134931 3000 nt of promoter + ATG
acattattttcatggaatttgtttagctggactgtctggacctgaaagatctggcagtatcgcctctcatttcgacaagtatatgaactcggaggctacattcaaggacttctttgagctctacatgaagtttctgcaatatcgatgtgatgtggaagctaaggatgatcttgaatatcagagcaaacagcctacactgaggtcttctttggctttcgagaaacagctttccttgatctacacggacgctgcttttaagaagttccaagctgaggtacccggagttgtttcttgtcaacttcaaaaagaaagagaagatgggacaacagcaatattccgcattgaagatttcgaggaacgacaaaatttcttcgttgctttgaacaacgagttgttggatgcgtgttgctcttgtcatttatttgagtaccagggattcctatgcaaacatgcgatacttgtacttcaaagcgctgatgtttcccgcgttccgtctcagtatatattgaagcgctggtcaaagaaaggtaacaacaaagaagacaaaaacgataaatgtgccactatagataaccgaatggcacgttttgatgatctatgtaggcgctttgtcaagctgggagtagttgcatctttatcagatgaagcctgcaaaactgctttaaagttattggaggaaaccgtgaagcattgtgttagtatggataattcttccaagtttccttcagagccagacaagttaatgacaggtggatctattggcttagaaaacgaaggtgtgttggactgtgcatcaaaagtgtccaagaaaaagaaaattcagaagaaaagaaaggtgatttttagattcttcaatcttatgagattatttgtagtttgctagccctggcggaaagatctgattgattatcttgtgtttaaaggtatactgtgggccagaggatgcaacaaacaggtcagaagaacttcgccaagaaaccgttagtaatctgattttgccatgctattatatctgaaatctcccattttcttagcagtgttattattcatggcaaattattttcatccaaatacttgaaattagtccatgcaccctgatactattaggcttatttttcatgtgcaggaacaagttagctccagagctcctacgtttgagaattgttacattcctcaagcaaatatggaagagcccgaactaggctcccgtgcaacaactcttggggtctattattcaacacaacaaactaatcaaggagtgggtgcacattattactctgtcattttgttgtctaacaatttttatattactgtttcattgaaattgatacactgttcttgttattctggcagttcccatcgatttcttccatccagaatggttactatggacatccgccaaccatacaagctatggtgaaatgctttatctatctcatttttagtttcaaagcttttgttataacacatgcaaatccatatccgtaaccaatatccaatcgcttgacatagtctgatgaagtttttggtagttaagataaagctcgagactgatatttcatatactggatgatttagggaaacttgcattctattcatgaacgaatgagtcaatacgagacacaaccaagcatgcaaggagctgtgagttgatgttctatgctatttaagtatttttcgggagatatatatatcttattgttctcctcctcccgagtcaagttgttctaagaaagaaggatctatttcattttgtggattgtctagtttcagggacagacggggtttaggggaagcgctatccgtggctgctatgacatcgaagaaactctgcacgacatggtatgtaatcttgtgacgttagtaaaaacgctctaatgttacaaaagaaagaaagagaaaacgaacccaattcctcaaaatgttttcttttgacaatgtcaacttcttccttctcgggtttttatcagtttgattgaagcgagactgcgaaattcctctgtttacagtagaaaatgtgatcagccctatttataaccgttgtatgttttccggtttttgtttgtgcagacaatggggtcctcacagtttcagggatctgattcgagccatcctagtgatcaccgcttatccaattaacagaacagaacaagctcaagagttgctactttcatatctttaaaatagtggaatgttttgtatgtacagaaataggaaaggtctaaagtgtggaactggctttgaggtaaactcttactctgattggatttgcttgtatttataccggaatcataatataaatatatgattaatgtattcacattctctaatcttcttttagacttgtagttaccattcaaaagtcatggacaaccttcgttaaccttgagggccactgagagacaaccttggacttggtcactggctcacttagcaatattcagttattcactctgttgtatataactcaccaattaaattcaaacaactaattcaaaacattatactatagcttttcattaaaaaaattccaaaacattcatttaattatataaaccaaagaacagcttttaagacttaaaatatttcctaagtatccaacaagtcaatacagattttttaagaaaactaaaccattttttcaactttacaacaaaaacaccaactgttacaaaaaaactctcgaatttcctatttctccagccttatgacaaagatatcagattaataaaatttagaattcattactttttcttcatttttaaaattatctacatactatttatttctctccattttattcagtgagaaaataaaattacaaatgcctgaacacaaaaataaataaaattagaataatcagtttcctctagaggatattcttcgtcacaaaattaaaaaaaaaaagagtaggagaagagggaagcgactagcaccttttgtagttttccgtttattttctgtataaggcgggtgatttcggctccttcatcggaaatt

SEQ ID NO: 12658 - DNA, 3000 bp, Unknown
  misc_feature (1)..( 3000): cDNA_ID_2709354_gDNA_ID_2214565_Annot_ID_134932 3000 nt of promoter + ATG
ttattatttagagtgattctcactaaatcttaggcggttagcaaccgccatagttttcaaaatctcattctatcgggattaaatctgtttttggtgactatatataaacattggtcgaatttttaggtaagtaaaatcagagttatattgaaaagaatcatgaaattaaattacaaaccaaagtagaacccatgttttgcttttttctttaatttgactttaccaacgtcgagtttcagagaaacttaaagaaacaaatgcagaagcaaaaacttaaacggcaaaattgtaagaccccaaattacttattagaaaaagaatatgtatatgttaccttcaccagtgcaactcatatcactagacaactaagaccccgacgaaagaaaaagtttttaatatcaagattcattttcttacagtaatatcaagactttttcatcttttagactacaactttgaatacattgaagaaaactacaataagattgagaaaaattatgtttctctaagaaataaaaaagtaagatatatattaaggttaatttggaactgtattattttgaatcaaaaagaaactcaaaaagtgtgaaactcaaaattaagtctcctcatataatttgaaactcaaaatgaactaaaagtaaaccattaaatgatgtatgtatcctcaaacaatttttgaaacaatttaaaatttatctacgttactataaggatagaagagtacatatacttacttaaaagtgttatatttaaaatttataaatgtgctaaaaggaagaaagatagagcatccctatatataactgcaacatttatggactatcttttatgaaaacttaggctcaccacacttctttgtatacaaattgtatcatttatacatttatgaaaaattaatttggatgtattcatgtatagattgtcaaattaatttgtacacccacattttaaatatatgctaatattaggataagtattctgcattttaaatatctaatggcaatacaaagtttagttagtaaagtcaaaatagttaattatttttttctataacataataatttgaaaaatgtattatgtaatttgataatttgtacattaattttattagtataaagacaaataagttagattaaatacttatagaatttgttgacaaaaaaattaacaatattaaacgaaaatgacaggataatctgtatccagaaagatgatgtgtatacataactgcgtcaagacggatattgtatgaatatatgtaatagaacattaagaatcaaataaaaagatgtaagcatatgaagatgtaaaaaatgagtcatagtatcgacatatttagagtttgacttgatatgtttaagcttcattaccattatttttctctagctaagagaggagtcaacttgtgtgctacataggtccgtacattttatgtcgacattctttcgccattctttttgaaaaaagaaaaaggaaatattctttgtcttatatcttttcatcttttcgatttcttaattatttaaaaatagtatcgtaaaccagggtactcgtgacgacgtgtctgaatcagtctagtttgaattaatataatgaaaaactaatcactatgaagcaaacgatattaatttactctcttttttttcataatagtcgctctcgactacgtttacgatgcccacattttcctttgagaacatatattaatttgtagtcactatgaaaattaatactgttacatagaagacatatagaattccactttaacttgagttccacaagagcaaaaaataatatttctcctttttacaagatttaatttttctatgagactatattttcaacataattttgtgatatatgacttaaataaattaattttgatttcatatactaattatatgaactggataaacattttaattacgtcataatatcatatgtcatgcttccagttaatcgttatcggaggcttcggcccatgttgtctgaaaacccaagccatatcaatcatttcttcatacaaactaaaattccttcaattggagaagggatatgaaaataagagaacaatccaacaaacaaacacttacaaaaagatttagagacatttcctccagatcaatactcaattactcaccaaaattttgaacgatatatacttctgaactaaacatgttatacgcatctctcactcattaaaagctttcccaatatcatattaatcccgggatactttgaccatttattcatgtcgcatggacaactagttaagagtacatcgagacattgtatgagaatatcagtgtccccaaatctctgccaactccaccctggagaagggacatcacgtcggcaagattaaacgattactggtcgtacacagattcaaccttacctaacgcatgaacaaaccctccagtgagaaaaagacgcatcaccccatttacaattatcctcgcgcggactaatcccaagtcgaggacgcaactaaagctctgagactcatgatgagtttcctatttcatacccaaacgatatagtaatatcaaattattgctatattaattaaattaaacaattcgttcaagttgactttcattagatatgatcagatttgtctcttatgaatcgtaactaataatgcgcattattatataaaacaagtttaaatacatggtatacttcctaaaaaattacgtattgagtttgaattaattttaccatcaagatctcgtgaagataaaagggcaaaacgagatacaaaatcattagttgaatattttagtttttgttagtttaagaagttcaatatcttattaacgaatgaccaaacgaacaaaattaatactaccacacatttttatatgatattaatatacgtatatatacattcagtacttccattaccataccaagcttttctcttcttttcatcatcaagaatccaacctatccggttcataaaagccctaattttaaaataagatagagatt

SEQ ID NO: 12659 - DNA, 3000 bp, Unknown
  misc_feature (1)..( 3000): cDNA_ID_1808383_gDNA_ID_2214565_Annot_ID_134933 3000 nt of promoter + ATG
gtatcgaggacagtgttacagcgacaaaaccatttgtaataaatttagatctctttaagatgtctttctttcttccaaaaaacaacattgtgattttagtctttgttcttgacctagttcatgatataaaaatcatcatcccttttatctgaccttcactcatgtttaatcaacttgaatcttatgagacctactacaatcacacaactctcctcttcttagagcttgctgcaacaatgacttcatcgaagctgatatagagtacctaccgtacctaaagtgtttcattaagttgatcaaacttgtgaggcaatgagattttgagaggatagcttgaacctctttggatatagctacaccaagattgctaagatgttctaccaatttcagaataaatcatcaatgttcacatcaattatacaactttgatttttccatctcaaacgtatatatagaatttgagttgcatatagatacgatctttacctatacaatcttgttaaagtagaccacatcgaggttgcaattaatgttctcccgcaatatgtaatcacaaacaataaagattatcaagttttaagtcttcctatatcacaaactaacctttaaggagtcttaagtcaatttatgtgtttcaccagattctacctttgtttagacatggattgtgtctttagcatccattcattcatccatagttacaaatcacctttccatcaaaatgatccactcccatccatagtagtatccaccaccattaaaattgtaacatggggctatgaatatgatagcattcttcgattcttgcatcaatctggaacctaaatcgaagcataaactacaccaaatacaatcgtaaacaaccagaacaaagatctaacaactcatgctcaagaacatatatagattaatgatggagaagatagataagagaagtagatgaacacaagaagttattagttaagatcaatcggtgtgatattgatcctacatctcggcgagagcgggattgaacaattcataaacttaacttcacaagatcatggagagctccataaatccggaggttcacgaatcatggccaaaaaatctatcgtacaagataacaacatgaacacggctcataaaaaaccttatctctattaatcagtaaaaccctaattttcagccaattccggttcagttagtcttcggtttaacattttttcttcggtttaatatttaaacaaaaaaaatacaaattcggtttaatgtcacacaaccattactaaaccgcgtgattcgaagcacaacttaacaattagaaattagaatattcatttttttcaaaaacaaatttggattattgcattattgtttggataaaaccacgatgatgttcacatgacaaaatgatgtttagtgaacgagacgccaaccgctttatatgaactgttttagttcggagattttgcgagttccgactatgggttagaactaaaattttcccatattgtcaaatgatgttgttataaataatatattctctacataattactgtggaattaaggaacataaatttgattctttaacagagaagtgaagatattggccatgcttggttgggttgtattatgccctacttttcttcccccccaacacaaagaatccaaccatgtttaaccaaaccaaataaatatataaaaagcaactataaattattcacttgaagaaatgttaattaacaaatcgataatttttatttaaagcgaattcgccattccatgaccatatggacaaaaagaagctttattgggccaaagtacccacatgcatatcccacagctaatcttttttatttttgacatatcccagctaatcatattccatgtttcttctatcctttttttttaaaaaattgattatattcccatgataatcatttcaattgttttacctaatcctatatttgttcggagtttctactagaatttctatctacatcaacatcaaattgtaatagctttatgtctttgctaaagcacattacctatgtagcaaacaatcgtattaaatataaacgaaaatatagctttatgtcttttcactaaaatcaacaatactaatccaaatcggagatttgctttcggtaaacatttttgttcgactttttatctagaatattataaagtaagaaattttgtgaataagttactaaaatgaattcattacaaaagtagataaagtataaactatcatgataatttagaagtaaaaggattatttttttgtgaatagtaattttagataaataaattatatatctactaaagagtaaataaaaatatcaatacaattatttaatttttaagggcaatacaattatttatcattttgattcataattaaaaaaaattgtcgacaaacaaaaaagcttcataattttaaatttagcatatattaagagatatttcataagagacactaatgtctttctaattttcatgttaacttggatgttttaaatatcaatcaaaaaggttataattgagcctcaccaaaaaaaaaaaggggttataattgatctgattcgatcaattatccagtgtaattatatattgcaatctagttaatgatataacgttataggtctcatttcctacattcaactaaaaggtaagctaaaaaatctaaaagatacaaatatccaacaggagaaatatctttttctctcattgtctatatttgttgttcttctatctctttctctctctttttcttccacaccctcacaactttacttacgactttattatatatataccaccaacccattttgtcataaaagatcattactcgttaagactttccactacccattctcattctctcttcaactaatattcttccccggccctcataaagaagcttctcctgttctttattcacattttccaaaattgtatcttcttaaagtatctccaacaaaactaaatcctactaagttaagagatttgaaa

SEQ ID NO: 12660 - DNA, 3000 bp, Unknown
  misc_feature (1)..( 3000): cDNA_ID_3026049_gDNA_ID_2214565_Annot_ID_134934 3000 nt of promoter + ATG
tagtgacgatgtgtctacttccagatttgcgcaagtgaggattattgacaggcatagacaagacacccccaaacatagatgccaaagacaaaaactttctctgtctctagttttgttctgaaaccaatcgcaaaacaactgacatagcttaaaacctaactcttacgaaattcaactaaaactagtgtctaataaccaaccacgaaagtgaaagactttacaacgaagaaagacaaatgagtaccttccaaaacaggaaactttcttcaccaatagcttgctgctactctgaagaaggcgtcaacactgctcaacatgaacaatcgcatcgagatgatgttaaacccaattgataccaaagaaaataaaaataaagtaaacccatcaaaagattcaatctgaatcacaaaaaaaaaagtcgatggctttattgaagcggctgagaaagattcaattaaaaccctcttttgtattttagcgaaaaactcgcattaacaaaaaaaaaaaacgtcttcaattttttccctaaacgtcaaagtgtacattgcattgagtttcctcctatgaacaattcacgagatgagtatttacgttgtaagaagaattaaggaagacttggaaggcaaaacccagaaaaggaacaatcaataaaagtcttaatggagagaaacgattttagatgaaaagagaaacgttgtgatgattagattaatagcaaagacaataatcaatgaaagcgagacagagggataaacaaatcgaaagagttttttttttttttttttggttaagaaaacaaatgtttttgttttggtcaacggcttatgcaagttaattgactttaacaattcttttgtcttatcaaagcaaatctcttaaatcttaatatagtactagattttgttcatgtaaagttgaaaaatcatccaaaaatggaagacaattacataagatttcgtatttgacaatagtagaacattattaatttattataatcattttcacttaatttgtttacgtttgttaatttgataaaaagctaaaatatttcacatataaagtaagaaaggtacaaaagaaaaatagtttgaattcggtttttcctaataggttcatgatgaatattttattgtctagatttatcgagttgttcgtagttttgataataaacttcttgtgcgtcggggttaggccgagttgatttttctaaaaagaaagacatgtttaaaaaaaaaaactaaaattcttaagtgaagtaccatttgaaaatttctacgtgaagggaaaaaaaagataagttaatgcaaacaccatgacgttaagaaaaaaaagtcaatgccaacaccattttgttttggtcgacggattagataatgcatattgtgcagacgtattacttctttgttgttacggtaccaatgactcgatagtggtcaaccagattggtgaaaaagcccgaccgaacataaacgagactgattttgtcctacatgggcttcctctcagcccttcacgtcattcggtttctctacttgagatcaactttttctaaaaataagttgaaatcgtggaagagcagagccgaagccgcaaagccctaggatttatcattggaggatcgtcttgcatgcctatgcaatatgcgaccaaggacctcacttaatggtggagaaataggcgacgacatgggaaagctccacacacagtttcttggatcatcgagtggattaacaaacaaatccgaaaccgttttccacaatccgacttctaggcgataaacgctatgataacggattacaagtttggtttgaaacaaggatctaagtgtaaaagtttctaattttctgctaaaattttctactattcgatgcactagttgtacaaacgctatgtttttctttaaatataatttaatattattttcaaaaaaaaaaaaaatttatagcgagatgttatcaaagctatgggcttccatacttggccatccctattttaccgtgatgttcttgaccagatctttggctcgcccacagctcttgtttgcctgcaaaaacaacgatgaagtatttttcttctcctcacctcagcctcataatccggatgagaagtcgtctcatgtagccgccactagtcacatgaaaattccgtatgactttgtatttgaaagattcagtcctatcagaggtctggtctttcttagaaatcataagatatcttaaatggaaagaagcagaagttgtcggtgatatgtaatcagaggtctggtctttcttagaaatcagaggatcttatatcgaccactgtccatggaattgattatttatcaaggcacgatgagttgtctcaggagcatacatttttcattagtaactggagaaccttcatggacactgatcgaatgttgcataccccactatcctagtatcacatagatatttattggttatatgataattcattcttctattttccgtgaaactacaaaacaaggaataaaaacgtgactaaacaaaaatacaaaaaaaaaaaaaaaaaaattgggcaagaaaattatggccacgttttgttgatagcatacgaacgcgccagaaaattagcaaatttaattaatttcactgaaaaaattatttttgtgtgtgtatgatcataatgattccagtaaatgatttttgtagttccgtcaagtgcaaggtaccatgacaagcgtattaggaatgatgaaccctaatctgatcaacggaagaaatctccacaaaggatcttcaatttttgtacaagataaagaaactaaaaaacgagtccaatggagattatcaatcaaggagggatctctaagaacgcatcaagccactgcttcttctgcaacagaaccaaaggttagtagtaacaacaatctttgagcttttttttctgttaactctctggttttgtgtttttgaatcattaatcttgaaaacacaggcgacagagttcaatacgacgacgtatgaagacaaaatg

SEQ ID NO: 12661 - DNA, 3000 bp, Unknown
  misc_feature (1)..( 3000): cDNA_ID_2709364_gDNA_ID_2214565_Annot_ID_134937 3000 nt of promoter + ATG
aagtatctctctttcctttggtttttcgtttctgtcttcaacaagtttccatctttctaacacggtttatgatcatttctcttagtaccaaccaccgccaccacaactgccgttatcgtctagtttacacgctatacaagatcttgatcagtctaggcaatttggatacaacgagccaaatgtttctttatgtgaaacaagcaacagaactgctcagtttcaacgtggacactttcactatcaggtatctaatcgatacccttcgaaaactgctcaaagtgtctatcttttataagacaataagttgctaatatatatgtatcatcatttgctttaggaactaaacacaccatttgcaacagagagcttaaattctttattggcctccactgaagcgaaccagaacttatacacagtgccaccacataatttcggatatggtgagcccattggttctttatatgaaactagtaacagaacttatcagcttcaacgtggacactctcactatcaggtatcatcaaatatgatcttatccgtttcatctgctcaaaagtgtccatgttttataagactatgagttggtaatatatgttgttatcatattctgtaggaactatacacaccatcagttgaatttcagacgttattcccactgccacctcttaatattaatttcaatgagcctggtggtggtggttcttcaattgctgctgattctagtcaacaacaattcagctcaaatctacctatgtggcatgaaaatcagttgaacataggctcttttgactctggaccttcctcttctacagtggtaatgtcaaacatggacctatccacattcggtaaatcctctgaaatttgcaataaagcttacagatttgatatattaatcacacttgtcattaggtatcatcatcatcatcatcatcatcatcatcatcagaaaaccaacaagatcatcatgaacaagttgtaccaccaaatgaacttgatccattgaccatccagagaaatcaataccgagaggaagcaaaacagagatattttgagaagaagaggagtcgcaagtaagtgtttcgtttagctttctagttagggctgggatttcatcttcttattattgaggattttggtgaatctttgcagattcgtgaaggcacaccgatatgaaagtcgagcacaaacagctgcgaagaaaaaacgaagcagaggtagatttgtgaaaaacgatgacgaattcgacaatgaccccccagctatacagtgattgttctacttgtactttcgaaaccttggtgaaaaatttgtaaattatgggtgtcattgtcaagctttgttttttttttttttttttttttgtctctgatggtaccttcaatgtcacggaacatagaacttatttactacttctccacttaaaataactaaattggcgaaatgacccctcaatttcttcatttactttcaatgttacccgaaagtttaattttcttgtactttcgactttttcatttctccaaattcaccaaacactctctaattatcaactctccccacggccgttgccgccaacaaatccgccgcgaatccccaaatgtaatctccataacctctactatatcgacactgtgcagcttagagctgtcaaatggtccagcagcaaagccaggagaaactggaaacctcttagaccatcattaacgcaggcctcttaggtgggtttttagggttgttttgtgattaaaattaaattgcaaattgggctaaaatttaagaggcgctcttatataagagggccaaattatattaagaggcggtgacgtggcatgggtgagttgtctgaaaattgaagaaaaggaaagaaaaaaaaacagtcgtgggtttttgtttcttcagtctgtcgacgcttgctctctctctatttatcgaattccccgacggtgaacatcaccagacaaggaggaggagactaggaagatcgattttatcaatctcaattgaacaagatggtaagttttattgtttctcagttcatctttttattcaattacttgttttctatgtcaatcgtttgatttatcttctggtccttgaggttgtaaattgggatagaccacgtttgtttattgtaattgatcccctaagctctaaaattatttttcattgattttgattgcgattagtatgaatctatttggagatatatggttttcgatgctatgatttggttctagggtttattttagaattgttatttcagagtaattagatatttcgtgatttctcaatcgatttctcaatagatttgtctctttgatttggctaatctaatcattacttgcgttctgtcttttttttcttttcttttcttttttacctttttgattattgaggatcatatttggttttgtgtttcattgatttagtttcatcatgtgttaactcttttcaatttgtttcttttttgcagtcgactctgttagctacatgtaaccaaaattgaaaccaaaactaaggttcgtgatcacttattccttttgatcctttgagattcatgtaaattaggttttttcttgttgttgttgctgtgttgtaggataatgtgtttgtgcagctggtttgtttgattcaatatcgtgtagtgaaatctagtgttgatgatgcattttatgagcttcaaatccctaaagagcaaatcctagcttatagtgattctacttttgttaagctaaccagttggtggtttgagtcttatgacttgtttattagtgtattaattaatttattttttcttaagaaccccaacttaatacactaccattgcacaatgccaaaaaataaaacttctacccaaaatctaaactacaattttttttaaaatcaattcataaaatattgctaagaacctttgctaataacctcccattgtggatgctcttagagtctaatgttagaacttcagtttcttcttttgtagccttcttcatcattcaaaat

SEQ ID NO: 12662 - DNA, 3000 bp, Unknown
  misc_feature (1)..( 3000): cDNA_ID_3026036_gDNA_ID_2214565_Annot_ID_185983 3000 nt of promoter + ATG
ccgaatacttgctttgtgatgtgttgcatatgtatgtagaaatctaagagctttcaattggtaacttgaatcgttatgaagattagtaagttctttttgttgagtgttttaattggtgtgcatgtatgtttttgcattgtaaatttcagttgactgaaatcttgtaaatttatttagtcttgtgtcgctgcatcttgcatgttaaggttacaaaatcaattttattagttggaaatgtaaaagtcagatgttctcttgtctctataggtcaggtttaatgtatatatcgtatgtgtgatacttttgttgaatttattcagttggaagaaactgtaaagcatgatgagaatggaaagcctgtaaaacgattgaggagaagagaaactttagtgcattcagaaaatgttgctggaagaagcttttggaatgagcactcctctcttcataaagatcttggacattttgcaaaagacattggcaaaattgaaccagattatgttaagtcgtttcagtttgagagtagattattacctttaacttgggttgtggttaggattgatggctgccattttcacaggtaatatgctttttagtctttgtttattttcattgttagacaatgtgtcttgcatggaagccttagacttgttaaaaaatatacatatgttccctacgatttccttaagctataatgctatattacaagtttatacacttctgaatgctatggtcggtctattcttacattgcgattgcttttgtgctctgctttaaattgtgatttattaggcaatgcttctactttttggaacttagaaaacatataagaacagtagttgacagctttgacaaacaaacgcctgcctattgcttgaatgattactatcgttatattgtaagtgaaactcatagagcttgctttggattttgatagattttctgaagttcatgaatttgagaagccaaatgatgagcaagctctgaaacttatgaattcatgtgcagtggctgttcttgaggagtttcaggatattgcctttgcctacggcgttagtgatgagttcaggtatgtaactctcagcccctttaaaccaagtttacatttctagatactaatcgagttcatctttggtttgcagctttgttcttaagaataaatctgagctttacaaaagacagtccaggtcagactagttttctatgcccttaagttttcttgttgcaggataaacttatctgtcttctcctaggttttcttgttcttttcagtctttataactttaatttctatatcttgttacagtaagataatatctgcagtagtatccttcttcacatcgacttacatgatgagatggggagattttttccctcacaaaaaattgaagtaccctccatcattcgatggacgagctgtttgctatccaacatcagatattctcctggattatctagcttggagacaagtcgactgtgagtatacttgtcttataaatgattcacttgtcttgtgagattgttgcttgatatcaaatagactcgtagtttgagttggatgctcctttcagcaattttgttttgtcttgcaggccatatcaacaatcagtataatacatgtttctggatgcttgttaagtctggaaaaagcaaaattcaagcccaggattacttaaaggtgctttgttcgagtagccaatgctccctcttagttcaatgaataaatggcttgtcacttacatttggctctgtttcagggtacccagacacgagaaaaaaacgagttacttagccagcaatttggaattgagtacaattcattacctgtaatcttccgcatgggttcttccgttttccgcctaaaggtgctacttttattatcatactccaaaatccttctagtgtttcatagcagattcttattattgtgaagaaaagaagggtcctttcaagagaaaccttttaaggcattcttgtttttacaagtggtctgaaatagttttaaacaagtggtctgaaataagtggtctgaaatagtttttacatttagacgcaggaaggtgttacagaggagaatggagaagtttcaggaaagcaagtggaagcagaagtgggcgtagactattcaaacattatcgaccaatgtttctggcaacaacatcctcacattcttagcttctcctaagacaggtattcattgctaccaaaaaaaaattccaaaccgaaaaccgaatgagattcagctcttattttgataaaccgaagctaaagtacaaaacaatcgaaccgaatggtttacttttttctttcactattttttgtttttttccattattttaaattaacctttttcaatttggtagttaattttttccttcaatgagagatttgggttgttaattttcctttgactggtaggataagcaatattagtgcttttcttttttttggtaaagtaagattcgtaaaatgtattgactaaaatgataaaagaggaagaaaatctcatccaaattttttgactaatatgttcatctaaggtaagttgacccaaagtgagatacattgtgttcttgcctaatgattactatagtagaatctcattccaagcacaacaatatttttaaattaatttcaaggggaattccctaattttcaattaatttgtatttataacacctaggtagatttttctctattaattgaaagaaagttccattactaattaattaattagagatttttaacttcaatcataggtgctaataacacaattaataatattttatttctttcattcctttttcaccattttaaaaaagtttattaattaaataaaaaaataagcgttacctccttcgacgatcagacgattctgccattgtcatacatttggcttagctcgtaacgtttcctctctctctctctctcgttccacaccactacattctccgtccgtcagaatcttcgaatttacctgttccgccaatcactcctcgcgta

SEQ ID NO: 12663 - DNA, 3000 bp, Unknown
  misc_feature (1)..( 3000): cDNA_ID_3026039_gDNA_ID_2214565_Annot_ID_185982 3000 nt of promoter + ATG
gagcatcaaattctgattttgatcataagttcataacttctgtacttgaggcttatagtcgaattcattgattttaagagcaaaaagaaaagtatttctggaaactatggttttgtgtattcgtctagtatttaaagttttgaaggtttaactatatattttgctttcaattattcaaatcccatttgaaaatgtgatagacgaaaaaaggtaagtggtaacatttttttttctttctaatcgacggattaaaataattgtgtctttttagtacccttttttccggttattgtacgaatgacttcactgaaggggaaaaaataatagttaaccataaagtaattactattctctacctagcggagatggtttatttcggtttagtcgaatggtttagtaccctatataaaccatttaaacttttaaagttgcaaagagaaacagaaacagagattgtgttgatcgtttttgaacactcgtcaagatttagatcaagattcactttttagtctttctctcgctcataggtatgtttctgcagattctttgttgtttctactaaatctctttcttagctcttttctcaaatctctgtctctccctctccgatcgatctcaagtaaacagtaactctgttcttatctctccctagctgctcattcaagacttgctattttcatctttttgtaatgcttcctgcgttttaccctaaaaacgaaactatagaagagacgagatagagattctttggaaagaagttaacatgaatgatgattgggattgggagggtttttatgatgagatagaggattttctcaagatattcggagaaccagaggtaaagtcttgttacattttcattgtataactagatcccacatttgtttaacgattcaccatattggttagacaccagcgttactaggagatgcagaaacgacacttccgttgaacatcaatcctcgtcccgagcctgtaccatctcaatttcaagtatctctctttcctttggtttttcgtttctgtcttcaacaagtttccatctttctaacacggtttatgatcatttctcttagtaccaaccaccgccaccacaactgccgttatcgtctagtttacacgctatacaagatcttgatcagtctaggcaatttggatacaacgagccaaatgtttctttatgtgaaacaagcaacagaactgctcagtttcaacgtggacactttcactatcaggtatctaatcgatacccttcgaaaactgctcaaagtgtctatcttttataagacaataagttgctaatatatatgtatcatcatttgctttaggaactaaacacaccatttgcaacagagagcttaaattctttattggcctccactgaagcgaaccagaacttatacacagtgccaccacataatttcggatatggtgagcccattggttctttatatgaaactagtaacagaacttatcagcttcaacgtggacactctcactatcaggtatcatcaaatatgatcttatccgtttcatctgctcaaaagtgtccatgttttataagactatgagttggtaatatatgttgttatcatattctgtaggaactatacacaccatcagttgaatttcagacgttattcccactgccacctcttaatattaatttcaatgagcctggtggtggtggttcttcaattgctgctgattctagtcaacaacaattcagctcaaatctacctatgtggcatgaaaatcagttgaacataggctcttttgactctggaccttcctcttctacagtggtaatgtcaaacatggacctatccacattcggtaaatcctctgaaatttgcaataaagcttacagatttgatatattaatcacacttgtcattaggtatcatcatcatcatcatcatcatcatcatcatcagaaaaccaacaagatcatcatgaacaagttgtaccaccaaatgaacttgatccattgaccatccagagaaatcaataccgagaggaagcaaaacagagatattttgagaagaagaggagtcgcaagtaagtgtttcgtttagctttctagttagggctgggatttcatcttcttattattgaggattttggtgaatctttgcagattcgtgaaggcacaccgatatgaaagtcgagcacaaacagctgcgaagaaaaaacgaagcagaggtagatttgtgaaaaacgatgacgaattcgacaatgaccccccagctatacagtgattgttctacttgtactttcgaaaccttggtgaaaaatttgtaaattatgggtgtcattgtcaagctttgttttttttttttttttttttttgtctctgatggtaccttcaatgtcacggaacatagaacttatttactacttctccacttaaaataactaaattggcgaaatgacccctcaatttcttcatttactttcaatgttacccgaaagtttaattttcttgtactttcgactttttcatttctccaaattcaccaaacactctctaattatcaactctccccacggccgttgccgccaacaaatccgccgcgaatccccaaatgtaatctccataacctctactatatcgacactgtgcagcttagagctgtcaaatggtccagcagcaaagccaggagaaactggaaacctcttagaccatcattaacgcaggcctcttaggtgggtttttagggttgttttgtgattaaaattaaattgcaaattgggctaaaatttaagaggcgctcttatataagagggccaaattatattaagaggcggtgacgtggcatgggtgagttgtctgaaaattgaagaaaaggaaagaaaaaaaaacagtcgtgggtttttgtttcttcagtctgtcgacgcttgctctctctctatttatcgaattccccgacggtgaacatcaccagacaaggaggaggagactaggaagatcgattttatcaatctcaattgaacaag

SEQ ID NO: 12664 - DNA, 3000 bp, Unknown
  misc_feature (1)..( 3000): cDNA_ID_3026045_gDNA_ID_2214565_Annot_ID_185979 3000 nt of promoter + ATG
cgttcgtgatgactccaagctgaagcatgacgtagacaggaacatagttggtcaacattttgtcttcatacgtcgtcgtattgaactctgtcgcctgtgttttcaagattaatgattcaaaaacacaaaaccagagagttaacagaaaaaaaagctcaaagattgttgttactactaacctttggttctgttgcagaagaagcagtggcttgatgcgttcttagagatccctccttgattgataatctccattggactcgttttttagtttctttatcttgtacaaaaattgaagatcctttgtggagatttcttccgttgatcagattagggttcatcattcctaatacgcttgtcatggtaccttgcacttgacggaactacaaaaatcatttactggaatcattatgatcatacacacacaaaaataattttttcagtgaaattaattaaatttgctaattttctggcgcgttcgtatgctatcaacaaaacgtggccataattttcttgcccaatttttttttttttttttttgtatttttgtttagtcacgtttttattccttgttttgtagtttcacggaaaatagaagaatgaattatcatataaccaataaatatctatgtgatactaggatagtggggtatgcaacattcgatcagtgtccatgaaggttctccagttactaatgaaaaatgtatgctcctgagacaactcatcgtgccttgataaataatcaattccatggacagtggtcgatataagatcctctgatttctaagaaagaccagacctctgattacatatcaccgacaacttctgcttctttccatttaagatatcttatgatttctaagaaagaccagacctctgataggactgaatctttcaaatacaaagtcatacggaattttcatgtgactagtggcggctacatgagacgacttctcatccggattatgaggctgaggtgaggagaagaaaaatacttcatcgttgtttttgcaggcaaacaagagctgtgggcgagccaaagatctggtcaagaacatcacggtaaaatagggatggccaagtatggaagcccatagctttgataacatctcgctataaattttttttttttttgaaaataatattaaattatatttaaagaaaaacatagcgtttgtacaactagtgcatcgaatagtagaaaattttagcagaaaattagaaacttttacacttagatccttgtttcaaaccaaacttgtaatccgttatcatagcgtttatcgcctagaagtcggattgtggaaaacggtttcggatttgtttgttaatccactcgatgatccaagaaactgtgtgtggagctttcccatgtcgtcgcctatttctccaccattaagtgaggtccttggtcgcatattgcataggcatgcaagacgatcctccaatgataaatcctagggctttgcggcttcggctctgctcttccacgatttcaacttatttttagaaaaagttgatctcaagtagagaaaccgaatgacgtgaagggctgagaggaagcccatgtaggacaaaatcagtctcgtttatgttcggtcgggctttttcaccaatctggttgaccactatcgagtcattggtaccgtaacaacaaagaagtaatacgtctgcacaatatgcattatctaatccgtcgaccaaaacaaaatggtgttggcattgacttttttttcttaacgtcatggtgtttgcattaacttatcttttttttcccttcacgtagaaattttcaaatggtacttcacttaagaattttagtttttttttttaaacatgtctttctttttagaaaaatcaactcggcctaaccccgacgcacaagaagtttattatcaaaactacgaacaactcgataaatctagacaataaaatattcatcatgaacctattaggaaaaaccgaattcaaactatttttcttttgtacctttcttactttatatgtgaaatattttagctttttatcaaattaacaaacgtaaacaaattaagtgaaaatgattataataaattaataatgttctactattgtcaaatacgaaatcttatgtaattgtcttccatttttggatgatttttcaactttacatgaacaaaatctagtactatattaagatttaagagatttgctttgataagacaaaagaattgttaaagtcaattaacttgcataagccgttgaccaaaacaaaaacatttgttttcttaaccaaaaaaaaaaaaaaaaaactctttcgatttgtttatccctctgtctcgctttcattgattattgtctttgctattaatctaatcatcacaacgtttctcttttcatctaaaatcgtttctctccattaagacttttattgattgttccttttctgggttttgccttccaagtcttccttaattcttcttacaacgtaaatactcatctcgtgaattgttcataggaggaaactcaatgcaatgtacactttgacgtttagggaaaaaattgaagacgttttttttttttgttaatgcgagtttttcgctaaaatacaaaagagggttttaattgaatctttctcagccgcttcaataaagccatcgacttttttttttgtgattcagattgaatcttttgatgggtttactttatttttattttctttggtatcaattgggtttaacatcatctcgatgcgattgttcatgttgagcagtgttgacgccttcttcagagtagcagcaagctattggtgaagaaagtttcctgttttggaaggtactcatttgtctttcttcgttgtaaagtctttcactttcgtggttggttattagacactagttttagttgaatttcgtaagagttaggttttaagctatgtcagttgttttgcgattggtttcagaacaaaactagagacagagaaagtttttgtctttggcatctatgtttgggggtgtcttgtct

SEQ ID NO: 12665 - DNA, 3000 bp, Unknown
  misc_feature (1)..( 3000): cDNA_ID_3026049_gDNA_ID_2214565_Annot_ID_185978 3000 nt of promoter + ATG
agatattgaaagggattatcagaataatcacagctgagaaatacaaaaccacctggaaacatccgaaaaggtcactcttatgaaaaaatgaatcaaaatctctttgaaacaactttaagagaagatgcatctattacactggttgagatgcagccaactttacatctccgtgcgagtatagatacagataggcagtcatgctagtcaatataattattgtcatccacctggcacactgtgacatcggttacatagatgtaatcaaaatatatacaaatgatctaactaagagttgtttaccttccatatctctctgtgactaagatgatctgatcctagataaaagattgctgcataatctactccagaccgagaaaaaacccacaaattaacaccccagagccagaccatcagcgtctgaacaaaatagcatacatgaggaaacacacttgaagcaatttgactttactaatttgagagcagaaaagtaacttacaatgagaaggagagggttataatacagaaatgtctcataaaagaacagttctcttgtctctacgcccattttcattacagattccaatccaacctgcaaattttaaacattgttgtatattaccaagactgaaaactcaaacaatggcttcaaatcaaaatctaagatcattgtttgcaagaataagagttcaaattttaacctttccacaaacataaagaccaccaatatacagagcaacctggagaatcaagatagcgaatctcaaatcagctagttagatgatataaagcaggaagaaaaatttgatagtatggaacaatcagcgagaatctaagaactttgagtaaatgaacaaaaccttgagacttcgaaggaatataggagtttgcaatttcgcataagtactcagaagcatacttgcagtcttcaagtcattatctcctgtccaacaccacaaaccatccagaaaaaatgtaatcaaaatcactaagcagaaactgatttttctagtagccaagatttattataaaaacaaaaactaaccgagattagtgacgatgtgtctacttccagatttgcgcaagtgaggattattgacaggcatagacaagacacccccaaacatagatgccaaagacaaaaactttctctgtctctagttttgttctgaaaccaatcgcaaaacaactgacatagcttaaaacctaactcttacgaaattcaactaaaactagtgtctaataaccaaccacgaaagtgaaagactttacaacgaagaaagacaaatgagtaccttccaaaacaggaaactttcttcaccaatagcttgctgctactctgaagaaggcgtcaacactgctcaacatgaacaatcgcatcgagatgatgttaaacccaattgataccaaagaaaataaaaataaagtaaacccatcaaaagattcaatctgaatcacaaaaaaaaaagtcgatggctttattgaagcggctgagaaagattcaattaaaaccctcttttgtattttagcgaaaaactcgcattaacaaaaaaaaaaaacgtcttcaattttttccctaaacgtcaaagtgtacattgcattgagtttcctcctatgaacaattcacgagatgagtatttacgttgtaagaagaattaaggaagacttggaaggcaaaacccagaaaaggaacaatcaataaaagtcttaatggagagaaacgattttagatgaaaagagaaacgttgtgatgattagattaatagcaaagacaataatcaatgaaagcgagacagagggataaacaaatcgaaagagttttttttttttttttttggttaagaaaacaaatgtttttgttttggtcaacggcttatgcaagttaattgactttaacaattcttttgtcttatcaaagcaaatctcttaaatcttaatatagtactagattttgttcatgtaaagttgaaaaatcatccaaaaatggaagacaattacataagatttcgtatttgacaatagtagaacattattaatttattataatcattttcacttaatttgtttacgtttgttaatttgataaaaagctaaaatatttcacatataaagtaagaaaggtacaaaagaaaaatagtttgaattcggtttttcctaataggttcatgatgaatattttattgtctagatttatcgagttgttcgtagttttgataataaacttcttgtgcgtcggggttaggccgagttgatttttctaaaaagaaagacatgtttaaaaaaaaaaactaaaattcttaagtgaagtaccatttgaaaatttctacgtgaagggaaaaaaaagataagttaatgcaaacaccatgacgttaagaaaaaaaagtcaatgccaacaccattttgttttggtcgacggattagataatgcatattgtgcagacgtattacttctttgttgttacggtaccaatgactcgatagtggtcaaccagattggtgaaaaagcccgaccgaacataaacgagactgattttgtcctacatgggcttcctctcagcccttcacgtcattcggtttctctacttgagatcaactttttctaaaaataagttgaaatcgtggaagagcagagccgaagccgcaaagccctaggatttatcattggaggatcgtcttgcatgcctatgcaatatgcgaccaaggacctcacttaatggtggagaaataggcgacgacatgggaaagctccacacacagtttcttggatcatcgagtggattaacaaacaaatccgaaaccgttttccacaatccgacttctaggcgataaacgctatgataacggattacaagtttggtttgaaacaaggatctaagtgtaaaagtttctaattttctgctaaaattttctactattcgatgcactagttgtacaaacgctatgtttttctttaaatataatttaatattattttcaaaaaaaaaaaaaatttatagcgagatg

SEQ ID NO: 12666 - DNA, 3000 bp, Unknown; identical to SEQ ID NO: 12659
  misc_feature (1)..( 3000): cDNA_ID_1808383_gDNA_ID_2214565_Annot_ID_185977 3000 nt of promoter + ATG

SEQ ID NO: 12667 - DNA, 3000 bp, Unknown; identical to SEQ ID NO: 12658
  misc_feature (1)..( 3000): cDNA_ID_2709354_gDNA_ID_2214565_Annot_ID_185975 3000 nt of promoter + ATG

SEQ ID NO: 12668 - DNA, 3000 bp, Unknown; identical to SEQ ID NO: 12657
  misc_feature (1)..( 3000): cDNA_ID_3026055_gDNA_ID_2214565_Annot_ID_185974 3000 nt of promoter + ATG

SEQ ID NO: 12669 - DNA, 3000 bp, Unknown; identical to SEQ ID NO: 12656
  misc_feature (1)..( 3000): cDNA_ID_3026059_gDNA_ID_2214565_Annot_ID_185973 3000 nt of promoter + ATG

SEQ ID NO: 12670 - DNA, 3000 bp, Unknown
  misc_feature (1)..( 3000): cDNA_ID_1808457_gDNA_ID_2214565_Annot_ID_185995 3000 nt of promoter + ATG
ctgatatcgatatgttacttgatggatgtttctaatgaaaatattgcttgtaggtgagaaaagaaagaagttggaagaagagaagggaattattatacggtttgtgattggtcataggtgagagtttgaatcttttagtataatgtcagatatcgaatcaaccacaatgttcttacatagtttctgagatgattcatactcagtgttaattttatttggcattggttctttagtgccacggctggcggaattctagaccgatccattgaagcagaggacaagaagcatggagatttcttgagattggtatttttttttctcaagtttaactctcgcgcttttggtgtccaaatccttgaatattggtttctcattctctgctactttcaccaggaccatgttgaaggataccttgagttatcaggcaaaacgaaaacatatttttctacagctgtttcgaagtgggatgcagagttctatgtcaaagtagatgatgatgttcatgtaaatatcggtaagctgaacaatcttcctacattcaatttctatttcccagtttgtatgttgctcacatcaataacgtggtcaattgttttgttgaaaatatctgcagcaactcttggggaaactcttgttagacacaggaagaaacatcgagtctatctcggctgcatgaaatctggtccagtactatctcaaaagtataatcccatttctctcacttaccttctttttgaatctctttctcagttttgttttaactcacattttgtctatggagcagaggagttagataccatgagcctgagtattggaaatttggtgagaatggaaacaagtacttccgtcacgctactggacagttatacgccatttctagagacttggcttcttacatttcccttaatcagtaagatttgaactcctttgtaccgcatcatttatgcctcattctccatctaacttctcttacaaaatgttccaggcatgttctgcacaaatatgcaaatgaggatgttacattaggtgcttggtttatcgggcttgatgtgacacatatcgatgatagaagactatgttgtggcactcctcctggtaccttccttcaaatatctatagactcagttcaatacatcttagatgattgtgaagtggtaaaaggttaaacttagttagttctatgcacctaactagaatgtttttttttaaaacaaaccttaaccagaatctggatgtaaatggtaatcatatgatatacactaaatatgattcttggtgaattgcagattgtgaatggaaggcacaagcaggcaacatatgtgtagcttcattcgactggacgtgtagcggtatctgcagatcagctgatcggataaaagaggttcacaagcgatgtggtgaaccggaaaacgctatttggaaagccagattttgaggcccttccactacatatacatagatcatataaagaagtagttgttttcaaaccaaacgatcggtcatcaaatgaatgatcacccggaaaacaactcttctccttcttcttcatattctttatgaaccaagaagatagctacatttgttgtatatcatagtaacttgcatagtagagaggactatagagagataagtacgaaatgaaactctagcagagatagatagcgtttgcgtttgagaagcgtttccgattagtagaaggaaattacaaaccaaatgctgcagcaaacgcgattgcttctttctgattttggctgtttttgttttttgtgggagtgaagtagcttgtgggttttatttagatcaatgcaaagtaacgaatgtttttaatatcttgttacaaagaaataagtatgttatgaggtaaaaatagaacagtgttttatcaaagttgtgctctttttagtttactctgtgccacacaatctctggttcaatggtggtacggagatggcggagaaggcaaatccggcaagttctgacacctatttaaccggagggactgaaattttgcatctttttctgctcacgtagctctcgccaatgggggagacgaagcagggtggctcaaaaaggttcgggctttctctcaaatgtgttgtgggttgtgttcagaggaagacaaaattgacggatttgatttggtgacaaaagaaaagtaacgcttgaagagctaaaattgaaccaaacaggaataaagtctttgtgtctttcaatgattcacgagaaatttgataggagttcctgtttctttgttccaattttggattcttctgttaaattgtttccttttgattctgttttgggaatgtgtgctcttcaccaccatttacggtctttgtattcttctgcaacgtttattatttagagtctcacttctcctagactcctactttgagttttgctctttatcacctttctgtctcctctttttacataagttctttgcaaagtttggttttagtttggatccaacggtactgcaatttgcgtggtatgtttttcagtttagaagttttttatgtgattgttgtgatcaatttgcgtggtgtgttgttcaattttggagtttcttatgtgattgttgtcatcaatgaatgttataaagagtatggttttggtaaagaacatatttttctcaaagaagtaaaggcttagggaagagctatagtgagctaaaatggaaaagaaagtatggtcactgagcactacatgtgaacatctatccaacaaatagatagaaaacaagcggtcgggttctttagtttaaagtttagataagtatcattcccttgatagactcaacaacactgttccactattctaattttaagtctttgtccgtttactctcctttgtgtttaagaaacctccttttatagagatatttctcaccattttttatctatatgcagggtatgatataacatctagaggatacaagaggtggtcaggtgcaaaagattgagttttttttataggagagtgtttacgactgaagct

SEQ ID NO: 12671 - DNA, 3000 bp, Unknown
  misc_feature (1)..( 3000): cDNA_ID_2709401_gDNA_ID_2214565_Annot_ID_185993 3000 nt of promoter + ATG
tctacgttttaccgcgatgaataaaagtaccggttgattcaccgttttgaattattccaccatttaccaccattggtaatggtataatacatgtatagtaaacatgtgaaatcaaataaatgaccataaaacttgctagaattgtaaaatgatagcaaatgttgtatccagtataagatgtaaaacttaaacaacctcagaataatgttcgatgatggatgtatataacgatcgacttacaaaaacagaccgaaatatttgctaatgaggtgaagtcatgtggtattgtttttggacacaatttagtaatttacacaaagtgaggaaaaatcatagttccgtggatgaaactcgtgccgttggatccaatgatcattactttaacgcagtaccacgtgacggaaaacggaaaaacgtcacatgattgagcggatctaatgaactgaacagccaaccagataacgacacatgtccaatggcagaaccttgtcacgtgtactttattccgaccgtccccttttgcaagtgcccctcccgtcactccgtcagaaccgcttttctcttctctaacttttgtttgtttaatgttttgattcctagagattactacatgcttcttcttgttttggtttttgatcgagcgtattgttcataaatcgctaaacagcgtgagaattagatcaatttataatttaagtatatgatctatcatcgtgttgatgatttttggtgatattataaatgaaaactgtctttaactacccaacaaaaagctatgcaaacgagtgaacgacttgggaatgcatgtgggagttgtttgataataactaaatttcattggcttagacgctttatgtcatgtgtcacatgtttatactattatttctccactaagaaattactatttgttttcgtcaaatagatggcaacaatcattttaatgccacctcaatgattgtttctacgtacggctaaatgcaatcaattgcactgtatatatcatatatgcatgtgtttgaagtttgaactgatacatagaccactttaaactttctttcccaagtcaaatttattttgagtttattagcaatcacagtctcccaatttcgtcaaatatgatatgaagttgtattgatcttaaattccgttatcaattatatagtttaaaaacagaagttgttagaaaacaattcataaatttttgatccattcagcataacaaaggaagatatcagaaaagttttcattttcttatattcattcattttcatcttctctttatttgctcatgtaaatttcaaatacttttcttgatagttacaaaaagttttgtagttggaacgaatataaaaacgcaagcaatctaattagcttatgctgccgacgtgtttgtcccaagaaaaagacaaagtcagtcgtttcacgtcacttattttgtcaacaataaatcaataatactgttaaccaatattgttatagttagtcacgtataaacttgcaagagtcaaataacaatcactctttaggagaacagatttggatggaatatatggtcctatcccatactttttctttaatattggaattatgtgtatcgccctaattaacccccgaacccagagacttcaggctagctatgatgaaaatgatattcatggtgtaaataattctttttttttgtttgtgaataaaaagtttagttgaataacgaatcctatcaagatcatgtgttatctgctgagaaaagctcaggaccaccatgccctttttcatcaaccgccttattctttcaacctctacgctacacccacaccaaaaggaaaattctcgaaatatagattttttcatgccacaaacatatatgtatatttaattctccctttgagacgtatgataatgggatgataatcttattggtatatatataatattcacaacagtgtaaaaatcaccagaaaggcaaaaggcaaaattttggaatattatagatttctagcacgaattagtagtttagtacacatcattttctttagtggtgtcagatttggtgtcctaacatcgcatttgttacttctatcaattattatgaaatattttcaatcaaatgaatattaattttctttttttaacactatgaatattaatttttactccaagaaaaatcaagagattttttaatatacaataactaattaattggcaactatatcaatctcatttgcatattgttacaatatacttttaaattatcttgaatttagtaaacacatgtatatataatataatttttgaaaagataaatataaatgtgtctcattatgcacctttaaaaactaacaaagcaccaattataaatgaatttttagttttttccgcagaaagaaatatatatctttactagaaaaatttgaaaaattaggtgggtgtctgtgaaaatatgagtcataaagacaagaaataagaaagacatgagatttgattaaatgaaaaaaaaaaaaaaaaggcatacgattgttatcaaaattacacatcataataaattagttaggttttaataaaaaacggtattgatagggatagttgggtaaaatccaagaaatgtcagcccagagttggtataagtataaaccggaacggttaagagttcgttcttatttcttcttcttcaacgacccctcctcttccactcttacgtcaaaaatacagagccagagaaagagaaagaaagagaccaagaatctatttaattccatctcttattatacaatacgaaactacagagcaccacttctctttcaatttctctcggactaattgaaaaatctcaactttattgttattaggaggctctgaagattgatgagctacttctttttgatgtatctgaatttaacctgatttttggttatgattaatcttatggagttgattggattaaattagctacttttactcctgaggaatctctattcttcctctggtagctgaagagaataaata

SEQ ID NO: 12672 - DNA, 3000 bp, Unknown
  misc_feature (1)..( 3000): cDNA_ID_3026009_gDNA_ID_2214565_Annot_ID_185992 3000 nt of promoter + ATG
acaacgagaggatatgacatgacagtcgtcgttacatgccacattcattattttttgaaacttttatcaaaaagtaattcttttaggccggtttttaaagaaatgtagttgaaattgtttataagaaaaaaatcatagaataacagtccattgatgcttgtgctcatgtgtcatgacatctgtttgaaggagttagttcgaatgtacttatattagttaacaagctgatcgaaaaatgaatttgatattggatcaatgctatccaaatttatttaataacaaaaaggcttcagatctctccttgataagtgttctccggagcctatggaatccccaaatggccaaatatctttctgtcttcttttttttctcatgcactttttttgttcttatgcacttattatgtttatctgtatataatgtattgcatgaaattttacattatatttcaatactacaaaacaaatttgagtcaccaccacccaatactggtagtgtatatctatatatatattatattatttacgaattaataaattatattaatcaaatctagaatggcataccaaaaagtgatatagtgactagcgagttacgttacatatggattaacatgtgcatgaaaattatacatgtatttatatacaaatacacatgcaccaataacttaggaaaaatagtgtcattaaagtatatacaacgtacatacgcaccaactgcacaggctgtcaatttgataaatcataatgcattgtacgttttttctttttttgcaatgatatatgtaacccggtttcgaccacgcgagtgaacaactaaacaaaacccaactaggtcaaaatacattcgtttccccttacaaattatacaatataatggcagaaaatttaaaccgtttctgaatctcaaatttacaagaaccaaatattagcttgatttggatgaagccggtcaatttatataggtttacttcagtaagtaagagcctaaaatggttaggcttaggtgctttgcttgtaagaaaggagaatttgtactttaaatgaaaaatataggaacaacctaatttatatgtttggtttggtctctctggtcttctaacgaactctagttaaagctgccatctccatatgtatatatgccgggttcttgttaatacgcctttgtcaaaaggtatttttgtgtgtgttacgataactagcatagttcgacatttgaggctgagtttatattttgaatccaggcacagccgcacattcaaacttgataattctttacttaggcaatgcatatgtgatctcattcattatgcattcatttatttaccgataattctttacttaggtatgaatcttccaagaaagtcttagtcaaacttgaatcccgctggtgagatcgatgtggcaaataataaagaatctgcatggtggaaatatatttaacggtatacagtctaatagtcttttaccatttcactaatttttattaaagttgtacgtacgagaataatcatagtcataaatattatgaaatagaaaatcagatcaatgttgtccgtagtttgctttataagtgagataaagttacgaaagtgtggtaaaatttgtctcggagagtaacttgaaacgtaaagatgaaacaaagttgttaaagatttgattcttattagatgtgccacgcttttagagaaccaaaaacgatcatgaaataaattcgctgtttctatcgagctctttttgttatacattactataatactatgcggtatagaattacgtaccatattgtttttatcaaatagttaataactgtattaaattgctgataaccaaaacaaatttggtatggcttggttcttcggttaacgttttcagtttttgttgttgttgttgtaatttcataaattattaagagaccactacattattaagaggccattttacatattctattaatatatctgtaaaaatctactcgttcgacaaatttataaacttttatttctttttgaaattaccgttttgccaaggttttttgtcgacaattatgtgcatatgacttaaacgttgatcttacttgttttaaaactcttaccgagagaatttactctttattagaaaatttacttcctctatatcttaacgttgaccacatagttttggagtccaaaaatactgaactttcttagtcacgatagtgggcattgataaatgcagcatgagactatatatcactattgattatctgctacaacgatttaatgctcttattgataaataattcacaacttcaatatttttgtctcagttaaaattaccaccggtatggagtcaatagtaagtgatgcccaaaacttgccataaactttcacactagctctcactctcaatggccccaaatcccttaattttatgcattctttgtcaattacaatatttttttttgtcgtatatacatctttccatatctgagtccacatgttgatatattatatcaaatatttcttagtggaaaactcttttaggatttggatatttagcatagttttaaatttgaattgcccttttttaattacgtttatggttgaaactataggtggacttcttggaatatacgtcatgtaaacattaggtcaatcaatcatatcacacaccatacaaaatattcaattctctgctataaaataagacaacaagtgaaaaatactacaacaactaacacaagacacaagacacaagtggtgtcgttgaaattttaatatgcttcaaagacttttgaggtttttgggccaaggaatccaagtttatgtctacacttacaaatgggcctgtttgagtccatagccacaacacgtgtcaggatcttgacgggattctaaataagacacgtgttaagatcttcatggccctttgccgccgtcgtcaccgagaaatgccgcagacagatttgctccgggaacactaacgaacagtttttcgaggttagaagaaaaaaaacatg

SEQ ID NO: 12673 - DNA, 3000 bp, Unknown
  misc_feature (1)..( 3000): cDNA_ID_3026013_gDNA_ID_2214565_Annot_ID_185991 3000 nt of promoter + ATG
tcacttctttccatccataaaaattgataagatccacaagggcagacatttggtgggcatcattaggtgtagtccgaagaaagaagggaaattggagggcagagagagttggatcagttgctgcaaatgagacaagaggaaagtggagcccttttgcaatatcggaaattgtatgagcaacagaggatgaaattggaccgatcatagccaccacttctttctcaagcaattcaaaagctgcaaaacaaaaaccactgaagcttaaaccaggcccttagtggtaaaaccaaagttttgtttccacttatgtacaggaaacacaggtcctagtaacagcctgtttagggtatgcggtctatattgttctatgcattattagcattcggaacccaaaatatgtaccaataaaaaacggattaaaacgtaaatcgatgtgccaatcatttccaactatcacaaaatgaaatattgttgctactgatgtgcattgaccgctttctataatatgtttgatatactgtatcagccatggatgagtgtcacaagtgtttgaaacacaaaagaactagaagaacagtcacggtacctccaaaggacccacgaaagacattgcaggcagaatcctccattaatagccgtagctccgtttctttgagaaagcttttatcattgttcacatcggaaacagctgcctctagagctacttttgcagctcttccgataaccgaatcaaaagcaaaaacagcaccgatgttcaccagttgaggtctttggcaatccattggaaccaccagaatgaccacaatcagtgccgtaatagcgacagatgggtcaatgcccagtcccatggagataatgcaatcaaagtaaggaccacttcagatagtttgtgttggaactagaaccatctcatttaaatctagcaactcttcattcagcattgaggatgagaagattagagaactaagcaaggtaaagtttccaactttgacctgtagagtcaatgcgattagaagacgaatcaagatctaagcgaagagcaatcacaagtcaaaccaaattgattattttagctgaaaactagcaacaatgtggatatgaagacttatatacacaaactcatccggacagaagaaaaatctgaaaaagagtttttacaaattcattgaaattaacaacagtgagacattctctttacctctttgagctaccttctggttctctctgcggaatatacgcaaacactttgtaggcataagttaaaaaagggaaattttacgacaacgcaacgaatttttaacaagagaagtcaagaactatcttttttaaaaaaccatgatttgacaggagattactaaaggaagagaaacaaaactagagagatcaaatcatgcccagaaattcatccatcattcttcttcttctgagaacaaaatagaagagagaaattgaaaaacgtgtgactgaagtgcttttttgattcgagctcacaaagtcctatctagtctatatactctatagtcacagcagccgtttgtttgtatttttgttttcagtggggcccatcattattgggccctacatgtaacggcccattttgttaagtttatttaagattagattacaatataaatattttaattgccatgtgttaatcattttatttcttctcaaaagtttattctcttaagttaatttgtcaatgaaatgttaatagtatttcattttatttttgcataaagagagacccgtagcaaggcaaaatttgagttggcgttttttattcataataaagatttttaggcggcaaaaaactattacataatgagattttatcacttattcatctaataatatttaattaaattacatatgtgtttttttctagctatgtcatttatttttacaatttatataaaattttgatatgtttccatgtatatatatattttaataaatgaaaactcaatccagaaaacataaattttgattttattttaaattatatgtttttatttataatttgttatctcttttatacattaaggtgtttttgcaataatacagtcttaatttttaaaaattacaattaagccctaaactttgtaaatgttccaaattaggaaggaaataaagaaaggagacaacttaaggttctcttattaaatgccattccctttctttcttacaagtcacaacctctctctctctctctctctctctctctctctctctgcgtctttctctttctctctgtctgaagttgagaacacgaaccactgaaaaacccgcgaaagactcgagcacgaaccaacaatggcggaacccaaaaccaagtatgatcgtcagctaaggtgcactctttctcctcccaactctctttctcttcttcaacttctctgtctctttcatcattcttcttaatttcgctcaaattgtgatgattggggataaattcataggatttggggagaattaggtcaatcagctcttgaaaccgcgagcatatgtttgctcaattgtggtccaactggctctgaggctctaaagaatcttgttattggtggaatcggaagtatcaccattgtcgacggatctaaagtagaaattggcgaccttggaaacaatttcatgggtataattctctctttttcatctttcttaagcaatgcgtttcttctatttgctgtttattgacatttattgatgattgttgttgatgtttcagtggatgcgaagagcgttggtcagtcaagagccaaaacggtctgtggctttcttcaggagcttaacgattctgttaaagcaaattttgttgaggagaatccagacactttgatatcgacagacccatctttcttctctcagttcactctagttatcgccactcaggtacattatgttgaggattagatagtttctagtctttgttttcagattttcacagagcgtttgccttattagtttgtcatgtgttgattgtagctagtagaagattca

SEQ ID NO: 12674 - DNA, 3000 bp, Unknown; identical to SEQ ID NO: 12655
  misc_feature (1)..( 3000): cDNA_ID_3026063_gDNA_ID_2214565_Annot_ID_185972 3000 nt of promoter + ATG

SEQ ID NO: 12675 - DNA, 3000 bp, Unknown; identical to SEQ ID NO: 12662
  misc_feature (1)..( 3000): cDNA_ID_2709371_gDNA_ID_2214565_Annot_ID_134939 3000 nt of promoter + ATG

SEQ ID NO: 12676 - DNA, 3000 bp, Unknown
  misc_feature (1)..( 3000): cDNA_ID_2709381_gDNA_ID_2214565_Annot_ID_134942 3000 nt of promoter + ATG
aaagacaaagagattttaaattcttaaacaaaaaaatagattttggtttttcaaccagctgcttacacttttcactatagtctataagatttttatctcctaattttatggatttaattttgattttcttgaatattaaacttatattgtgttctgaagtatgagaaatatagtgactataagttttgagtgatatgatactatgttaggttaatttagattaccaaataatggaaccaattatgttatagactatttttaaagtatgtatagttttgaatgatatgaaatttcacataaaaactaaatttttatttttgatcataaatttaaataattgtttcaagtttgactattatgattaattcttaggtcaaacttattttagatgacaaaatcctaaaaataattatatgaccggcgactagaatttgtacttttggttcttatgttctatctagtgtcagtcgttacgtcactatccatatttaaaaatgtatattgaacatattgatagaaaaataattgactaatgactaactatgtttaaggatattttggataatgtattgactagctattaaagttagttaaataaattttaccaaattattatctattgatatttgaatatgtttaataaatagtagtaacgatcgatcgagtcagtaattctattttggacctttcttatttttttgttccgccgacttttttctttcttattataaatgatcgatctagtcaataattattttctagttttttctttattttgctcactttatatgtgtataacgatctatatagttaataaaagcatagatttgtcgtttctgtatttttattccgtacatctcatatctacaaatagtattattaactagatcgattaatattacaaatcttctaacattcaaaaatcaattgatggtaatcattatcaaaacaactaattatacttgaatttttttctatgataatatgttataaactcttatcttattttactctttcctaaactatttgatggtccatttcactatgaaattcaaatcttaaaattgaaataatcttacattatttctcctaggctcataccatataagcataatattttatagaaatctttgtttcaaattaaaaattttaaaatgactaaattaaatataccaaaaatggttaaaaatatttcaatgacattaaatctaaattttattatatttctcttttaatggagaaaacttaatttagttttttatttatttaattagaattatgtaataatactataaacgtatctggaaaaccaattgaattgagacacatggatggaaagatagaatctactttttttattatttatctttttaacgtgtagctttctctccctcttcttccagagtgtagggttaagtaagtgtctctccctctctacctataaatatgtgtgtgtaaaccactcaattcactcgcactctcagcactttcatttacctctcaaaactgcttcataaaacctcgataccatctaagagttactcccatatttcatcgcccatgtaatacaccaaccattcattgattttctcattaatctcaaatatatcattggattcaaccttttcattcgattgaatttcgttgcaccatatcctctgtatatataaaaatatcgagttatcagtagcatatttgttgtatctgtcatatacatcaaatgatgaactgattcttgtatatctttctactgggaacgaaattttgttttaatattttttttcgtttttgtagaaaagagtgagccaaagatatacggagggatagatcaagctagcaaaggaacgaaaaacataaaaaagatttgatttttctgagtttatcacagccaaaacttcaaaaggtattgttggatctcttcgttatcctttgtattttatgtttatgttcttaataatgcatctacgattatatactttatatcctaccaaatacaaagatgataacaaatagtgggaaaattttaatacatcacacacaattattctttgctgcttggtcggaacatatacagatgatactctgactcataccatttttttttttttttggtctcttcctgtatacaaaaattgataatatatctgaagggagaaaataaatgttgagtgggagatctttacaaaactaattttaaatctatcaatttttttaaaaaaatattgtttgattaaaaaataaaataataataagtctatcttcgatctactcttttttttttttttttttttcgatctacttatatatggtgattttatttgttttgggcaaatgaatccaacagttctctttttgtattctcttcctctatagtccctccttgttctatatttagatctataaattgtgaaatcctggaattaaagaacaattaaatcaaacttctaaaaactaatctcggagagttcataaagttgatctccggttagggcttgtttcttaattcatgttctttgcaaaatatttttggggttaatttaatagtctatatatatataattcattttgtttgggttgattatttgttaatctctactggtgggttttttttattccaagtttccaactatcatcctcaattactttgtcttttttttttttgtctgtttctcttttatctataagatcttctagaaaaagaaaataaagataaaaaattggttgacttggaaaagcaaactttttgttgtcaggaatttagtgaaagagagtgtactgttttgtctgactgcaaaaatccaaatcttggaaaaaaatcctttttgattcttgtactcaagaagaaaagaaaagaaaaagaaacctttttcacaaaccctaatttctagatcttatgaattcttatcattttatatccctctaatttgatgtaactcatgatattttctatttcaactctcagatctttagaatcccaaagaaaagaaaacaacaacaaaa

SEQ ID NO: 12677 - DNA, 3000 bp, Unknown
  misc_feature (1)..( 3000): cDNA_ID_2709389_gDNA_ID_2214565_Annot_ID_134945 3000 nt of promoter + ATG
ttctcgttgcagtttttcccattctccaaccaatttctttatttccagcatctatagtatatatttaaaagtccagtttccaccgatgtcaagacgaggtgtatgtatacttactgattcctgtaggagcaaagactttgaaagctgcaagaagggcttctttgtaattttcttcatccgctgataccatcttggacttaactaagtcctaaaatttcaaggagtaagagagataaagacaaggaatcacaagaaaaacaaagattaataactgtttgctgattaacaaaaagtaaggataccttaaactcgtttttctcttccctggttgatggaaggttgccgctatggtgttgagcccattcttcagccaccttgactagaatgacgacgtaaggaatgtgcttatgggcagcgggttcttctacatttagatcaatggactccacatagctgcagatcattgaataaataagattttctttcaactggttgcaagtttgtggagattaaaagtaatttgaaacacaagtttaaagaatggcaagaacacataacgagtgagaagattgaagcagagtacctcttcagctcaggccatggactattcaagcggagatcatcaagagaatgatcaggctttgtctcaatagcggtgtgttcctgacaggaaagagcgaacatgacatagcagttagcagacagaccatatgacaagtgacaaagcactctatccacaaaaatcttacctttacactgatacgaacaaacccagtaagtccataggagcgagccaaaaccaacatgacgtttgcttcccggcagattctatctaatttcaccattgaatcttctactagctacaatcaacacatgacaaactaataaggcaaacgctctgtgaaaatctgaaaacaaagactagaaactatctaatcctcaacataatgtacctgagtggcgataactagagtgaactgagagaagaaagatgggtctgtcgatatcaaagtgtctggattctcctcaacaaaatttgctttaacagaatcgttaagctcctgaagaaagccacagaccgttttggctcttgactgaccaacgctcttcgcatccactgaaacatcaacaacaatcatcaataaatgtcaataaacagcaaatagaagaaacgcattgcttaagaaagatgaaaaagagagaattatacccatgaaattgtttccaaggtcgccaatttctactttagatccgtcgacaatggtgatacttccgattccaccaataacaagattctttagagcctcagagccagttggaccacaattgagcaaacatatgctcgcggtttcaagagctgattgacctaattctccccaaatcctatgaatttatccccaatcatcacaatttgagcgaaattaagaagaatgatgaaagagacagagaagttgaagaagagaaagagagttgggaggagaaagagtgcaccttagctgacgatcatacttggttttgggttccgccattgttggttcgtgctcgagtctttcgcgggtttttcagtggttcgtgttctcaacttcagacagagagaaagagaaagacgcagagagagagagagagagagagagagagagagagaggttgtgacttgtaagaaagaaagggaatggcatttaataagagaaccttaagttgtctcctttctttatttccttcctaatttggaacatttacaaagtttagggcttaattgtaatttttaaaaattaagactgtattattgcaaaaacaccttaatgtataaaagagataacaaattataaataaaaacatataatttaaaataaaatcaaaatttatgttttctggattgagttttcatttattaaaatatatatatacatggaaacatatcaaaattttatataaattgtaaaaataaatgacatagctagaaaaaaacacatatgtaatttaattaaatattattagatgaataagtgataaaatctcattatgtaatagttttttgccgcctaaaaatctttattatgaataaaaaacgccaactcaaattttgccttgctacgggtctctctttatgcaaaaataaaatgaaatactattaacatttcattgacaaattaacttaagagaataaacttttgagaagaaataaaatgattaacacatggcaattaaaatatttatattgtaatctaatcttaaataaacttaacaaaatgggccgttacatgtagggcccaataatgatgggccccactgaaaacaaaaatacaaacaaacggctgctgtgactatagagtatatagactagataggactttgtgagctcgaatcaaaaaagcacttcagtcacacgtttttcaatttctctcttctattttgttctcagaagaagaagaatgatggatgaatttctgggcatgatttgatctctctagttttgtttctcttcctttagtaatctcctgtcaaatcatggttttttaaaaaagatagttcttgacttctcttgttaaaaattcgttgcgttgtcgtaaaatttcccttttttaacttatgcctacaaagtgtttgcgtatattccgcagagagaaccagaaggtagctcaaagaggtaaagagaatgtctcactgttgttaatttcaatgaatttgtaaaaactctttttcagatttttcttctgtccggatgagtttgtgtatataagtcttcatatccacattgttgctagttttcagctaaaataatcaatttggtttgacttgtgattgctcttcgcttagatcttgattcgtcttctaatcgcattgactctacaggtcaaagttggaaactttaccttgcttagttctctaatcttctcatcctcaatgctgaatgaagagttgctagatttaaatgagatggttctagttccaacacaaactatctgaagtggtccttactttgattgcattatctccatg

SEQ ID NO: 12678 - DNA, 3000 bp, Unknown
  misc_feature (1)..( 3000): cDNA_ID_2709393_gDNA_ID_2214565_Annot_ID_134946 3000 nt of promoter + ATG
cattgataatttcgtagtcacagccgataacgtttcggccagaaccaaactgaacttgaccggctataccagtaaagtttactttcagaagtttctcaagtagtaactccccactgttgaaaaatttgattttctccaagtgcagtttggttccccgtgcatgaagtaacttttcggagtaagaaaacgttatgttgattccttcattcagcaattcctcgatgccatgcgcaatcatccacactgtatcataggcatgtaatgcgtaggcattcattgatctgttgctctgcagtttatgcgtgaaatgttccatctttacggattctgggatatgttgacgaagccccactactccttcaaggcgttttagagtacctttgtcactcaaagaatctaaggtaacagagagccagtctgtggcgagccatacgtattcatgggtcatcatctgcagcttttgcgctatatcaaaaattctgagcaatgggtccggaccaaaatgaagaatataaactcgaggaccgatggacttggatttgttcaaagcattagtaaggaatttttcatcagaatgaactgagagcggcactttataggaaattctggatcttttcttgtacagttcatcatctagagcagaaactccatttcttccgagctcatcatccgagtaaactgagatcacttctttccatccataaaaattgataagatccacaagggcagacatttggtgggcatcattaggtgtagtccgaagaaagaagggaaattggagggcagagagagttggatcagttgctgcaaatgagacaagaggaaagtggagcccttttgcaatatcggaaattgtatgagcaacagaggatgaaattggaccgatcatagccaccacttctttctcaagcaattcaaaagctgcaaaacaaaaaccactgaagcttaaaccaggcccttagtggtaaaaccaaagttttgtttccacttatgtacaggaaacacaggtcctagtaacagcctgtttagggtatgcggtctatattgttctatgcattattagcattcggaacccaaaatatgtaccaataaaaaacggattaaaacgtaaatcgatgtgccaatcatttccaactatcacaaaatgaaatattgttgctactgatgtgcattgaccgctttctataatatgtttgatatactgtatcagccatggatgagtgtcacaagtgtttgaaacacaaaagaactagaagaacagtcacggtacctccaaaggacccacgaaagacattgcaggcagaatcctccattaatagccgtagctccgtttctttgagaaagcttttatcattgttcacatcggaaacagctgcctctagagctacttttgcagctcttccgataaccgaatcaaaagcaaaaacagcaccgatgttcaccagttgaggtctttggcaatccattggaaccaccagaatgaccacaatcagtgccgtaatagcgacagatgggtcaatgcccagtcccatggagataatgcaatcaaagtaaggaccacttcagatagtttgtgttggaactagaaccatctcatttaaatctagcaactcttcattcagcattgaggatgagaagattagagaactaagcaaggtaaagtttccaactttgacctgtagagtcaatgcgattagaagacgaatcaagatctaagcgaagagcaatcacaagtcaaaccaaattgattattttagctgaaaactagcaacaatgtggatatgaagacttatatacacaaactcatccggacagaagaaaaatctgaaaaagagtttttacaaattcattgaaattaacaacagtgagacattctctttacctctttgagctaccttctggttctctctgcggaatatacgcaaacactttgtaggcataagttaaaaaagggaaattttacgacaacgcaacgaatttttaacaagagaagtcaagaactatcttttttaaaaaaccatgatttgacaggagattactaaaggaagagaaacaaaactagagagatcaaatcatgcccagaaattcatccatcattcttcttcttctgagaacaaaatagaagagagaaattgaaaaacgtgtgactgaagtgcttttttgattcgagctcacaaagtcctatctagtctatatactctatagtcacagcagccgtttgtttgtatttttgttttcagtggggcccatcattattgggccctacatgtaacggcccattttgttaagtttatttaagattagattacaatataaatattttaattgccatgtgttaatcattttatttcttctcaaaagtttattctcttaagttaatttgtcaatgaaatgttaatagtatttcattttatttttgcataaagagagacccgtagcaaggcaaaatttgagttggcgttttttattcataataaagatttttaggcggcaaaaaactattacataatgagattttatcacttattcatctaataatatttaattaaattacatatgtgtttttttctagctatgtcatttatttttacaatttatataaaattttgatatgtttccatgtatatatatattttaataaatgaaaactcaatccagaaaacataaattttgattttattttaaattatatgtttttatttataatttgttatctcttttatacattaaggtgtttttgcaataatacagtcttaatttttaaaaattacaattaagccctaaactttgtaaatgttccaaattaggaaggaaataaagaaaggagacaacttaaggttctcttattaaatgccattccctttctttcttacaagtcacaacctctctctctctctctctctctctctctctctctctgcgtctttctctttctctctgtctgaagttgagaacacgaaccactgaaaaacccgcgaaagactcgagcacgaaccaaca

SEQ ID NO: 12679 - DNA, 3000 bp, Unknown; identical to SEQ ID NO: 12671
  misc_feature (1)..( 3000): cDNA_ID_2709401_gDNA_ID_2214565_Annot_ID_134948 3000 nt of promoter + ATG

SEQ ID NO: 12680 - DNA, 3000 bp, Unknown; identical to SEQ ID NO: 12670
  misc_feature (1)..( 3000): cDNA_ID_1808457_gDNA_ID_2214565_Annot_ID_134949 3000 nt of promoter + ATG

SEQ ID NO: 12681 - DNA, 1032 bp, Unknown
  misc_feature (1)..( 1032): cDNA_ID_2990746_gDNA_ID_2214566_Annot_ID_134950 3000 nt of promoter + ATG
gatctcctataaattatttaaaatgtgggttggaatatttctctgtttttcggaaaagtacttttaaaactaccctctaatcagtaattatttttttaatgtcattagagccaatataattcatataattgaactctactttgatttatgtgttctttaagataatgtaatatgaaatgtttaaatttagaagtcttttcaatcttttttttcttactactttgaactctactctattctagaagaaaacttgggccttcaattttcaagcctcgaggactgattagtgattattttgtctttgttcagacaacaaaaataaagaaagtgaaaaagataaaaacttttttcttttctcttcttcagtttcttcttctttttgttttccttcctcgttctttcatgtcttccttgtgccattgatgagtccgtcaagaccaaatcgagagtagtgcaagacttttttctcacactgtttctaaaaccgcgtgagaaatcttcttcctcctcagatctctaccttttcccttaaattttcccgcattttctctctcttccaagcttctccaagcgtacaagctacttcttcttccataaactcaaagtaaaaccctaaaccaaaactctcttcacctctataaaaacaccacctttttttagctcctgtctctttcacagacttcaatcgcattttcattaccagccaaaaatcatcttcaatttccaggtaattaacatcaatcttgaattctctgtttcactttttttactaattctctgcaatatttttagtaagttactcttgcgctttaagttttctcttttcaatgtcggttacaaaaatttagattgctccgtaagattcggcataaagtttgttgctttaagctataaatcaattacccatttcgattttgtcccatttctcattgcaaagctcaagataggtttggtttctaatctgtcgttcttgctctttgattaggttacaagcttaagctttttcatagatagatagaaaagagaatgatg

SEQ ID NO: 12682 - DNA, 3000 bp, Unknown
  misc_feature (1)..( 3000): cDNA_ID_1809125_gDNA_ID_2214566_Annot_ID_186025 3000 nt of promoter + ATG
ggtgttccttgggtcagcttcatggtttacttggagatcgaggttttattgatctgggtatctcatcttcttgttcagtggcggaagcgctttctagtcataggaggagaagccatcgcgatgacatcttaaatgacatcgaagaagagttagaaaagcttctgtgtcgcggtatttgcacagaacaagataggtctctttgtcgaagtattgggggtcagtttaaggctaagtttttctctccggaaatttggcatcagataagagaacaaggattagttaagcaatggcacaaggcgatctggttctccggagctacgcctaaattcacgtttatatcttggcttgctgctcatgacagattaacaaccggtgataaaatggcatcttggaacaggggaatctcctctgtttgtgttctttgtaatatctcagctgagtcaagagatcatctgttcttctcctgcaatttctcttcacacatttgggatagactaacccgaagacttcttctttgccgctacacaaccaactttcctgctttgctcctccttctttcaggacaagacttctcaggtacaaagcgtttcctcttgcgctatgtatttcaagcaacgatacacacattatggagagaaagaaacaagcgtaggcatggagatctgcctataccatcagatcatatcatcaaattcattgatcggcaaactcgaaaccgtttaagcacaatcacaaagcaaggcttgcacaaatatgccgatggcctccgcatatggtttgcagcgagagacaacttaacgccaaatcattagtatttctttgtttttttccttttgattttaagtctaaatcaagttaataaatggctgcatatattgtaaaccaggttttttctttgaataaatttaacaatttttcaaaaaaaaaaaaaaagaacatctggatgtcgtacaatagcttcttgcaagatatcaagaagctgatcagcaaagaaaagctcggtaatcttcctcgcgtcttgtggcaccaatcgaaacgaaacagagccactgactccatcgtgtagcatcgcgattccattttcatcgagctttcgcttcttcaacatatccatggtcgaagatagcagccaaggaactttgtgggaagaatgagtgaagttagaagagatcacatgttcgtaggacataattaagcctagctctttttccttaaaatataactatagcattggtacaccaaaagaaattaaacgtattcgtcaaattcatagtttaattgattagagtagatgagaaaaccatttgctgtttcatacccgacttttttccaatcacgtgaaacgtaaaggtaaaacatatttgtaactaaaccatatttttctttctttctttctctcgtgtttgttttagaacctaatctgatctgaatattaacacacaaaaagatgataaatgagaacatataacaaatcatgaaatgagatgagaacatacttctctagaaaattttctaaaatatccgaatcaattgatggcgaacaactaaacagtagaatacaatatgtatattaaacagaaaatcaaacgctaaggaattaaaaatcatgaaaagattattaacacgagagatgagaacttaactctccgaaaatttgtcctaaaacatccatttcaattttctcgcaaagaattaaaacttagaacacaatatatcaaatcaaacgtgtatgaattgaacttaaaaatttacatgttacatcagcatctaaatttttataaattaattcacgacttatggattagtatgtatattcaaaaaaatagttggcacgatcaaaaaagaaacattaggtagctataatctgatagtgaattaaatgaaaagtatttataaaaaactaagaggctgctcatgatttaggattttacctttttacaatttccagaaacacacaaaataagaaaatttattttgtgaagttacattaacatttatatccaatattacacactaaaaaaacgaaaccaccatatattcattattataaacatatggcttattaatctaaatctgttaaactatatatctaaatctgttaatctaaatctgttaaattatataaatatgttattataaacatatccttttattatataaatctgttaaattatatatctaaatctgttattataaacatatccttttatcttctaaatcttactaatctaaatctgttaaattatataagggtgtttaaaaaatggatatatatgtttttgtccacaaatgaatatatacatttatatcgattttttttatatactttcgtaaatgttaattgatgacatgtccaaccgtaatttgctgtttaaaattttatgtggacggcatacgaatcaaatagcctcgacttttctatagtataaattgtatgtaacttgtaggctctctctaaggcggaacgctcccctaccgatgtattttgacatcccacagcttcggcccatgtagtctattggttatttttgtggttcagtttaaattttaaatacatgtatttatcctcaaacttttttttttgcgattctcaaactatttaattcaaatccagaaacggtttatttctccccaaaatacatgtatttatccatgttaatttttttatttctttggcttaagtaataattagatcaatacattttagaccaataaacgtttgaacgtctttttgcatcagaacgtgaaattaatgtcaaacgcaaacgcatgtacaaatcctgaacaaacataccgcttaggtgatggatggttgcgtaagaacaaaacaccttaaacggcagcgttttgtaggagcaccgcttcgcacgtttcttccatatctctgatcacgtgatagtcgtcttcttcagatcttttatcactttcttcttcccggagaaaatttggccctaaatcactttcccgggaaaatcaaactctggggaaagagttgaaaca

SEQ ID NO: 12683 - DNA, 3000 bp, Unknown
  misc_feature (1)..( 3000): cDNA_ID_2712394_gDNA_ID_2214566_Annot_ID_134953 3000 nt of promoter + ATG
gtgagggtttatatgatcaaacgcccatctgcttagtgcttatatattaccataagatcgacccgctacttctctatggaggaaagagtccttggcttgtattgtacctcttcgtagcttcagttttggagattcttatcatccattagactgagtccacgtctacataaccacacaatattacctattcaatcaaaaatcaaacgaaagaaaccaagacttagacaaattcaagaacaagaaaccgaagtataacacatcgatgaaaagtctaaacaattacttcctgacagcgacacaaatagagatgttaaagagagaaaacaagagctcggtaacatgttcaacaattcgtgttgaatcggtcaagaaactctgtagcaccgtgttaaaactgaaaacgactacatatctatctatttatatatttttcgagagcttaagggttctaatcattctataaaccaataatgaagcaattagtctcctccaacgaactagtcatcaagaacgagttagaaactataactatgttgaatgagcttaaaacattattaaatgattataacttctaatccaaatatgattgaaacaaaacaaaaacaagaaacatagcacttacaaatctagcaaactacttcttctatgaccaaaacatctccataattctccttcttgtggatcttcctcccacaatctaaccctagctctgcaaataggacacgtcgaggctttgagcaaccaagtgtccacacactttcgatgaaacacgtgtccacaaccaggaagattccgacaccattgtccttgtctgaatccatcaaaacaaaccacacaatcgctctcgtaccgtgtgtatgtgctaggttcggagaatttgaattgaggaagctttttcacgaatcttgaagataacccatctgaggattcttgtcggcgattacgacgacgacgtcggtggtgacgatggagagaagagaggaggagagggaggataagaacagaggcgataccgataagaacgaggaagagaaagaagattgaaaacatgattacaccaacgaggaatagagagagaatccttgttttcggttttggcggtggatgagacggcgtagtagacggtggttcgccggagattcggtaattattggtcggaggcatcggaaagaaaaaaaaaaaaaagaattctcctctttttttggttgtttcgtattctggcttatcttttttttgtgctaataattaccagaatctaatgtgaaagctaaagaaggtaagatttgatgttttgagcgaactgaaatgctaaatcaaagacatttccaaagtagaaaatgacgcaatcaaaaatatttgtcagagcaaaatttaagaaagaaaaatagatttcatttagtgacagtaacgtttggttaaaaatggtcatgtgatgagatactttttattttactttttgggctttggatcatgtgataaaagattttaatttttatatatatatataaatttttttggctccatgtctacaagaaatataaataataagaaatatcttctcatccaataattttaaacattatcttgaaggataagcaaatatcatcatcccactgtttttaagaccatagtatggaaaaagatggaatattcgaacttataatttagttttaaaagtaatattcgtacttggaggcctatggaatcgctactaattctaaatactcgttctgaacatagcttgtcgtttgattcggacgttttgaaattttgtacattcttttggtttgctctctttttttcttaacaatatacgttttgtaaatttaaacttggacgatgatataacaacacaaatgacatatgcttaaaagttaaaatctcattttttatattttgaatctttgattgatgaattatagcgacaagccgacaaaggcaacttcctcggtaagggcaatcgttatcttaagtttaatttgatcaaatctctttctcagcgatagaaagtttaattggtatatagagatttgggcctttacataaaatgatatttgaaggcccactaagcccaattattttccagaatgttgaattcataaacgcagatttacttgacatgataacaaagagaaatttgtcttgattcaaaaaaataaaataaagaagagacatttgtctttctcttgtaaaagaggtcaataaagcaaatttgtttttcatacttcatcatttgactaattttattggtgttatgtaacaaaccgaatattggagatatcttagggagcaagtacgtgaagtccgaagaatattctagatttcactattaccttttgttcaagttatttttttatatgtttagaaaagttgaagaacaatctgactcggataccatgatagatttgggcttttaatatgagatttcaactaaaaatcaattggtaataggtggagtgaccctaacactttatatactatttgataatttttaatttttaatgtgggactttcttcattaacacattttgttttagtagatggtcctaacgttagaacctaacactcatcagaaggtttaaaagacggttatacttttcccgatggttttggatttgggtaaggttgagaattttctcaaggtaggattcgaagtgatgttgagaataccctccttagtttcttcgaaatttccttcgcagctttgtgaaaataatatccacaaagaaaaaaaaaatgaactttaaatttcaaaccctcgtggaattttccttcacacatcatcatatattcatattcattcaattcaccaagaaaatttaggtggagtaaggaataacaaattgtcctgtatgaaatcaatacaataagtaatggaagacttgacgtagaccaaagacttttccttttacttacagtctttgagtccaattatatataaatactcgcttccctttgcttcgttatttcacaaacaagttaaagaaaatgataaaaatg

SEQ ID NO: 12684 - DNA, 3000 bp, Unknown
  misc_feature (1)..( 3000): cDNA_ID_2709433_gDNA_ID_2214566_Annot_ID_134957 3000 nt of promoter + ATG
gaaattgttaaaaaaaaaaacgtacagacatctcttacacttaaatatttctgatggaaacactaaaataaaatattttgatcgtagaaatataactaatatttacttattttttctttttttttaggttttaaaattctcattatgttggttttagtatgtttttattttatttttaattgcataattaattaagatatttttttgtacaagataatgccacgcaagcattttacgggactttttttccttcgcatgcaaagtccggcggctcattttacacgataatgaggatttgctcatgtttctacgaatttaacaaaaaccgaaaattgcctttaaatgaaaaagggagagtcaaaaaaaaggaaaaaggaatattcaaaatagaaaagtagaaaagagaataatataaaaataattatctcaagaggctatagataaagtgggacccaagcaaatcttttagacaacgtggctgatcctatcgggccccacaaagacaatggttatgtggaatttggatatgtctccttttttttttttgctctcccacgctcttatcttgtatttagttagaaatctgaaacaattccctcaaaaaaaaaacaacactattcgccactcatttcatattcaaactttaaaaaactgaataaattttaataagaaaatttttaaccttttgaacaagagttttttttgttatattttgataatttttcctaacttcaaccaattaaattataatagacaacaaaatttaccgttttgttatttataacttacatgcatattgtccaattttaaacgtgaacgacatgatggtaacgttagttacattgtagtctcagttaaattcaaaacatttgattatttataacccacacacgcataatatccattttaaacgtgatttatacatgatgatgacattagttacatagtagtgttcgttaattacaaaaaaaaaaaaaaattggacgtttttcttgtttagaactcacaagcgtatattgtccagtctaaatttataaaatagtggtgacattagttacataatagtctttcgtcaaaaacaattttttgaccacttttatcattcataattcacacactcatattgtccaatttaaacgtgaactaaatatggtggtaacattagttacttagtaatcttcgttaaataaaaaaagttcaaccgttttatcatttttaacccacacatatatttaacgtgaattatatcacgagttacataatagtctccgttaaatttggaatttagctcaaatttgttgtaagtgaattgcttgttaccaatgtcgtcagtaaaacataacggtaaatgtttctattttgtattataactattttaacataaaagatataaagaaagatttctatgtataatacattatttcgatatatagatttaaattatagttataaatatattttttgcttgatatctctgtaaattaataagacggaatttaaaataattacaataaataaattttaagcaaattagatgttagttaaaagttagatgagaaaacactgtagcatatgaagaaaaaaaaacacaaaaaagtataattagatgtgaagcattaaaaatgttcccattgagatgacgccacgtgtcacaatctgaggtcggcggtcgatgttataccgttgaaatgaggaagaaacggaaaaaaagtttgaaacgttcctaggagggaatggatgacgtgtcataatatgattggagtacatagctgccgttgatcgcgaaagtaatgccaagtcatcagtcgcacatgcctcgtgacttttcttatctttctcttcccaccctaacacgccacgtttcctctacatgtttgccacgtggcttttcactatccacccaccaatattcctaacactaaaattagattaaaatttatttactatgggatatgaaattatgaattgtgaagttatgtgattatggttaggctgatgctacgtaatttgttactctttagtagcagtacaaatgtactttacaaaaagatttggtgtgtttcaagcatatcatacaattctttttatttttacagtacatatccctattttacaataaaaatatcgtattttatttatcaaaatgttgttttgctaataatatttagtaaaataattttaacaatagtaagaaaaagcttgaaaaatcaaattttgtaaatttccccttctacttgttagtaattaatagaaatagataaatattagtttcttttgattttatttttcccaaattcactagcatttgtggaaaattgatgtgagtacaaaactgatgtgatttttctttgttattcctcaaaaatataatttttcaaccttcaattttaagttttttgatggatatgagcagcttttgtcaaatctattaaataaaaagacgtgtgccacaaattatccacatcagcaataagtttttttttaaaacaacatatatatggaaaaataatagctgtaaaatatttatttcccatttaggttaaaaaagtagaaatataattggagataagagacgaaacagctcacagcaaactaatcagtaattagggttatagctttttaaagatttgtttccttttatttcatttttcaaagacaaaagtcggtttgagttaaccacacgcgcttatctaacggttcagatataccaatcatatccatctcgagaaaatcgagaccgtccaaaaattgtgttgattttttaaactttaattttgtttcctctttcgttttcgttcttatcctcaccgaaaaaatttccgttttttcttccttcttaaattccacaatatggacgctctcttccttcttcttcttcgtaaaactatccttctttttcttctctccttgttatgaaatctgagaaacccagaaacaatatttgatttcttcatttacccaattttaaagttttgatttttttttcttctcttcttcgtt

SEQ ID NO: 12685 - DNA, 3000 bp, Unknown
  misc_feature (1)..( 3000): cDNA_ID_2712388_gDNA_ID_2214566_Annot_ID_134958 3000 nt of promoter + ATG
catagatttcctactcttttttttttgtcatcatataaacatatactactttttgttcaaggatcaatgtttcttagtttggtgaaagatagaagtaaactggagtgggccaatggttaggcgtgtaagcccaaactttggaacgattttagcccatctcaaaaggagcgtgctatattttgtaaatgaaattgcaaaattacctaacacaaattttcctataaaaaaacatttcgggtaagaaaccgacaattataaaataaaaattgtaagacatgttttattgacacatggaaaaatgaagttggcgaaaaagacaaacagtaaacgttaagataaaaccctacctataaatataccttacacgccacctgactttatcaaaaccaaaaacacaaaccttcaacggcacgctttctcctctgaaatctctgcgagcaaacttcttcatctacctcttaccgtacttcaggtttgtgtaaatcatttttataagaacttcagtgaaatagattagcaaccctaattgaatttaatcgaatcgtaactattgtgaacggaacccatccatcttgcataaaaaccctagtttctgaacagcctttcgaaacttctagtgttattgtattggctctgatcaacgttgttctaaagttgtgaactttgattgattgcaacagagtgtttaagatgaaatctgtcgtaatgtcgaagaacaagggcttagctgaacaagatctaagtaaacttgatgtagctcagctgcatcctctctctcctgaggtcatctctcgtcaagccaccattaacataggtatacacaagtttttgtttcattgagttttgatgctgaagaaactgatcagccgtgcattgaaagctaaagatatgactatgctctctatatctcaggaaccattggccatgtcgctcacgggaaatcgacaatcgtgaaagccgtttccggtgtgcacactgtcaaattcaagagtgaattggagcgtaacattaccattaaacttggttacgcaaacgcaaagatttacaaatgtgaaaaatgccctagaccagtagcctacaagtgaattcttgctcttcttttgctacaataaggttacgtagtgtacgtagcaacttatgatatgtgttaattataggtctttcgggagtggcaaagaagacaacccaagttgtgatgtctctggacatgagaagtacaagatgaaactactaagacatgtctcatttgttgattgcccggtataaaatgagttttaacactatttctaaatcttttgtaaccattttctatatgttaatgaggtgttttgtgtgttgattagggacacgatatcctaatggcgacaatgctgaatggagcagcgattatggatggtgctttactaatcattgctgcgaatgagacatgtccacaaccacaaacagctgaacatcttgcttctgttgatatgatgcatcttaaagatatcataatcattcagaacaagattgatctcatccaagaaaacgaggctattaaacagcacgaggacatccagagatttataacggtttgattcaattttcccattctgttttttttttgcatttttcacttcttgattagttggttaagttttaaacttgttattacagaacacgaatgcggaaggtgctcctatagttcctgtctcagcgcaactgaaatacaacatcgatgttttgtgtgagtacattgtcaagaagattccactccctgtgagggattttgtgtcacctccaagaatgattgtgattcgttcttttgatgtcaataaacctggctctgattatgatggtatgaaaggtggagttgcaggtgggagtatccttcaggtaaaacatactcaataccccgaaaaactaggataaatcgcggttgaatcaatgtaacttatgtctctctttgctttgtttgcagggtgttttgaaggtggggcatataatagagataagacctggaatcactagaaaagatgagaatggagacactaaatgcactcccatttacacgcgtataacttcattgtacgcggaacagaacgagcttcagtttgctgtcccgggaggtttgattggaattgggacaagcatggatcctacgcttacgcgtggtgataggttagttggtcaagtccttggtgaaataggtactctccctgatgtctatgttgaacttgaagtgagtttccagcttctgacacgtctcattggagtgaagacaaaggaaacagagaggcaaatgagagtgtcaaagctagtcaagggagagatactgatgttgaatatcggatcgatgtctacgggagctatggttattggagtaaagaaagatatggtgaaagttaatctgacactccctgtgtgcaccagcattggagagaaagtggctataagtcgccgtgtggataggcattggcgtttgatcggtcgcggtcagattgaggctggaaccaccatttttatcccttctcctccttctttggcatgattatatttgatgcattcacatataccaaacttgtagtctcattatatcttcagagtattcctaatctgtcaccaaaggagataactaaacttctatgtgcttatgctttttgtgtgaagtctaactagagtttgatcaattgcatcatcttgatttgttattaaaagttttatagtctatggatgttacagcttaattaactaattatcctacatagttcatttgagagaaagatataatttgtgattgttgaaacttgaaacttgaagtcttgaagaaacagaaagaaagacttgaagtcatggtctcattcctaacgcccaaaacaacaaagattaataatgtgcaaaagatgtattgggcctaaaaggcctggcccattagctggattccgtaagaaaaaaaaaaaaagtgaaaaggaaaagaagaaatcgtcgttgttgtggagaaggagaagaaggataaggatg

SEQ ID NO: 12686 - DNA, 3000 bp, Unknown
  misc_feature (1)..( 3000): cDNA_ID_2709429_gDNA_ID_2214566_Annot_ID_134959 3000 nt of promoter + ATG
tcatctccttccgctgccactttctccaaacaccccaacccgtatcgaacaaactcatgcggcttcacttccgtgaggtcaaacacctgtatcaacacaaaagtcaccatgaagtttcaatatcaaaagctcaaaccaataacttgacaacatcaacatcactcagctttccaaaagactcaatctttaaacgtaactcatccttcaaagttccaacaaaacactagatctaacatcagctaagcataaacatataaatcaagcattaaaaacttaaaagccagagactttaagaaagtttccaaactaacataatcaaaacacaaagtagatacaaattagattcgaaattcccccaaaaacccaaagaaaaagatttgaaatacaagttcagtgagagcaaaacctgttcctcgctcatcaactgttgaagcctctctttaagaacaggaccatgacgaccaccagaattggggttaatgaaaacaaccataggagcatgaggagccatatcagcaacagcaccaccaggaagaagtaaatgatcaggaatagccgaggaatctttgcgtttgatacagtcacgcatagcgagacgaagatactcaggcatcatcaacctctgacgaagctctactttatctacaccaacccatgccagattcgcgagtccacaacctctcatcgtctttgaatcagccgttgatggtcgtgaagccacgaatttctctttcgatgcatcggtttttgataccggagagtccattgtagtctctcgccggagaagaaaagacaaaaagatgattacttttcgtcctgtgattggagaaaatgaggaatattcgaaacccagataatcaaaattggagttgaaatgaaaaataataaaggattgtttttttttaatctttcttcttcttctttgctgagagatttcaaatcaaccaatataaaatcttcttttgacagtttgtattttcttgtctgttttgtcttttttataaatgatttagtttcgaagacagcgcacaaaacgtgtgaattaatttgcttatattgaaaaaaaaagaatttacacggttggatttcaatgtgacgtcataaaaatgccactctttagatctttgattctttttctttttttattgtttgacatttatgaaagcgactgataaatgtttattttgtaaaagttctaatttagaataattttgattattaataatattaaactactaagatttgtatagtttaataccattatcttctgtaactaagatttgtagatcttttgtttctgtaagatcaaatttacaatttaaagtgtacaaaatcttacaatactaatgatggcataaagagattaacaatgagattttttaacgttattgttatatcaagaaaaccagagaaaattaattagtaattgattgatacattgtaagaataggatctaatgatattttaatattcaaaaaggttccattatagaggttacatctggtgaatatgattgaatacaatttgatatagagaattagagatacttgcattattatttgcttcctattattatttgactgcattattggtttctttttctatgtaaaaaatattttcaactctccaacaaagaaacaaaattctctgacattttgcttagaaagagtggcgttttcgtcattaaacaaaggaatagttttggtggtaacgtaaattgtaaaaaaacagcgaaggagacaatagaaaatgagagcagacattgaagttagtggattttccacagaatggggcctacaatgttattgcccactcagagaaatagggtcactgaaagtgatagctacttcccattgctgggatcgttgtgtactttttctaacctaaatttccctcaatgcctttttcttaacttatagaattggtcgaaacttgaaagtatatacaaatgccacagaaaaaaacatcatttaataccttcttaattgcacgatatgatatcagatgttttgtaaccaagaattggtccatgtaaacaatttattatgtggcagaggaagactcaaattcaggtggctgataaaaagtggggtttaagatatttcttgaactggaagacaatgagcgtgtgttctcattagtattacaaatcatatttacattattataaagcggaacatatttacattatactccaaatgatgtaactataaaatttgatctaacaatatatatcgttaagaaaaataacctaaatttatcacagcttattcatttacactcctatagaatcatagatttcctactcttttttttttgtcatcatataaacatatactactttttgttcaaggatcaatgtttcttagtttggtgaaagatagaagtaaactggagtgggccaatggttaggcgtgtaagcccaaactttggaacgattttagcccatctcaaaaggagcgtgctatattttgtaaatgaaattgcaaaattacctaacacaaattttcctataaaaaaacatttcgggtaagaaaccgacaattataaaataaaaattgtaagacatgttttattgacacatggaaaaatgaagttggcgaaaaagacaaacagtaaacgttaagataaaaccctacctataaatataccttacacgccacctgactttatcaaaaccaaaaacacaaaccttcaacggcacgctttctcctctgaaatctctgcgagcaaacttcttcatctacctcttaccgtacttcaggtttgtgtaaatcatttttataagaacttcagtgaaatagattagcaaccctaattgaatttaatcgaatcgtaactattgtgaacggaacccatccatcttgcataaaaaccctagtttctgaacagcctttcgaaacttctagtgttattgtattggctctgatcaacgttgttctaaagttgtgaactttgattgattgcaacagagtgtttaagatgaaatctgtcgtaatg

SEQ ID NO: 12687 - DNA, 3000 bp, Unknown
  misc_feature (1)..( 3000): cDNA_ID_2709425_gDNA_ID_2214566_Annot_ID_134960 3000 nt of promoter + ATG
atcatatcaacagaagcaagatgttcagctgtttgtggttgtggacatgtctcattcgcagcaatgattagtaaagcaccatccataatcgctgctccattcagcattgtcgccattaggatatcgtgtccctaatcaacacacaaaacacctcattaacatatagaaaatggttacaaaagatttagaaatagtgttaaaactcattttataccgggcaatcaacaaatgagacatgtcttagtagtttcatcttgtacttctcatgtccagagacatcacaacttgggttgtcttctttgccactcccgaaagacctataattaacacatatcataagttgctacgtacactacgtaaccttattgtagcaaaagaagagcaagaattcacttgtaggctactggtctagggcatttttcacatttgtaaatctttgcgtttgcgtaaccaagtttaatggtaatgttacgctccaattcactcttgaatttgacagtgtgcacaccggaaacggctttcacgattgtcgatttcccgtgagcgacatggccaatggttcctgagatatagagagcatagtcatatctttagctttcaatgcacggctgatcagtttcttcagcatcaaaactcaatgaaacaaaaacttgtgtatacctatgttaatggtggcttgacgagagatgacctcaggagagagaggatgcagctgagctacatcaagtttacttagatcttgttcagctaagcccttgttcttcgacattacgacagatttcatcttaaacactctgttgcaatcaatcaaagttcacaactttagaacaacgttgatcagagccaatacaataacactagaagtttcgaaaggctgttcagaaactagggtttttatgcaagatggatgggttccgttcacaatagttacgattcgattaaattcaattagggttgctaatctatttcactgaagttcttataaaaatgatttacacaaacctgaagtacggtaagaggtagatgaagaagtttgctcgcagagatttcagaggagaaagcgtgccgttgaaggtttgtgtttttggttttgataaagtcaggtggcgtgtaaggtatatttataggtagggttttatcttaacgtttactgtttgtctttttcgccaacttcatttttccatgtgtcaataaaacatgtcttacaatttttattttataattgtcggtttcttacccgaaatgtttttttataggaaaatttgtgttaggtaattttgcaatttcatttacaaaatatagcacgctccttttgagatgggctaaaatcgttccaaagtttgggcttacacgcctaaccattggcccactccagtttacttctatctttcaccaaactaagaaacattgatccttgaacaaaaagtagtatatgtttatatgatgacaaaaaaaaaagagtaggaaatctatgattctataggagtgtaaatgaataagctgtgataaatttaggttatttttcttaacgatatatattgttagatcaaattttatagttacatcatttggagtataatgtaaatatgttccgctttataataatgtaaatatgatttgtaatactaatgagaacacacgctcattgtcttccagttcaagaaatatcttaaaccccactttttatcagccacctgaatttgagtcttcctctgccacataataaattgtttacatggaccaattcttggttacaaaacatctgatatcatatcgtgcaattaagaaggtattaaatgatgtttttttctgtggcatttgtatatactttcaagtttcgaccaattctataagttaagaaaaaggcattgagggaaatttaggttagaaaaagtacacaacgatcccagcaatgggaagtagctatcactttcagtgaccctatttctctgagtgggcaataacattgtaggccccattctgtggaaaatccactaacttcaatgtctgctctcattttctattgtctccttcgctgtttttttacaatttacgttaccaccaaaactattcctttgtttaatgacgaaaacgccactctttctaagcaaaatgtcagagaattttgtttctttgttggagagttgaaaatattttttacatagaaaaagaaaccaataatgcagtcaaataataataggaagcaaataataatgcaagtatctctaattctctatatcaaattgtattcaatcatattcaccagatgtaacctctataatggaacctttttgaatattaaaatatcattagatcctattcttacaatgtatcaatcaattactaattaattttctctggttttcttgatataacaataacgttaaaaaatctcattgttaatctctttatgccatcattagtattgtaagattttgtacactttaaattgtaaatttgatcttacagaaacaaaagatctacaaatcttagttacagaagataatggtattaaactatacaaatcttagtagtttaatattattaataatcaaaattattctaaattagaacttttacaaaataaacatttatcagtcgctttcataaatgtcaaacaataaaaaaagaaaaagaatcaaagatctaaagagtggcatttttatgacgtcacattgaaatccaaccgtgtaaattctttttttttcaatataagcaaattaattcacacgttttgtgcgctgtcttcgaaactaaatcatttataaaaaagacaaaacagacaagaaaatacaaactgtcaaaagaagattttatattggttgatttgaaatctctcagcaaagaagaagaagaaagattaaaaaaaaacaatcctttattatttttcatttcaactccaattttgattatctgggtttcgaatattcctcattttctccaatcacaggacgaaaagtaatcatctttttgtcttttcttctccggcgagagactaca

SEQ ID NO: 12688 - DNA, 3000 bp, Unknown
  misc_feature (1)..( 3000): cDNA_ID_3434151_gDNA_ID_2214566_Annot_ID_134961 3000 nt of promoter + ATG
gaagaaaacgaacttgatcaggttttgctctatttcattaggcttgcttcttctcattgaatcatcagcatgtgattttgtaaattgccacggtttagtaattaaccaggctttatggtggtttcagggtttggacgcgggaattgatgcgcctccacttgcaaaggcttatgaaggtgttttctacaattacttaagcataggtttgttgaacttctctttttgatatcctaaacaattttcacaattgtttttctgaccagattcttgtgtttgtctggtttgtttaggtatggatgctcaagttgcatatggcttccaccatcttcgcaacactaaaccatatcttgctcaaggccctatttcaaataaggtttgtttattatatttgcacctaaactttggactcattatttgtctttgttaaaagctaaagtagttatgttggttttgagaaacgacattaccaaccacacaatgtttgcttttgcagattatatattcaagttttggttgcagtcagggttggttttgcacgccttgtgtcaacgatccaggtttaaggttcgccatttcgactcttattgtgtagttgaacttgtgtgtaagtctctgcttaagccctttgttgtgttgttgaccccttgtttgtgctatatgaatttgcaggggacttaggaacataatgaaaattcacatcaaaaaggttaactgctctcagtgggaagagatcgcagtcccgaaaaagtaaaaaacagttttcgatatatgatttatgtattacaatctttgatatcaatgcttaaaacctgatgctatggatttctcttgtagtgtgagatcaattgtcgcattgaatcttcacagctatggaagtggaagccatccttggggcaatctaaaaccggactatctagagaaggtattgtttctgttccatttcatcatatatgaactcagttctctgatgttaacccgaatgttttctttggtttttctcagagaggctttgtggaagcacattgtgatgatggtttgatagagattttcggttttaagcaaggatggcacgcgtcatttgtcatggctgagctcatctctgccaagcacatagctcaggtaacttcaaaagacactggtcaatgtataatctttttagccatgtgtttgactgtttcattttggtgatcatttcaggctgctgcggtaagatttgagctaagaggaggtgactggagagacgcattcttgcaaatggatggtgagccatggaagcaaccaatgagcactgagtactcaacatttgtggagatcaagaaggttccttatcaatctctgatgataaataatgaatgattgagattcaaagctggattctttgtacaaagctaattgttttgtatttggatttgattcagttagtcatagatatagcctaagctttttagtcttcttttcttttaaatctgagattgtgaccatttttctctttttaatttctgcttattgttggttttgtacatttttgtgttgtgaggaatgaagtttgtttatttataagaatgtgggaagataatatttggtcaaatttcaatctctcttcaatctttgtaattctagcattgagcacatagatgtgattctttgtcatatttttatttattttaacactagttcgactgagaaccaatttatcatcgacaccaatttctaagtaagaatatttttaataattatcattattagtcgtatatttttaccagaataataaaaaattaaaaacctaagttaataaaccacacaaaaaagtttttctctcttcgctctctcgtagtttgtaaagatagaaactgaaatttcttttgtttttgttaaccggatagttttccggtgagtcgccgtcccgtttaattcgggctttcgtccgacatcttctagctacgttagtggagatggttggctttttgtatggcatcgttggctaacttagcgacgttggccagcttccgtacggcagcgttgggcttacactaacagcgttggtcatctttgtttttgttttgttacttcaaaggtttgatgatgaagctttatggcatgcagaatcgtcagatctgaagagggtttctctttacaagatctattctccttctgttttgtttagcttcactattgggttatgcttttggctctggtagtttttcggcgatgtgtgcgtttccagcaattaccctcgtttggatctaccatatttaagacagtttcaattttattttcgcctaagattgggttaaagcttctatcctatgcaaatttgatatgcctttagtgcttttgcaagagagttcgaagattcaatggttggacaagtttgaactactcaatttttttaatttctttacccgttttgatgaattatttgtgattctagcaaccatatgagattaggaaattgatgtttgttctataacatctaattgccataatcggtgatagaaaaaaagagtttcattgctcggtgctttcccggcgatggttctccgattcaccagacttgagtctcatccggtggaggttgtggaagattcacgtgtccttagcttattattattggtctgacacgtcttaagcttatctcttttttgtgacgtaaaagtctgttgtggacctcatatgtagactgtcttgagccttttatgttgtaacactgagcctcagtatattaaaaataaatctttctctgaaaaaaaaaaaaaaaaagttaaaaacctacgctaaaaaattctaggtcttggaaaagagtatttgggccaaatgatcacattaattagttatgggctgaaataacattctgaagttttatgaggaccgagagaactaagtttaagaaaaatgttgaaaaaagcgtattagcagagggacaaacgctttttagggttttagatttcctctgagagagaattttcgaaagcttgagagagatttccaactacgttagcc

SEQ ID NO: 12689 - DNA, 3000 bp, Unknown
  misc_feature (1)..( 3000): cDNA_ID_2709421_gDNA_ID_2214566_Annot_ID_134962 3000 nt of promoter + ATG
tagaaaaaaagagtttcattgctcggtgctttcccggcgatggttctccgattcaccagacttgagtctcatccggtggaggttgtggaagattcacgtgtccttagcttattattattggtctgacacgtcttaagcttatctcttttttgtgacgtaaaagtctgttgtggacctcatatgtagactgtcttgagccttttatgttgtaacactgagcctcagtatattaaaaataaatctttctctgaaaaaaaaaaaaaaaaagttaaaaacctacgctaaaaaattctaggtcttggaaaagagtatttgggccaaatgatcacattaattagttatgggctgaaataacattctgaagttttatgaggaccgagagaactaagtttaagaaaaatgttgaaaaaagcgtattagcagagggacaaacgctttttagggttttagatttcctctgagagagaattttcgaaagcttgagagagatttccaactacgttagccatggcgagcaccaaagttcaaaggattatgacccaacctatcgtacgtttcttcttcgattcctttgttccatctctttattgtttctatcgaaacctaattttgtatcttgctttttgttttccggtggcggcggctccagaacttgatttttaggtttcttcaaagtgtaagttgttcaatttcttctgatttgctctctgaggttttaggttattagtagttcgtctactgatttgttccctggtcttttgtgtttgtgatgcagaaagctaggatccagatttggctatttgagcagaaagatttgaggattgaaggaagaatcactgtaagttgatgttgaagctccgttatcatgaattgattagattcctggctttgtttataggacattcgagggttatgctaactttaggagagtttgaaatgcattagcagtgtgactatctctctaatttagtctgtgtttgaactgttgcatttgttgtgaattgaaaagggatagttgtcactgttactactactgcacaaagaactgataagagcctgccaatagaaactagtttgattagctagctgttcttaggttgagtatgattgtgtcattctcttcggcttaaaacttattgtctcctacagcctacttggctttgggtgttacttgtttcagtttgttgctatgcttgtagttgtatgtcctctatgattttcgagttatgattcaagcattcaagcttttcttagtttgattctatgataatttggagaaacttgagattttgtgatggtgtcattctcattggcttaaaggtttgagttgtctacttgacttttgttgttccatgttgcagtctacttgacttttgttgttcctcgagttaagatcctagcttttctgaggttgattatatgtatggaggaacatgatatttgtgatagtgtcactctactcggttttaaacttagatttttgtctacttgaatttgggtgtattattgattcttctaggagaatccatcaaaccttgcttatccgtcgtcctttgcagggttttgacgaatacatgaatctagttttggatgaggctgaagaagtgagcatcaagaagaacaccaggaaaccacttggtgagttatcctgaactcactctttgataacaagtctcagatctgtctgcttatggtttgataactcgtgttaatacctattttcaggaaggattttactcaaaggagacaacataactctgatgatgaacacgtaagtaacacaatctctactctgtcttctctctttatgatgtatagcagcttgatttgtcacataacaaaagattgaaacaaaatcctttctatgttaacaggggaaagtgatgtctgtctcaaacaactctcttcgatgaccttcaagcttatgttaaatatctgttgagttcttcctcagcttaattggtacttgacgataccttcttttcttcaatgtcgtataatatattgcaatgtagtgagtgacaaaggagcttgatcgaatctagtggattggttggttaaaacttcaaaaaagagatttggtcccttttggttaaatctagtgttatgtaatttggctgatctttgttgcaactttttaacctctgtttaaatttcaaaccttaaaaaagtaaaaccaattgattttgattataaaaaaaattgtatcatttttgtttgtttggtgaactgaccgagttggccattctcagggctcaagtagattgaaagtttaattatactaatagaccaatcagaatataatctgttaaagttaacataaaaatacagaaatctatgtgaacattaacttttcattgcaattagatgtttttatatccatgttgattgttgaatcttatccctaatcttgctattggtgaaatgaatgtatttttactattaaagtctttttttaataacaaataattggactttatacaacaaagtattattatttaattatcaactttagaatatagcatgtgccaaaaatacatacactagccgccggcccaagaatgtcgtccaataaacgaaaagcaaaagtgacggcaatccaagcctactgtgatcttgtccgcacccgataactatctttaattactaaaactagtcaaagtactcgactaatcacaaaactagacaagtgtttcaagtaaattaatttttgatcttttcattttatctctctctctttttcttctatccaaaacaccatttttgaggtatttttctctctccttcgaatcgaattttcaggtttctctttccgtttgtttgaagaagcttttaagtagaattcataaaatcttgcttagcttctgggtttgatttgtttgtggtaaagttttgattttttttttagtttgagagctggatttgtgattctttctctgggttggtgaagttttttacttgcttcgatcttatagatcagagcttctagcagcgtaaaaa

SEQ ID NO: 12690 - DNA, 3000 bp, Unknown
  misc_feature (1)..( 3000): cDNA_ID_1030924_gDNA_ID_2214566_Annot_ID_134964 3000 nt of promoter + ATG
caccgtgtacttctgttttcacagactcagcaaatgcttgacatcctcgagagcttcttggttgcaaatgagtatagttaccggaggatggatggtcttactccagtgaaacagagaatggctttaattgatgagtttaataattcagaagacatgtttgttttcgttctgacgacgaaggttggtggtttgggaacaaatttgactggtgcgaacagggtcattatctttgacccggattggaacccctcaaatgatatgcaggtacgttttactttgaatgtcacagattcagtgtgcaaaaaacccgtcgtggccataaataacaatcaattttctgcttttttgggcaggcaagggaacgtgcatggcgtattgggcagaagaaggatgttaccgtttacagattgatcactcgtggcacaattgaggagaaggtatatcatagacagatttataaacattttctcaccaataagatcttgaagaatccacaacagagaagattcttcaaagctcgggatatgaaagatcttttcatcctgaaagatgatggcgatagcaacgcctccacggaaacctctaacatcttcagtcagctggcggaagagataaacatcgtaggagttcaatcagataaaaaacctgaatccgatacacaacttgctcttcacaaaactgcagagggatcctcagagcaaacagatgtggaaatgactgataaaactggtgaagccatggatgaagagacaaatatcttaaagagtctctttgatgcgcatggaatacatgtaagtacattaataagtgctcattgaaggttcttctccgacttactttcccataatttccaattcccttcactctcttacaatttttaacacagagtgctgtgaatcacgacgccataatgaatgcaaacgacgaggaagagaagatgagacttgaacaccaagcatctcaagtggcacaaagagctgcggaagcattgcgccaatcacgaatgctgcgtagccgcgaaagcatctcagtgcctacatggacgggaagatctggttgtgcaggtgcaccatcatctgtacggaggagatttggatcaactgtcaattcccggttaacccagactggagacaaaccatcagcgattaagaatggaatcagtgcgggtctatcttcaggcaaagcaccatcttccgcagagcttctcaacagaatccgcggaagcagagaacaagccattggcgttgggcttgagcagccacagtcttcattcccttcttcttcgggttcaagcagcagagtaggttcgttgcagcccgaggtcctgatccgaaagatatgcagctttgtacagcaaaaaggtggaagtgcagacacgaccagcatcgtcaaccatttcagggacatagtttcttttaatgacaagcagttgtttaagaatctcttgaaagagattgccacgcttgagaaggatcaaaatagatcgttttgggtcctcaaatcagagtataaagactaaaaaggagatgttttggctgcctctactgttcaagtctgaagacggagaaggcaacattggctccacacatatttgccaagtattctctttttctttataagctcacgcacttcttaacctttttttttaccagcaaagtcacttacacttcaaagtctacttttttgttttgtttaacatgatgttaaataaaaaagtaggaaaatcttagtaaagagagcacaactatgaatcttttattgaccaactcgaaaggcagacaccagttaagtaacagtaaaacaaactctcaagtgtaaagactaaagataggttttcttgtgtttgaatgttggtgcaggcaggtcgagagaggttgggatcgacctaccgagtaacttatgaagaacttgaatcaaacggctgatgtagattactcttatttggaagccgtattgagacgaagtggttgaaggtagagttttcatcagctacaatctctcaattcttttactcctggtggacggtgaaccaaattaacactcagactcagtcattgtgggttttcagcgaccagagtgtcagtctcagcttgcttggaaaacacttggtttcgctccgcaagaccagctaattagcaattttcatgagtcatgactccacaaagcatgatcaaaatagcaattgtggtgtgattcacaattgctaacatccctaggtgtgaatattgattcagcctgctcctgagattttaactcttgtaatgattgctcaaacacaagcaacagaggaagttatgagagctagaaagtaactcttgtaatcttgttttaaaacttctaaaaaatgtatatttgtcaatatattaatgtttggacccaaaaaaaaagtcaatattgttgtttttgttaactttgatattactgaaatttcttgtacgaattaaatcgaattagtgtgattacaagtaatcaatcgaattactgtaaatctgaaccaatcgatttcggttcaagttggtaggtataaattaccaatttagaaccgtactcaattcaatgcgttgttgactcatcataacttattaacttgtgcatatctgacgaaaatacccttgtctaattccaaaatatacaagaaacccttatcagtcccaattctcacaaataacaacaacaatttcgccggcgtcgtcgtcgtcgtctctccatcaccgtctctgctgcattgattcgcagcactgagtcctaaatttccagtattcttctctaattctttcgctgtttcattgatctcaattttaaaattttctctttttttttttttttttgcattcgcattcgttttatgatcggtgactaatttcacttataggcatcaattctattcaattcctcttcttcgttttatgattgatggtttgatctccaatttgattgtatattgtctgatcttaatagtggtaaattgttatgttctcaaggtgtaaaaaaaatcagaaa

SEQ ID NO: 12691 - DNA, 3000 bp, Unknown
  misc_feature (1)..( 3000): cDNA_ID_3026114_gDNA_ID_2214566_Annot_ID_186023 3000 nt of promoter + ATG
tgcgtcttgtgaagcctcgagacaagccgtctccacggtcaatttagccaataaatttaggcactcccaatctttagtcggagctagatctggatctgaaagaacgagggcgaaaaagagcatgtctggggagtggaaggaccagagccgaagcctcgtgcctgtctctagaatgttttcggtgacgaccttgttccatcctgaacctaagacgtagttggaagtggaagtcatatcccatctcttgagcttaagcttcctctgtagaccctcggaattcaccaagatcacatccgctcctttgtcactgtcacttatctttttgtaatgtctatctattttttctaactcttcctcgtttaagaagtccatatctagtatctgttccagggcatcaagagacgtgtctgaagttcgtcgacatcactatcgggaagaaccttcacaaatatcagctttgcatccacaccgttcacttctctcatcacgttaatcagtcattccgtcggtgtcctatcttcatccgtcactataactttaagcggctttctttttcttaccggtttgtttgaaacccctttttgaggcctcttggactctacatggcacaaacttggagaagaagcaacacgattagggttttgttccgggtcttgattcttgcactcatcaatcttcagtcatttgcttaagctggaaatcatcgttgtgctccttagattgtaattaattactcttttcgttctctctctcttattatcctcgagacgtacaatatctaacgctctgttgtctccctgcaaaccattgaattgatcatcagctctcaccatggttatcaaaaaatagatagacaagaagaaaagagttaagcggcagagaggacttatatattattctgatggtcaattcctttctcgaacggacaaaggtatatatatatatataactctctattaatttttttttgttataatatctttatatttttgtattagttttagataatcactaaattacttgcttcttttctatgtcataactacaggcttgtattgtgttggttattcttttgtttgttgttcggtttaaactttaaatacatgtatttaccttcaaactttttttttttggtgagattctcaaactatttaatttaagtccagaaaaacgatttatttctccccaaaatatttgtatttcttactggtttgtttgaaacccctttttgaggcctcttggactttacatggcacaaacttggagaagaagcaacacgattagggttttgttccgggtcttgattcttgcactcatcaatcttcaatcgtttgctcaagctggaaatcatcgttgtgctccttagattgtaattaattactcttctcgttctatctctcttattatcctcgacactagcatgagcttcagtggatgtttctcctatttcctcatatgcaaaagctctaaccattctctccctcgctacacgtacaatatctaacgctctcttgtctccctgcaaaccattgaattccctttttcgaacggacaaaggtatatataactctctattaaatatatttttttgttagtgataatctctatatatttttgtattagatttagataatcactaaattacttgcttcttttttagcgtgggaatattttattttttaatttttagtaattttttgtgtgactaataatatttaaattttttgaaatatatgtttttatatgtctacttattgttaataatttaataatttaaatttctttaattttaaaattaccatggcaaataaattcaatttatatacacaactgtttttaaaaactctaatacaacttttaagtttttacaacattttatcaaaacaacatatttttctttataaggaaacacccataaaaagtggacctatccagttccaaaataataagaaaaccaccagaaaataaatatgaaaacaataatattcaaatccaaataaaattacaaaattaaattaaatacccaagatttggccttctcacatgcacatgcaaacgtgatatttgcggttcaataccctctccttggacatcattatattcttgattagagtcaaatataaagagaaacgtgattgctgatgatagacacgattcattattgtttgctcaacttgatccgttaatttcagtttcgtatcaccacactattgccaaaatctcaagtatccaatccatctattctctctcgcaatctcttgtatcttcaactacaaatccctaataaaatctcgttctcacaaatatattttcacctctttagtattgattttcgatttgagttgtgatccaaagagtatacatgagtttaaaggttctatgcttcccatgaatggatgatccttttggttgttagttgaatatttttccattctattgtttagtcctagttttttctcatcatttagttattgatgattatgtatagttaggaataagccgttatattttaagtgaaattaagttaaaaaatatatataaaaattattatcccataatacgagactaattattatactatttttttttattctaacaattaattttgtttttcatatgttattttttcaaagtttatatttctatctttacatatatatatatatatatatatatatatatatatatatatatatatattatttatatgtttctgtttcataagccaaaaactgattcactaacttatccgccggcatatcaaacggcacattcgccacataaatcttcatcatcgatatatccgaaacatgtgaatttgttgtaccttgattccaagcagcagcgagctgcataaccgtcccacccctatcaatcttctaacggtttctagaacatctggatgtcacgtcagcaaagtagggcgatttcgagagtgattagggttttttcgtccgccgcaagtcttttctgccaaggcggctagccgccactgccacc

SEQ ID NO: 12692 - DNA, 3000 bp, Unknown
  misc_feature (1)..( 3000): cDNA_ID_2709409_gDNA_ID_2214566_Annot_ID_186021 3000 nt of promoter + ATG
ggctatgaactctaaagttgtggatggtgtggttcagccatgtagggatatggcgggggaacaggggattgatgagttaggtgcagttgcaagagagatggttaggctcattgagactgcaactgttcctatattcgctgtggatgccggaggctgcatcaatggatggaacgctaagattgcagagttgacaggtctctcagttgaagaagctatggggaagtctctggtttctgatttaatatacaaagagaatgaagcaactgtcaataagcttctttctcgtgctttgagaggtatattcagttcttcagctatgttgtatctgcggtgtatataccaattcgcgggtatttgattattttgttgcatttggcaatgcaggggacgaggaaaagaatgtggaggttaagctgaaaactttcagccccgaactacaagggaaagcagtttttgtggttgtgaatgcttgttccagcaaggactacttgaacaacattgtcggcgtttgttttgttggacaagacgttactagtcagaaaatcgtaatggataagttcatcaacatacaaggagattacaaggctattgtacatagcccaaaccctctaatcccgccaatttttgctgctgacgagaacacgtgctgcctggaatggaacatggcgatggaaaagcttacgggttggtctcgcagtgaagtgattgggaaaatgattgtcggggaagtgtttgggagctgttgcatgctaaagggtcctgatgctttaaccaagttcatgattgtattgcataatgcgattggtggccaagatacggataagttccctttcccattctttgaccgcaatgggaagtttgttcaggctctattgactgcaaacaagcgggttagcctcgagggaaaggttattggggctttctgtttcttgcaaatcccgagccctgagctgcagcaagctttagcagtccaacggaggcaggacacagagtgtttcacgaaggcaaaagagttggcttatatttgtcaggtgataaagaatcctttgagcggtatgcgtttcgcaaactcattgttggaggccacagacttgaacgaggaccagaagcagttacttgaaacaagtgtttcttgcgagaaacagatctcaaggatcgtcggggacatggatcttgaaagcattgaagacgggtgagtatagttagaatttatctagaagctagttttgcttacttcacaaaatgtgaccaaatcccaaattttgtttttttcattgatcagttcatttgtgctaaagagggaagagtttttccttggaagtgtcataaacgcgattgtaagtcaagcgatgttcttattaagggacagaggtcttcagctgatccgtgacattcccgaagagatcaaatcaatagaggtttttggagaccagataaggattcaacagctcctggctgagtttctgctgagtataatccggtatgcaccatctcaagagtgggtggagatccatttaagccaactttcaaagcaaatggctgatggattcgccgccatccgcacagaattcaggtacatttcattgttcccgctgttgtctccacatatccataaccaaaattatgcaatccggtttttttggttccttattttgtacataaagaaaatgaatttggtttggttaattacgaatttgatttaggcgtttaaagaatttgaggttttaaccaattcactatttgttttggttattgtttagttggaacctagattagtttgatttttgtattcggtttagtcgacttgggaacttttagacacatccataggcctagaattagcagtcaaggaatgtaatgttttcaaattgatgaaaaccagctcaaaagtgtaaaacttgggtttcatgtgttggtgtctttgttatgtctttattcgttgtttgcagaatggcgtgtccaggtgaaggtctgcctccagagctagtccgagacatgttccatagcagcaggtggacaagccctgaaggtttaggtctaagcgtatgtcgaaagattttaaagctaatgaacggtgaggttcaatacatccgagaatcagaacggtcctatttcctcatcattctggaactccctgtacctcgaaagcgaccattgtcaactgctagtggaagtggtgacatgatgctgatgatgccatattagtcacacttcagttggtatgagagtttgtatcattgtatgagtgtttgtgtgtctaacgacgtcggaggaggatagaaagttttttttttgtttccggtgagattagtagagaagagggagattatttgcgttcagctcagctcgccggaaaaaaaacgtaacagtagttgtagagaatttcaagacttttgtttgtgctgtgtaaattgacaactccgagagaaacaaaacaatgagataagaagagagcatattaatcgatgaccaatccttttaatttgttactcgttacatcaattcaaaattattatttgattgttaaccatttataaatcatattatatccaattagtctgtctacgcaatcaagaggtaaaggccaatcacattaattttaaaagatttatgatgaaatggtaccgtccaaaaagttgaaattttacaaactccactatatatataaaaagtgagatgtttaaattaggctggctaagcttaggatgtaacacattaacaatagttaatttaatgtttatgatgtatcgcactatagttttgatgtgtatgctctccaggctgtttcgtttttcacattacccacactaaactcaccttttttcttaaagaaaattaaagtaaagctcaaagactgaaatattaacaatatataactaatcattaaggaatcaaaactccattatatatgctctataaatactcaccaatcaatagccttctaaatgtctcaaacccaattcaaacccttaaacccacctaaaaccttcaaaacttata

SEQ ID NO: 12693 - DNA, 3000 bp, Unknown; identical to SEQ ID NO: 12690
  misc_feature (1)..( 3000): cDNA_ID_1030924_gDNA_ID_2214566_Annot_ID_186017 3000 nt of promoter + ATG

SEQ ID NO: 12694 - DNA, 3000 bp, Unknown; identical to SEQ ID NO: 12689
  misc_feature (1)..( 3000): cDNA_ID_2709421_gDNA_ID_2214566_Annot_ID_186015 3000 nt of promoter + ATG

SEQ ID NO: 12695 - DNA, 3000 bp, Unknown; identical to SEQ ID NO: 12687
  misc_feature (1)..( 3000): cDNA_ID_2991431_gDNA_ID_2214566_Annot_ID_186012 3000 nt of promoter + ATG

SEQ ID NO: 12696 - DNA, 3000 bp, Unknown; identical to SEQ ID NO: 12686
  misc_feature (1)..( 3000): cDNA_ID_2709429_gDNA_ID_2214566_Annot_ID_186011 3000 nt of promoter + ATG

SEQ ID NO: 12697 - DNA, 3000 bp, Unknown; identical to SEQ ID NO: 12685
  misc_feature (1)..( 3000): cDNA_ID_2712388_gDNA_ID_2214566_Annot_ID_186010 3000 nt of promoter + ATG

SEQ ID NO: 12698 - DNA, 3000 bp, Unknown; identical to SEQ ID NO: 12684
  misc_feature (1)..( 3000): cDNA_ID_2709433_gDNA_ID_2214566_Annot_ID_186009 3000 nt of promoter + ATG

SEQ ID NO: 12699 - DNA, 1029 bp, Unknown
  misc_feature (1)..( 1029): cDNA_ID_2990746_gDNA_ID_2214566_Annot_ID_186001 3000 nt of promoter + ATG
gatctcctataaattatttaaaatgtgggttggaatatttctctgtttttcggaaaagtacttttaaaactaccctctaatcagtaattatttttttaatgtcattagagccaatataattcatataattgaactctactttgatttatgtgttctttaagataatgtaatatgaaatgtttaaatttagaagtcttttcaatcttttttttcttactactttgaactctactctattctagaagaaaacttgggccttcaattttcaagcctcgaggactgattagtgattattttgtctttgttcagacaacaaaaataaagaaagtgaaaaagataaaaacttttttcttttctcttcttcagtttcttcttctttttgttttccttcctcgttctttcatgtcttccttgtgccattgatgagtccgtcaagaccaaatcgagagtagtgcaagacttttttctcacactgtttctaaaaccgcgtgagaaatcttcttcctcctcagatctctaccttttcccttaaattttcccgcattttctctctcttccaagcttctccaagcgtacaagctacttcttcttccataaactcaaagtaaaaccctaaaccaaaactctcttcacctctataaaaacaccacctttttttagctcctgtctctttcacagacttcaatcgcattttcattaccagccaaaaatcatcttcaatttccaggtaattaacatcaatcttgaattctctgtttcactttttttactaattctctgcaatatttttagtaagttactcttgcgctttaagttttctcttttcaatgtcggttacaaaaatttagattgctccgtaagattcggcataaagtttgttgctttaagctataaatcaattacccatttcgattttgtcccatttctcattgcaaagctcaagataggtttggtttctaatctgtcgttcttgctctttgattaggttacaagcttaagctttttcatagatagatagaaaagagaatg

SEQ ID NO: 12700 - DNA, 3000 bp, Unknown
  misc_feature (1)..( 3000): cDNA_ID_2709413_gDNA_ID_2214566_Annot_ID_134966 3000 nt of promoter + ATG
tatgtttttatcaagaaccacagccatcttcttctcctcgtcaacaaagaaactcccacccgaataagagaaggaattaccagtgagaggtttcatgtcaacctttaagaacaacttgttccacgacactgcattgggctcaaccttgctgctaatccatatcttcaaggtatacggcgaagaagaccgctgacacaagaccgcaatctggttatccccaacgctagatagagccacagtatcaccaaagtaaggctgaaatggcagaggcagaggcggtctaaatctctccgttgtgaaatcaaaacacagcaagaaataagaaggatcttgtcctccatatggaacaaccttgtctcgtgcaaaccagtaactgtttccatcgatagacaaaccacggtgaacaaaatctatctcccaatccggattcacatcaagaacctcccatgaatcagactcaaaactgtagatttcaaactcacaaagtaagtgtctccttccatactcaccgtcatccacaaatctcaaaactttatgattcttcatcacatcgtagcccagagcatacctatcccatttgttgaaagagtttctgggtttgatccaaattgtttgcccaacacaagggttccaaacaacaaccctagatatgtctttagtggtgcataacaagaaaccctcgcagtgaaaaatgttagatatgtcgacttgtgcaccaccgtctaagctaacaagttgacctaaacgctctatgggattagggtttagtagattgagactgaataaagaaaccctaaaatcgagcatcatcacaacatgaaactccttactctgcttcttctttgcttcttctttatcgatgtgcttccttgtaaaagacatatctttggataaagtgttcaactttttgcatgtgaatcgtactcttctcagagatgtcactggaaacttcgagagcacctcctccgccacatcctttggaagatccgagagcatcgtcgttgattgtttttgcatatcgaagaaattttactttaccttttactctgatttcttcagagattatgagagaacgaacacttcagaaatgttagatgtttctaaattgggcttgggctttaaagtattacccaaaggctattaaagtcgttttttccaatttgggctcctgatttattagtatgggagggcttagttttgggctttaaagtatgccccaatgcctaataatgtctagctagttcttcgttatactaaagaacgaattttggaaattcttgaattacgattgtacccttatattaatttcatcttttgtcttattcttatttatgcaaaagttatgcaaaagttttaagaaattagcagccaagcctaaagaatcattgagagtttataagggtgatttggtaattgagtagtttattagctaatttgatttcagtggcacgtggtaaattactggtggtttaaaactattgtacgtggacgattcttagccaacgaactagtacactctagtgcgaacaggtacatgattaaattcgtggacatccaatcatatctcgtccaagataagaccaaaacatatgaggtcattactcactaataaacatttaaacttttgttttgtcaacgaatagtgtgtttttcttttgtcattccaatttttttctgttttcttttcactattcacttttggtccataatattttatgggtatataagataatcgtttttgtcttcatacatggtaacatggatgtttatatatgtaatagtgttaaaaagaaaaagtggtcggttatacttaacttattatgatagagctttgaaaacaaacaacacgagatggagaaattagtcattcaacaaaagaaaaggacgaacgcagtgacttaacatgaaactgtgagcggcccaaaatcatttatgtaatggacccttaacttttcatgcacacgatttttctcatttatatgtttttctgctctctttttttcctctttatcattactttaatttattttatgttcttttttcgaagcaccataattgtatgctttcaccaaataatccaaatttagaatcattaatatgtcaaaaaagaattgcatatattcaataaaacgtaatgctaagtagtacaatgcatgtattatacaaaatgtaatgatatagatccaacgtatatatcaaagtggaccaaaatatatcttatgtattagacgagtttactatgcaaaatttatgattctattccgcatggagcgtgctaatactacttcgaacccctttgagaccaatatgtgattctatattctatctagtacaaattatgagaagtatatacgtacgatgagagtataaaacatttcaatatttgtatagagaggacaccacttggttgacttgacccacgataagatattgaagaaaccaaacttgtatagtacgaattcgaaatcgtaattgatgatgcgattcgacaagtccaggggctccctcccacgcgcaatgggcccagcaaccacgtgtggccactagagagaataaaccattagcccacgtgatcttgggcccaatcaatctctccctcacattaaacgacaaaacaaaagctcttctgggttaaattgataaatatcaaaactttaaaggtaatttgctaaaatcgccacacaaaaaaagtcgcagaaaatatatgaggaaacaaaaagcgaagacgacaaaaaaaaaaaaaactctgatttttttttgttatctctctctatctgagaggcacacattttgcttcgtcttcttcaatttattttattggtttctccacttatctccgatctcaattctccccattttcttcttcctcaagttcaaaattcttgagaatttagctctaccagaattcgtctccgataactagtggatgatgattcaccctaaatccttccttgtctcaaggtaattctgagaaatttctcaaattcaaaatcaaacggc

SEQ ID NO: 12701 - DNA, 3000 bp, Unknown; identical to SEQ ID NO: 12692
  misc_feature (1)..( 3000): cDNA_ID_2709409_gDNA_ID_2214566_Annot_ID_134967 3000 nt of promoter + ATG

SEQ ID NO: 12702 - DNA, 3000 bp, Unknown; identical to SEQ ID NO: 12691
  misc_feature (1)..( 3000): cDNA_ID_2707060_gDNA_ID_2214566_Annot_ID_134969 3000 nt of promoter + ATG

SEQ ID NO: 12703 - DNA, 3000 bp, Unknown; identical to SEQ ID NO: 12682
  misc_feature (1)..( 3000): cDNA_ID_1809125_gDNA_ID_2214566_Annot_ID_134971 3000 nt of promoter + ATG

SEQ ID NO: 12704 - DNA, 3000 bp, Unknown
  misc_feature (1)..( 3000): cDNA_ID_1808196_gDNA_ID_2214567_Annot_ID_134975 3000 nt of promoter + ATG
gcttacttgcgggtgaagtaaaagaagatctcaagaatatacaagaacgtgtgattctctcaattaaaagagtgaataatagttcgcaaccgtcagtaacaccagaatctgatccgaaaaaccccgatgagtgcctccaaacacttcaggaaatcccgggaacgcctcaagatttgcccttttacttcttcttgttctgcatcaggctccttgaaaccatcataatagctaaaccggaggagaacaaagtcaaggtcttagaaaacaaattcaagacgaggtcttggataagtgattgggacagcaagaaaattatgccggcgctaaagctatcactctcattaggcttagcgattttgctaggttcgatgtttagtaagccaaacggttattgggctggtttacccgtagcagtcagcttcgcagcggccagagaggcgacgtttaaagtgacgaatgtgaaggcacaagggacagtgatagggacagtgtatggagtgatgggctgttttgtgtttcagaagtttttgacggttcggtttctttctttgcttccatggtttctcttctctagcttcttaagcaggagcaagatgtacgggcaagccggagggatatcagcggccataggggccgttttgattctcggaagaaagaatttcgggccaccaagcgagttcgcgatcgagagaattatcgagacttttattgggttgtcttgttcgatcatggtggagcttgtctttcagcctacaagagccgctaacatagcaaaacttgagctctctagaagcttccacgctttgtacgagtgtgcaagcttgtttggagctaaagcgagtaaagcagatataatggaaagtcaaaagaagttgagaagtcatttaaatgagctcaagaagttcacagcagaagcccatgcagagccaagtttctggttttcgcctttcaacttttcttgctacgaaaagctgttcaagtcattgtctaaaatggctgatctattgcaattcagcggttacgccataggctttcttggagaacaaggaaaaacaaaatcaccgcagtgtaaggagattctaagcaacgtagacaaagatctcaagagtctaacagaaagcataggtcttttagccaaatcattcgaggaaatcacacttctaaaatcactagacgcactcgaaaaggcgctcgccaagagcgacaacacctcatgggacattgagctcgggaagacaccgaaccctagcttctcaaccgccgtgagcgagccggagaagattttagaaacgtatctccagcattgcagaagcgtggcggatggactattccgtgtggaagaagatggagaagaagaggttgaagtggacaagagtgaggttgtgttgagtttgtgtgcattagggttttgtgtggagagaattgggaaagagacaagagagattgaggagatggttaaagaggttgtgcaatcggaaaatccttcaagccatgttaacttgcatgagatctcttgcaaaatacgttctttgtataaatgataatattttaccattgataaacaacaaatggcgtgtgaaagacgaaaacgtttgtttttttggtttatcatctctttttttttttgttcctgtaataaggctttgtggttaaccggtttatataccaataataccaataccaattatgtgaagactgaagagtctaaaaagtgcatagaaaattagtaaataataaatgttgggactctttgagtaattcgttggcctcttattcaaatgttaaaataatataacaagtttagagaaaaaaaaaagtgtggctgctgggattcgagcccaggtccccacggccacaacgtgggattctaaccactaaactacagccacttttatgtttgatttcgcttgattgctttatttaattcgtattggtcaacgacaactttaagactttaatactctattttttatagtttttttttcatatctaatttctttatatactaagctatttcgaaaagtttatgttttttttttcctaatattctgaaatgaatgtcattttttttttttattcgatgtttacactcatttttaaaagttagtcagatagcaaaatctcgcaccttttctatttcaagttaaaataaaaaaaaatctcttttagttttatatttttcttggaacaaataaacactgaaatcaaagaaaaatcatattctcgacaaattgcgaatgaaattatgaaaatggtgcgatattcgtttagcgcaatatcaagtcaacggttcgattcctacggcgaatatctaactcccgtcaatatgtaatactctaagcttttctttttctttttattaatactcaagtttaagttaatcgagtcgcgcaaatctcgaaatttaagatctataaaatccttaaaacccataatttattattccatcttccttcctcagtcttaattcttaaatgtcgagaatagtctaaagtcaaactctcttagtctttgttttctcttatctttctttctttattttttgtcatctctctttcttgatataaaaacgttctcattttctttattgaaactttattcataagcgacgtttggtgaccaacttaaaattgggtttggtgcatttcgtagtctcacttttcgttcatttgaagcttcattttttctggtagggatttttttttttttttttggtgtggcttagttaacaaattttgtgggactatcttcatgtttcatatgatttatttaaatttacatgcgtataaatattgattccagtgaatctcttaatgtcatcaagatcagaagacaatttttatttttcatcaagtttcttagatcatcaggttgattgatactctaatcagtgtgattgtgtatgtaaatgcatgtgtattattctgtttttggttttctaaatctcatgatgaatctgtgattagagtttattaaatttgattcaaaattgtagaaatg

SEQ ID NO: 12705 - DNA, 3000 bp, Unknown
  misc_feature (1)..( 3000): cDNA_ID_2709492_gDNA_ID_2214567_Annot_ID_134976 3000 nt of promoter + ATG
ttttcgatatagttttaatttaaatgtattttaaaattttgaatattttgttaattatcataatattttgtatagtattttatctcataaacacttaaatcaattaatatcgtttagatcttgagtaaaattttaaacattaagtattttatctcataaacacttaaatttttaatattgtttatatagtttggattagtgttaatttaagagataaaagctgtacgggagtagtagatagcaaagaaattagttttgtttctttctaaagtaaaaagtaaaagatgtgatttgcatagaatgtgcaaattttcctttccaaaaggtgtagttgaaacttggtgtgaaacaaccaacagctgtacggatttgaatctgaagttgctttatctttctcaggtttatacctttctcttgttttcttgaagtttggttttattcatttttttttaattgaattgtgtaaacggcgattttctctcttatgtgaattgttaatttatcttgtcgggacgaagataataatgccataagataactttgcatacttccgagttacgaatttacctatttgataaatttgaataagtgtaacttataatatctacaaaataatgcgtctattacattaaactagattgatactaaagataaagaatgttatataagctgtatagatccattacaaaagagattaagatatctttgtttccaaaatttctctgttcatcaagtttcatactctttttacaacgggaaaagaaaaaagagtatgaaaattaaacagataaactttggaattagtataataagatatcgcgtatttgcttttcaacatacaaagaaaaaatcttatttgccttctacaagatttttattgccctatgtatacaaaataaaatttgatgctaactttagttttgcatgagaattttccacgtgtgttaagtgatctccaaagactgatgtctgctgttgcatgcatgtgctgaacaatattcataactgatcaattttgatattatatgatcttgagtcggcaattcttgtttctggaaagtctttgtccttttatagttttgagtcggtgagtcttgtgttcttaagaatttctgtttgtcatctaaatacaactggtgaaaaacacaactggtgaaaataatttatattctcgaataaataaactagcagaaactagtgatattttttaaaataatagtccaaccaaaaaatattgtaaaataaaatatattatttaattgtattttctataaaatataggatatatatatatataatgcaacattaacataatagtaacactatataatataaaaaaatttaaaaacataaagtaaatatgctaaaacaatatattgagatttgggaaattctctttttttaattcacgggttttatttaaaggaatttcataatctaaattgcttagtccgtaaaatacacatcttgctagtatacttttttttttttgttaaagtcttgctagtatactaacaagaatacaaaacgaaaatacaaaaactaaattcaaatatctaatccaaacaaattcaaatctagaaaataaggttaaagcagaaacaaactgcaatttattatatcggtgcaacatttttttttgtaaaataatattgctacaacattactgaagaactagttgaactacaagctactacacacaatcaaaccaactaagtgacagttttcttttcttcagaaccaaatcatgaatttaacttagacttggaccttattatgtagctagatgaacgattcagaagttcacatagacagaaaacgcacaaaagaaaaaactaatcgttgacgtcctctaaaaaaacgagatggaaaagcggggatctcagaccggaacacccggaaaaagagatatagaaaccgacaactgttggagatctgctacgatactctttgacacaaaagctacgagaccggtagaaccgaactcaaaactacgaatgtcggaagtgatagattcgattctagaattgaaagggatttaatcaaattacatagtctaagcctaaacctttttaaatatacggatttattatcttcttcataataaaaagcatatacgaaataatcaattttcccgctttgctacactgtaaactattttcactttaatgttcaatcataaataaactattccctaataattttcaactatatggatatatttttaaattgtttttgaaaataaatttatgagtttactacaatattattcactttcaaaatataacatcaattgaaatcgttattcaaccatattttttttattgtatcaccatctatattaactctatgtctgatttttctaccacacaatacttttataaaattcactacaagaatattacaccatctatattagttggtcaaagcacacacacgtagatcaaactcttatttgaactccaataatgatacttgaattcctcattagatacggatacaatctttttcattttatttgttgaaaacgtgattaaagaccgctttgtgtcaaatactataaaactcttggtcctttttaatatgttccagccgtatagatcagtagaggccaggaacacatatatacataaataggcaccaaatatgatcattactatatagccactatgccgtatcaactaaacaatccattgattaaaagataaaatttgattttcattacataataatccattaatttcctcacgtggaacccacttggtgtacttccacgtcgtccttatatcactgacccactcatcaaatcaacgcatctttataagccccttcatcgtcacacacttctttcaaattattccatattcttcttatttccattatttcacctcaaatcattagattcttacacaacacaacaacaaactagctcccaagtctaagcttttatttcacttcaaagttgtctttggctgtctctctctatatataatgctaatg

SEQ ID NO: 12706 - DNA, 3000 bp, Unknown
  misc_feature (1)..( 3000): cDNA_ID_2709490_gDNA_ID_2214567_Annot_ID_134979 3000 nt of promoter + ATG
attttatatgacaacgaacgattaagagttcgtatttattgttttataacataacgacgtcgacacagaactttcaaggctaaactcactttttgatggagacgtaagaataatttatgggtaataactcattaatttgttactaaatagaaattatttctctaaaatgcttttcaattcatatacaaaggatacataggaaaattataaaaagtaatatttgtatgtacggaccatcagaataataacgtaatattttttaatcaggttgcatattacctcgggcttccattgattaatgggtgcataagtaattaagtaaattcatatgcaaagttaagagtggtacaaattataaccgcatatgcgttctttaaaaaagtaattatgaaaatttgttcggcagatgaagcaaatgattagtacacctatgccaaatcttaaaaaattagaatggaaagcgatatatgaaattgaacgtagtcatattgaattcgtaatcgagactttcactattgtttttaagaatgtttggacgagaaagaagctcataaagcaataaattagttaacgttcataattgaagcattgacaccaggagagaaaaaaagagcaattcattgcttccctagtaaaaaaaaaaaaaaaaaaaaaaaaaaaaaaaaaaaaaatcagatatttgtggataaagagttaaaagaaattgtttcgtcatttttttctgtcataatttcgtcaactttttgtttaacaatatgcattatataaattttattaataatagtaacacatagacacgattgtagcataaaccactaaaatacatggtttcagtgtatctaagcttttgacatgtagaagttctacgtttttcatgataaattcgaaaaattattgagaaatgatatatggtcaaaatgaagaaaaaaagagagaagataacaacaaaatggagaaggacaagagcacaaaagagatgagtgggattatgaaaaggtttgctgatgatttcatgcatgatcaactaacgttaaagattatttgtttttagggtaataatacaacatatacgccattttaggcaatctctttctgaaaaagatgttcgcatttatatacgaaacgactgattattaaagatatatactacatacaacaaaatcgttagggaaaagtaaaagagaagataaaatgtagagacaatttgaaagatctcttctttgttcttcttttgaaaataaaaataaaagtagacataaaatagaagttgtaaatgacaggtttcatctttttcatgcttttttttccctttctttacgtcgtttgataccgagtaaagttattttcatactaagattcagtcattattcttgttagagttattgttcttatatattgaaatattaatatcaataggaaacgagattagtatcatagttttttaatgatgacgtagaacatttatatttcattgaatagttaatagtagacaatcaatggttgttttattgtgaatttggttcacccctttcatttgttttattgcaagattacaagcttatatatgtttgcaatcaacaagataattaatatattcaaaaaagattcatataagagataaaaccatcgccatgaagatatctaatgaacgaagacgaaaacgacagatcagggacaagcctactcttgagtcttgacccacaaagataccctaattaagctttcatgattacggatctatatgataatgaaccctattaagcaaagttaatttatacttagccatcaacgtacatatatatttccaataataaatgcaaataaaaatgataattatgacaaattaaccaaaagttaagttagcaatggaccttggcgttttaaatattggcatggttagcaaatagcatacaaatatatgaaatgatagcctgaaaatctagtaatattatttttattttagtttataaggctcatccattactttttataaaaatgcctttattctgtttactgaaaaaaaaatcttttaacatagttttgtcaatttaaaattctgactgacacaaaaatgtaagtgtaaccaaaacagaaaagtgcgatataatattaaaaatatatagttactgataaaaagtcatactatttagttcagcattttacaatttcaaaataacaagattcccaacataaaaattgctgaaccagaaagcacgactatagctagatctaatgactagaatgaccaaagatatgattttcatttgtgagaaaaaaagaaagaaagaaagagttaaatttgtttgattgcacaactttttcgaaagtccctcttatcactaaaccaattctgaaatgttcacaaacttgttttacttaatggtaaagataaagctaaaatagtattttattaataaacacattgcttaaagcaaatcaaggtctttgactcttttggttgtcacttagaattaatgtcttcaattatctattcatctaggtccctcttatttcttcatacttagaccttgtaaatcatatgtatacatatgtggtattttctaacaaaaatcatatattatagatattattcgacagagggaaccttataggcgaagaaacgtccctccactcaaaccctaaaaagagaatcacaaaaataataatattaatacataagcatatacaaataatgcatgagagtggaaaatatatataagaaaagaaataaagcataagaacatgacccatgtttagaaaagcattatgttctcactttatctttgtgctccttcactatcatcatcttctctctaaacctctatcttctctctttctcttttggttctgtgctcgatctcctcacatctctctttaacctttggttcccttctttcgtttttatatgattctcccaccatttttgttcttttgagttttaaagatccatcaaactttattaaagaaagaagaacaaagagataaaagggaagaagaaca

SEQ ID NO: 12707 - DNA, 3000 bp, Unknown
  misc_feature (1)..( 3000): cDNA_ID_2712397_gDNA_ID_2214567_Annot_ID_186060 3000 nt of promoter + ATG
ctctaccaatcaccaccaaaccattgaaacggagctctacaaatcggacacgtcagcttataaaaacaccacgaatctatacaatccacgtgaaacacgtgcttgcatctcacaagaactctaacgacgtcgtttactttaaaatcctccaaacaaatcacacacacgtcagctttaactccgtcaccgtctccgccgtctccaccgccgcatttcgtgagtctcacggcgggaggtaatggctctccggcttcctcatcgccgatttcttcctttggtagcttcgggtacattacgaaacagaggagaataatagaaccgtagaagaggataataaagacgacgcaaagaagtctcaacacgattgattctgatcccatcactgtcgacatctccggtgacgccgccgccacgtaatccccacaacaacttgatgccatttttttattttaagaaattaaattggcttattggaaaattttgtgaaattgatttgagtttattgaattgtggggatgcatagtgatgttcttaaatatggattttttttttttttgttatagtgttaattacgattagtgtgtgatgaactggtgaaaaactgaattaacgcaatttagttatagttatgcggagaggaatgtggcgggaaggattaagaggagaatattcgagctaattaaaattgttaattggaggttaatcataaacaagttatgagtttttatttcattttattatttgtcatgaagataacacaaaactaactaaatttaaattaagctaatgcgcagttttgtttgttttttatctggagttttttttgtttcagttactatttgatgatggatgattacagcagtaaaaaagaaaaacacatattaactactcagccaggcccagcccaaatccctctcaacgcagccaggcccagccgaattatgtgacaaaactaaaaatgatgaaatacacaaaatttggaggatataaatgtaaaataacaaaagctaaagggcggttccaactatttcccaatctttataatataccctcgagactttccaatctttcctttttgcctcagaggccattggcgaagaacaaagtttgaaccttttcttcatccatctctctccgtcgcttcttcctaacgattccttcactcgaatcaggtaaactatttactcttctctttctctttaggatcgattggaaccctaggatctctgagtttttctttcacatttaggatctatccctttaatcggcaaattagtatgtgagcttttgatgatttggggcttgaaaccctagatttcagcttaatctgggtaatttcattgggttgtgaaatttctgtgtaattgtattttggagaagatattgatttggttaggtattaatcaatctatatttctctgttattggtttaggtttgtgaaggttttttctagggtttcgaaaagatgccggcgacagcaggaagagtgcgtatgcccgcaaacaatcgggtgcatagtagtgcagcgcttcagactcatggaatatggcagagtgcgattggttatgatccttatgcaccaactagtaaagaagagcctaagacgacacaacagaaaaccgaagatcccgagaactcgtacgcgagttttcagggacttttggctcttgctaggattacgggttcgaataacgatgaggctcgtggttcttgtaagaagtgtggccgtgttgggcatttgacgtttcagtgtaggaatttcttgagtactaaggaggataaggagaaagatcctggtgcgattgaagctgcggttttgtcggggttggagaagattaggagaggtgttggtaaaggtgaggttgaggaggtgagtagtgaagaggaagaggagagtgagagttctgattctgatgttgattctgagatggagaggattattgctgagaggtttgggaagaagaaaggtgggagtagtgttaagaagacgagttcggttaggaagaagaagaagcgtgtttctgatgagtctgattctgattcggattctggagataggaagagaaggcggaggtcgatgaagaagcggagttcgcataagagaaggagtttgagtgagtctgaggatgaggaagagggaaggagtaagagaagaaaggagaggagaggaagaaagagagatgaagatgattctgatgagtctgaggatgaagatgacagacgtgtgaagagaaagagtagaaaggagaagaggagaaggagaagccgtcgtaatcattctgatgattctgattcagagtcttctgaagatgatagaagacagaagcggaggaacaaagtcgcagcttcttctgactcagaagcaaatgtttcaggcgatgatgtttcacgcgttggacgtggttcttctaagcggtctgagaagaagagcaggaaacgtcatcacaggaaagagcgagagtaggaaatcgatctatatgagccattttcactctccatttctctcttatcaatgttatgtacaataatgaaacatgtctttgtatgttggatttgatttgtgttgaaacatgtctttgtattttcactctccatactctggtttggtctgtttgtttcaagcttgtgttataacactattgagatacttggtgttaatttgtgtctttttactctattccattatttacgtcggcaagttagagctcacgtcggcaagtgtcgttgtaaagagatcacgagacttgtgggttggatttttggcatggctctagcctaggaggacaatgtcgtcatttaactggctcattgctcaatacatatctcgtcgtgggtccttgttaatctcttctccaccgttgaaccatagtttaaaatatccaccgttaaaagcccctttatatcccaagaaataggtgaacttgttacagaacaagcaaagatcaaagagaaaaatatcccaaaaccaaaaacagaggaagaaagaagaagaaaagatg

SEQ ID NO: 12708 - DNA, 3000 bp, Unknown
  misc_feature (1)..( 3000): cDNA_ID_2709461_gDNA_ID_2214567_Annot_ID_186059 3000 nt of promoter + ATG
atgatatttgccaaaaaaaaaaaagaaagaaagataatgcagtgatattgatatacgtaaacacacatttttccttttaacatttaaaagttgagagattttagaaaaacttgggacatgtttttattgacagcttgcatattttttcttaatttttggtgaaacggatcaaaaaactcaaaatttaacgctcgaaaaaaattacaaaccaaatgtagaaggaatccgaaataaaatggattcaacggaaatagtggttcttacttttcacataaaaagatggttttgtaacggattggcaaaaatcatatggatttcatcaaaattagatattcttacttttcacataaaaagatggttttgtaacagattttttcaaaatcctatggatttttcaacaaaattagctagtcttacttttcacaaaaaaatatggttttgtaacgtttttttttaaatcgtgtcaacttttaaatcgtgtcaactttacgtctaaaattttggctttaaatatttatatagaattgaagtttggggtttagtatgcaagaaactcgtgttcgggattatttttgtttttgttcctacaaaaataaaatacttgagattgaacagaaaaagtttttacttttatccgctatattgaaatctcaaaattcaaaagtgtgaggcaatgtatactttcccttaaaaaaaaaatagagaatctatgggtccgattggtgacctataaaggaatacaaagaatgaagaggaacatgactaaaaaaacaaacatgaattttttttgataaaatagtaataaaaaatgggtgtagaggaaaaatagaacaaatgttactgtaaatgataacaaaaacatagaataaatagtaacaaaaattaaaaaataaataaattatttttttaattaaatattaaatataaaacgaacataaatttaatttttaataaatatttaaaattttttcttgtttgttcctcatcaaatttggaaatgaacaattttcttctatcatttctaaaaaaataaggaatgagtaggaataatgtcaggtctacatgttaccatttggagaaaaaattggtgaacaaagaggaacatgttgttcgtgcccatttcttttcgaaataatggtcaccaatcggaccctatatatagttgtaaattaaaaatctactattactatatatggaaatgtaatgtacatgaaatgaatcataaataagttcattttggtttacttccaaataaaatagcaaacaaaaagaaatgattccaacattcgaatcctgctggcgtgatttagattagtaattatcacaacctccaaccacaaaatctaaataaataaataaaccaccacccactccaaaaaacgaaaaaattaacattacgaaagaaaacatttagcattaaataagtttttcgttggcaaaatataaaataattacgaaaataaaagtccaaattatactaatatttatgacataggagagagagtgatggtagtaagcggaagaggcaatctcacgagagttgacgagaatttatgaaataaccgaagagtcagtgatcatcttacacgtggcactcgcttagacattcacgtgatccaacggtgatcgtaggcacaactttcgaagaagtaatatgaaaatagaaaattaagttaaagggtttgtttgaagctattttgactttttagagtttttatttcttaaggaacaaaagtctctatattcatagatctctttatttccttaattggtctttggtaaaatttccacagttttgagattataattcctaagatggaaagttcaacttcattcccacgcgcaaatatgatctataattatttttgattaaaagttacttcaactaaatagatagtacatactatgagataatgagactacaataagtcccttaatgatgttacggtttttttgtaaacgatttttacatcagtacattttttctggttttataataatgtcgtattgacattttttatacaaaaaaaatcaatactttatttctttcatacaatttgctttttttttttaatttttctttttttctagagttaaattaagttaaatattttacatcaacctttttttattaaatatgtaaaccataacatttgaaaagtttataaacattatttaatttgtaacaaacgaaatacaatattgtgttactatatatgatattattttatttaaagtacgttacaatatacttttattacaattaatcgaataaaatttttttatgagattttacgttattaaattaaaataatgcacaaatacaaaagaagttttggatccaaataataatttatttttacaattttaacacatacacaattcaaaactttgaatgtccatctaaataaccttttttgaccctgtcaaaattcaaaattccacaaaagaaaaagaaactcccccaactacaatattttcctttatcaacaaagaaaaaaaatacttttaaattcgaactcacataataaaagcaaactactaacggtaattctaataagcacgtgtcgtatacgcgcttgtttacgagagtaaacagtatacacacaattcaaaacaccctgacctttgccttcgccactagtcaaccctcttcttcttctccgtcaagagagcaaaaaaaaaacttttcttctttcacaaatttgtttttcctttttatatttaacactcaataacataacagaataatattataataatatctctcatttttcatttttctacatctttatattctcttccctttatataatttccactcaaaaaaatcattttccttgcacacaagtcaactctctctctctcacatcttcttcttcaacctctgtctcttcatttctctctaccatggatcaacaatctctaatctaaaaacactttcgttgtatctaaactctccatctccaaaagaaaaactttttttcttcttctcagatg

SEQ ID NO: 12709 - DNA, 3000 bp, Unknown
  misc_feature (1)..( 3000): cDNA_ID_3026152_gDNA_ID_2214567_Annot_ID_186058 3000 nt of promoter + ATG
tttcagaggttgaactattcatcacgttacagccggaaggtgacccggctcagcacttggttcaagagcttcttttccgtgctgctaagaaagctggtaataatctatcgaaaaccgaaaagagaaatctttgattcgaagtattggatcaagtgttaactcttttttcttattgatgtttctaggtatggatttccatgaactgcttgagataccacaaggggaacggagacggtaccacgatgatgtttccattgtagtgatctctttagaaggaagaatgtggaaatcttgtgtataaacaaaaacctatataatgaacatagagaaaacttaaagtgtttctgagatgatcccgaattcgatgcaatgaaaaaagctcgatctcacatcgaatctacaacctcaaaaacgcaggaagacgtttagtttttgtattatatgttaataaaacagtaagagaaagttttgcctctggaactaaaatacaagtctcattaattcacaagtcaagtcttttatctatctgttttgattgtttattgctctcaattaattccatattcaaagatggatctaggcttcaaaaccaaaccctttgacttagaatttaagacacttcgatatagattcgacatttgtggaaaccatttgcttattggtcaatgcaagctactgaagtagttagtgtcttccaacttctaactgtaatggaatagagaagtaaatgtaagaagaggaagtggtggatatatgaactcttgtcccatttatgaattaaatcagtcttcacttaactctcttacttcccaccaaatcttggcctctctgtttctgtactgtttccaccaactaaggcaacacaagtttggatctttctatttttagtcttcattgtacatttctcgagtctcgatctacattttcacaatgcatagaaactggatacctagaaacgatatttgtaaaagaaattttgaaagcaaatacgtgttggaagtgttagcataatatgatttaataagaaatttaattctcaaacttagaatactagtatctttttttttttggccaacttagaaaactagtatctacgttccaagataatgtaagtgctgttctacaattattttttagattacatcatttttgacttcatattactatcaatatatatatatatatatatatatataaacaacattttgaatgagtttatagagaaaggtgaaaataaagaatttaacatatctttgttacatgtaactatagtgaagttttgagtacatatgttatatgtaccacccaaaacataaagtgtacaaactattttcataataacatacacatgatagagatggatagctaagaccatccaaaacctctccagcaattacagagaagtcaaatgccaattcaccagcctccttgttttgctagtatcacgtgaaactaatgaaatagcacaaatgaggctctcatcaagttgagattccatcaatccgtaatgacgcttctcatccatgaaggtttgactcctctcatttctcactgataagtttttggagtttggatcgcttctgatgattagtgtttgccttcacgatctcatcaaacacatacacattgccacctttttctcagttttcttttccataaaattataaaatttctgtcttccaactaattttcaaatccatgagcatcttctactcatgagattttacaagaaactcacccaatcttgcgtcccagtcaataactgataccttcgtggaacattctcaaacatagaatgatcattcttgaacttcttagccataactttataaagaaaacgatttccaatcttctagcctaatctcacgtttcaaatcactggtaaatgttttcacgttgtccatcgcctcttcgaatgagaccatttgtggagaatctggacaaattaagctctggctagtgtgtatccgggtaacccaccatttgagagagaattgaatgaaaacaccattagaacataacaattgataaaagaacaagtgagttactgctcacaaatttgaaggttttataaataatttaaagtatatagtattataagtttacttataagattaatataatatttataatcacttttttaaatatgttatttgattttcttctaaattttagaagtaaaaaaattatatgaaaactaggttccagcataactcttctatgttatacatagaatttagtgaatattgatgataagttctaacaaaaaaacttttgtatggaaaaattcattttaatgtaatttaggggatagacttctataacagcagagtaagataagtatattataacattccataaaaccaaaaaaaaagaatattgttttctaaaacttgatttgtaaaattgaaactattattacttgatatatattgtgttacaagttgttgtttttttgaacattcctttctatatttgtaaaagcaaaaaaattatttccatttttatgaatttatttgttcctctcattttcttcttcataaaggttataaaaagctctcaacaccatttgttttctcttcctccctcttcctcaccattgattcctctcagagctaaagcaaaagcttcttccattgtcttactttatacgattcgttgcttttgaatctcttctcacttggcttcgtttctaaacgtaagtttctctgccactatcgttttccagatgtttgtgtttgatttcgtagatcgttcttaggagattaagtagagagatttaattatatctaatgattccaattccattttcgtagctttgcgttgattaatctggattatagttttggatttgggaatagaaatttcactgtatttagagataatgtttaggaaatggaacttttgagctatgtgaatttgtgattatgtgacattagaaccctaattttgagaaatctctgtgtctctctcccttttggtacaggagttatgaacatg

SEQ ID NO: 12710 - DNA, 3000 bp, Unknown
  misc_feature (1)..( 3000): cDNA_ID_2994460_gDNA_ID_2214567_Annot_ID_186054 3000 nt of promoter + ATG
cccataccaccacaacacgctttgaatcatcttcaatagatgataagagtcatgtagtaaacgctatacgactattcagtaagaaaataaataatttggtcaactatttcccatcataaatatgacattactatatgagtgagtatatagatatttcgtcaaaatgaacgcaccgatcaatggaaaataaaaggcacccatcaatgagaaccttataataaaacacacacacacaaattccgtatagaccaggtttcagtatttttgttagtttggagtgtaataactcttttttttttcttggagtaaaaatgagtacaagtaccttagtgaacaaatttattgttttgttggaattaaactgttgatcaataattcgacacgacagtaaataactcactgggacaaccaaaaaagtcatattaattcatggaacatatatatgctgacaaacaaaaacaaatcatggaacatctatttggtgttttccaaaagcaaatatcgtctttaagtcagaaaatgcaaacaattttggccgcaaaaaaaagcatgggttagaaagtttgaaagaaatcgagttatatcaaactggtgaaaattggcgacacaatctgttttttactgaatatgtttctattaaaacgagttcggttgtgatgtttactcaactagtagaaaaaaaaaaaaaaaaaaagaagaaaaacgccattctggtcaacaaattttgggccaatattccaaatacacgttactatattttcgattgaaatgtcgtattgtaattaatacagtatagtagtagaacaatattagagacacgtacgtaggtttggttagatgcttttgtctataactctatgccaagtaatgattggtgattcgtcaatcgtaattctttttttttatatataaacccaaataatttgctttacaatctctgaattctatgttttgagatcatccatattccaatctaactgtcgttaaggctcttctttcaaaggaagaccctatttgcaagttggacacagacggacaagttctcaacgattaggagaaaatcgttaggactaatcaaagttttagataggtaccactacctaaataaactatgtacgaggacgatacatccagtacaagagaaatatatatgcaacctcatcatataaaatcatagtcacgagattttatgacagatcttagtcgtacataaatggctgacagatttgcatgatatattgcaatgatatatttttttttaacccaaaacattttaccagcttatatcaacaatagacatatatataatctgaaataaggaatctaataaaatagctcttaatattgaatttaaagaagaaaaaaagtgaaacaaagcattcgagatttgatgtcgaagtccacatcgggaagcgaaggtcatcaaacggccacttggactccgatgagaaaatttcaagtgggctgcttgttggcttttagtataatattgaccacaaattatttatatgctttttagttataatatgcagatattgtatctatataatactccatgaatagtatacatatgagtgtgtttctttttgttaaatatccaaggaagagtgcataatcattttggaaccatttatgtttaaataataaaatttatgatatatatactgtatcaaaataactatgtgttattagagaaaatgaagatatagtcattaagttaggtaatttaatatgtacaatattttaagaatatcatgtcattttataaatttatattatttcaaaccaaactaaattgctttagcttctgtcgaaactgcctactatttaaatttgtttttctaaaaacttctttgatcgaattagctttcccgaagttctagtacaattctaaaaattgtgtactagaatctacaaatagcatattaaactttaaatttcctttgaactagcttgtacataaactaccatttcttttcttgtttatttgtgacttaagtgttaaaatttttcttcacaccatctagcaaaacacctaacattgttccctttccaataatcgaatcgcctatcctacaatcatcgataatttagtataggatctagaagacttactatgactaattttgacaatggtgaaataatcaaactttttttattaaactaatgtgttgtattggatcagaaaacatgatttacataatgtttgtaacattgatatcaccccctacatgtatattaaaagccttatcgactccaaatttttaccgaaaaaattgaaaaattgttcaaaaacacagttttaggatctcattatacagatcaaatcacacgaattcatatcataataatttttttggaagtccggttattttactaatttgatccaacatatctatgatgaatcttagttaagatgtggtgatcactcaaacagtaaatttgtaaattttgttcattaaaatcagtttcttgtggacaaaaccatcctatttttggcaaatcaaagaaaatataattaatctcaaagaaaaaagctacaagaaaaaaaaaatggcctcaaaataaaaatagaaaatatctgacaagactgcccgaaatcacaagtaactgtaacaaaactgacaacgggcaaaaaaaaaaaaaaaaaaaaaaaaaactgcccgtcgggcaaatcctccaatagagagtcgtctctctttatctccgtctctctcttttttttttaatcaactttataaaaaaaacaaaaaaaaaatttaaaaattaatatcttctcaacaaatgactctatcaatgtgtacataaatgtgaatcttcttccctcttcttcttctccattgttaaaagctctcacacaaccaccgttctccgtcacggtggcgctttattctctcatcggagcgcctcaccggtggcagacggtgtcgttgttcctctcctaaaacctccatcaatcaccatctctttacacagagctctaaccaaaatcttcgagag

SEQ ID NO: 12711 - DNA, 3000 bp, Unknown; identical to SEQ ID NO: 12706
  misc_feature (1)..( 3000): cDNA_ID_3026160_gDNA_ID_2214567_Annot_ID_186052 3000 nt of promoter + ATG

SEQ ID NO: 12712 - DNA, 3000 bp, Unknown; identical to SEQ ID NO: 12705
  misc_feature (1)..( 3000): cDNA_ID_2709492_gDNA_ID_2214567_Annot_ID_186048 3000 nt of promoter + ATG

SEQ ID NO: 12713 - DNA, 3000 bp, Unknown; identical to SEQ ID NO: 12704
  misc_feature (1)..( 3000): cDNA_ID_3026172_gDNA_ID_2214567_Annot_ID_186047 3000 nt of promoter + ATG

SEQ ID NO: 12714 - DNA, 3000 bp, Unknown
  misc_feature (1)..( 3000): cDNA_ID_3026176_gDNA_ID_2214567_Annot_ID_186046 3000 nt of promoter + ATG
tttaattaaatttgtattaactaagaaaatggtaaatccgtaattataaaaaaagttcatgaaaacgtgtaagagtcctctctcccactcttcttcgtcacattgtataatcccaaaactaactcaaaatctttttaacttcacacacacaaaactaaacacttctataattttgattctttcaatggaaccaattcttgaaaaaacctcaacacgttgggaagttcttgttcaaacagcaacatggacaattctcctaatgatcacagtggctttggcttcatttgctccggagatggcgtttgtgtcgaaattaaagtcatcttccgatgggttcgttaggattccgatggatttaccgggagaaatgttaatcttgccgtcagaaatggtgaagaattcatatttagacgtttttttaccaacgatattcgcaggagttatggtcattgcttctgtttctttattacgatcatgttttggtattgaaggtgttgtagaagaaatcgaagaacaatgttgatgacattttcgtcatatctatgggttatatgtatgtaattgatattaattaatcaataagggtccttagctcagtggtagagcaattgactgcagatcaataggtcaccggttcgaatccggtagggccctttcttttttgttttagaaactgttttcttgtttatattaaccgttcattttatttgatctgacggtgatgaatgtatcgttacaaatatgtgttggatcgatgacgtgtcattagatttcacaaaactctgaataattttcacaacaaattcttacactagggaatgcgaaaatgattttttgcaagaaatattataagccaattaagtgtatgaatcttatatataaagctaagaactttaaaacgctcacattgagtccatatttgtcattcgattcttatacctctaaactttaaattgctcacatttagtccttatttgtttttcaatcttcaaaaacatagttcaatcaattcctttgattagttttcgattgataatcctttaccatgaatttcagagattaaagagtaattagagcaaatggtacttatcattaatccattacaatgctgccctaattacaacacaaaacgaaaccctaaaattcaacccaatttctggaatttcttgatcgcaagacttaaatcatcatcattcaccagaaaacccagatctcaaattgatcaaccaccaaatccatatagagttcttccttgtctcttcaaggcataaacaacatccatagcagtcaccgtcttcctcctcgcatgctcagtgtaagtaacagcatctctaatcacattctccagaaaaatcttcaacacacctctcgtttcttcatagatcaatccactgattctcttcacacctcctctacgagcaagacgacgaatcgctggctttgtgattccttgaatgttgtctcttagaacctttctgtgtctctttgctcctcctttgcctaacccttttcctccttttcctcttcctgacatttttgtttttccagaaagttttaagatttgagttttctgatgagtagagaagaatttattttttatttataaagaagattgtttgggttagaaaatgaatcgtgaccgttcgttttattgtttgatcggacggtcaaagataacgatccgtgagaaaggtttatgagatatatggatccttgattattaatgaatcgacggttgtagattgggttattatgttagtcacggattgtggatttttgatttttccttttgaaccaagtgagtcaaccggaccggttatatgtactaaattacaatggatatcgaaaataattagtataactatggagtatattttacttttacttttcagctaccataaaaaaaggtaaattctcagatctctttttttactatccatatattttaaaaaatttaaaaattgtttttttacattattattatttggacaagttgaatgcacttggaaaaaaaaaaaaaacatattctactataagggtttgaatccaaatgtggtatagtggatatgttgaacataactccattgaattaatagaaacaattactgtgtactaaccgtaagaagagacgagactctatttttgttggaatgttctggtttgaagcatttttacaggacaacgtaaggatgtgtgctttagctagaatgaagcaatgtcgttgtaaggaggtgacgattattattctaactgaaaaccatattgttataaagcccttgagctccaaagctcttgtatatctagtctttttgttttctcctttttttctataactcaaaaactccactgatggtaaattacaaggtgttgttcttgctgaaatgtactaggatcatatcgatctcgaaaaactcgtaaaacgtgtgttcttgatttaatctccaaagtgaataccatgagtgtttgtcatagaattctcaacaagttgaagacttatctaaatcttgaagaatgaactcaaaatttctgttataagatttctttcaactacaaaatgatatgcaaaatattggtattagcttcataccataactagacgcacaaatcttgatgaaagaaacttgcagccaagaaattccttcatgaatcgcattcaacacaaagctcatcaaagatcaaaactctgctcttctccaatggttttttcttgcaaagtcaacttgttaaggtatatttggatcggtcctttaccaaaatgaaagaaaaaaactattccgctgccgggtttgaacccagatttcatcattgaaataaacatgtgtgctacagcggattggttgaaagtatctccaattaactagtatataccctgtctaattaatactctctacctatcacgtgttaagaccgaacacatattaagagaaagagaggagagccactagttttgtttaagtgttctcttaacaatgtgtgttcttgattcaatcttttaaaaaa

SEQ ID NO: 12715 - DNA, 3000 bp, Unknown
  misc_feature (1)..( 3000): cDNA_ID_2709482_gDNA_ID_2214567_Annot_ID_134981 3000 nt of promoter + ATG
ctataaatagtgaaaatcaaagttaaaaagaagaataagaagttaatatataacataagaaatttacatatactgggatctgaagttaagtatatagatttttaatattttatcaaataagaaatgaaaaaaaatgtatatagagataaacacaagaatatcgctaattataatctctttgcattattatttggtggatctaaatgtcgtatgtgcctatgtggcaattctatgttaaaaaacaacaacaacaaaattggcttataatctcttttgttggtatggtattttcttacactttaatcattaacaaatcataaacgtttacaattggtggtcgttgacaacgaatatacgtgaaaaatataaccacaaaacatttgaagttttgaacactcaaaaaagtaaaactcaacaaatttagagtattatcttaaaatcgtttttttttcgttaagggagttttcttaaaaccattcaaaagatctaatatagactatatatactaatttgctggtcaatttaatgccataatacaacatttccgtaactagtttgatagtgatggagactaaagacaccaactaatatctattaacctaaatttttgacaaaagaggctaactataacgatattattttcatataatgattttgttttgttggttgaattaactatttgtaatgatattaacgacaaatatagatatattataatttataatagtttcgatttactggttgaaattaggagccgattttcataattataaggatttgaatggtaaccgcgttttgcggtgtgggagaaatgcggtgcagttcaaatagtaacgaaaatacataaatacatatgtatatgtagagattttgataatgttacagcactattgcggtgcggttttgggtgcggtctatgtcaccattcatgacctaagtatacatttgataaccgtataactcatgtgacgattgcagatttgatataaactaaacaagttgataatatatagtttatatactaagacagatacctcagtaaataaaacatactaaataacaagttgagaaacttaaaataggccaagtattagactattagtggttgttttgacaccaaatggatttttaaaacgtatacaacacatccaatccgttgagtagcagcaaaagttatgttcttataaacacaagcaagaaagtatcagagaatcatataactcagattctataacttgcacgacttaatttcatatgacatctcctaaggttaaatcaagtgacataagattccaaaagattcttccaactatatataatatttaagaatccacttgagaaaacactcaagtgtggatggatgttatatcagaattatctaatgacaagagaaatttaattggatttgaatgatacagttgaaattaaatatcagccaggtataacttttcaaatatctaacataatttatgttataagagagatcctaattgtagacgtattatgaatattcaaataagacatcttgaaaatactaatctaaaatataaaagtagtctccacctaacatgaataaaataatggtcaaaaagatataagagctatgcttgtccaatgggaagcatgattaagatgtgattaagataactaattagatgtttaattggtaagttgctttcatgggtttgcttatacgcaattaggtggctcacaatgagatgagaaaatttccaaattagctgacattttgattagagtttgattagtcatttaattaacgactaatgccgtaaaatatacttgtgttgttggagtactggcgaacaagatcacaagtttttttctttttttttttctttttaaaaaaaggcaaaacataagtatcacaagttcaaatcataactccttggtctatcatcaaatcattctcacaactcacaagtttctcacttttctcaaaaattgaacgagcccatttagttatggcccattgggcttttttctagccttttatctcgttttgattggagctaggatagtcaaaccgtcgtttgtcaacaagaaatgtgaacccatatctctttctaaggaatagtgggaatatctcttactgcaaaatccaattatgtataagcaaacatgcatatatttacaattttgttatttcatctttctttgattttgtttgttttctacgtttaataaatttaccatcttcatttgaccacagatgattttatgatgtcttgtatattatgcccaaacaaattttccctcaatattgataccaaactattgaaattttgataataagttacaaatcaaacattaagtagtacattcataatcataaatcttaatttttattgatgtttctttgttttctcaaattatctctgagaattgagtaagccaaagagcaaaacatgttattatctaaactcgtataaatatatagtagcaacacaaagatacatagttgtgaatctccatgttcatatagtccaaatatttgaaatataccatacaaattagcttgctatacgttaaaataaaatctgaatgtttcaaacacaaataaactaagctaaaatactgtttttttttcttctttgggattagtctggcattaaccacttaactaaaaacaatcaccaatttttttccaaatttgtttctttttttggtatttattgtttgaccagttgactcattttttggtatttcttgtttgaccagttgactattttattttctttgggttgaaaaaatacaacaacccaatccgacccgaaattatcgcaattgataatgttgctgacttagcctaaccgatctgagccggtttatgactcatgactaatccatgactccttcgtcttcgtcttcacacagttgtagctttcatgcctgagtcaaaaacctcgtgaccaaaaaaaaaaaactgattactagaataacagttccctctgcgtgtttcctaaaccaatacaaaaaatg

SEQ ID NO: 12716 - DNA, 3000 bp, Unknown
  misc_feature (1)..( 3000): cDNA_ID_2994460_gDNA_ID_2214567_Annot_ID_134982 3000 nt of promoter + ATG
ataatttggtcaactatttcccatcataaatatgacattactatatgagtgagtatatagatatttcgtcaaaatgaacgcaccgatcaatggaaaataaaaggcacccatcaatgagaaccttataataaaacacacacacacaaattccgtatagaccaggtttcagtatttttgttagtttggagtgtaataactcttttttttttcttggagtaaaaatgagtacaagtaccttagtgaacaaatttattgttttgttggaattaaactgttgatcaataattcgacacgacagtaaataactcactgggacaaccaaaaaagtcatattaattcatggaacatatatatgctgacaaacaaaaacaaatcatggaacatctatttggtgttttccaaaagcaaatatcgtctttaagtcagaaaatgcaaacaattttggccgcaaaaaaaagcatgggttagaaagtttgaaagaaatcgagttatatcaaactggtgaaaattggcgacacaatctgttttttactgaatatgtttctattaaaacgagttcggttgtgatgtttactcaactagtagaaaaaaaaaaaaaaaaaaagaagaaaaacgccattctggtcaacaaattttgggccaatattccaaatacacgttactatattttcgattgaaatgtcgtattgtaattaatacagtatagtagtagaacaatattagagacacgtacgtaggtttggttagatgcttttgtctataactctatgccaagtaatgattggtgattcgtcaatcgtaattctttttttttatatataaacccaaataatttgctttacaatctctgaattctatgttttgagatcatccatattccaatctaactgtcgttaaggctcttctttcaaaggaagaccctatttgcaagttggacacagacggacaagttctcaacgattaggagaaaatcgttaggactaatcaaagttttagataggtaccactacctaaataaactatgtacgaggacgatacatccagtacaagagaaatatatatgcaacctcatcatataaaatcatagtcacgagattttatgacagatcttagtcgtacataaatggctgacagatttgcatgatatattgcaatgatatatttttttttaacccaaaacattttaccagcttatatcaacaatagacatatatataatctgaaataaggaatctaataaaatagctcttaatattgaatttaaagaagaaaaaaagtgaaacaaagcattcgagatttgatgtcgaagtccacatcgggaagcgaaggtcatcaaacggccacttggactccgatgagaaaatttcaagtgggctgcttgttggcttttagtataatattgaccacaaattatttatatgctttttagttataatatgcagatattgtatctatataatactccatgaatagtatacatatgagtgtgtttctttttgttaaatatccaaggaagagtgcataatcattttggaaccatttatgtttaaataataaaatttatgatatatatactgtatcaaaataactatgtgttattagagaaaatgaagatatagtcattaagttaggtaatttaatatgtacaatattttaagaatatcatgtcattttataaatttatattatttcaaaccaaactaaattgctttagcttctgtcgaaactgcctactatttaaatttgtttttctaaaaacttctttgatcgaattagctttcccgaagttctagtacaattctaaaaattgtgtactagaatctacaaatagcatattaaactttaaatttcctttgaactagcttgtacataaactaccatttcttttcttgtttatttgtgacttaagtgttaaaatttttcttcacaccatctagcaaaacacctaacattgttccctttccaataatcgaatcgcctatcctacaatcatcgataatttagtataggatctagaagacttactatgactaattttgacaatggtgaaataatcaaactttttttattaaactaatgtgttgtattggatcagaaaacatgatttacataatgtttgtaacattgatatcaccccctacatgtatattaaaagccttatcgactccaaatttttaccgaaaaaattgaaaaattgttcaaaaacacagttttaggatctcattatacagatcaaatcacacgaattcatatcataataatttttttggaagtccggttattttactaatttgatccaacatatctatgatgaatcttagttaagatgtggtgatcactcaaacagtaaatttgtaaattttgttcattaaaatcagtttcttgtggacaaaaccatcctatttttggcaaatcaaagaaaatataattaatctcaaagaaaaaagctacaagaaaaaaaaaatggcctcaaaataaaaatagaaaatatctgacaagactgcccgaaatcacaagtaactgtaacaaaactgacaacgggcaaaaaaaaaaaaaaaaaaaaaaaaaactgcccgtcgggcaaatcctccaatagagagtcgtctctctttatctccgtctctctcttttttttttaatcaactttataaaaaaaacaaaaaaaaaatttaaaaattaatatcttctcaacaaatgactctatcaatgtgtacataaatgtgaatcttcttccctcttcttcttctccattgttaaaagctctcacacaaccaccgttctccgtcacggtggcgctttattctctcatcggagcgcctcaccggtggcagacggtgtcgttgttcctctcctaaaacctccatcaatcaccatctctttacacagagctctaaccaaaatcttcgagagatggggcagagtatgagctgtggaagtcgaccggagcacggaatattcgcctctgtacagtgcggcgatatcatcactatccgtcgtgtg

SEQ ID NO: 12717 - DNA, 3000 bp, Unknown; identical to SEQ ID NO: 12709
  misc_feature (1)..( 3000): cDNA_ID_2709464_gDNA_ID_2214567_Annot_ID_134986 3000 nt of promoter + ATG

SEQ ID NO: 12718 - DNA, 3000 bp, Unknown; identical to SEQ ID NO: 12708
  misc_feature (1)..( 3000): cDNA_ID_2709461_gDNA_ID_2214567_Annot_ID_134987 3000 nt of promoter + ATG

SEQ ID NO: 12719 - DNA, 3000 bp, Unknown; identical to SEQ ID NO: 12707
  misc_feature (1)..( 3000): cDNA_ID_2712397_gDNA_ID_2214567_Annot_ID_134988 3000 nt of promoter + ATG

SEQ ID NO: 12720 - DNA, 3000 bp, Unknown
  misc_feature (1)..( 3000): cDNA_ID_2709537_gDNA_ID_2214568_Annot_ID_134995 3000 nt of promoter + ATG
aagcctggactatggagaacttgagctacatgaatctcatgtttgtggagtcaggattctagagcatattggctacaaggagcatgtatgcataagctaagcttgggcctcgataaacctagactatgcatgggacccttgggttgtggaaagcttggatttaggagagcttctgggatgtgtatgtgtagaaaaatccatgtgtattttgtagaaaaatccatgtgtattttgtagaaaaattcatgtgtatgatgatcacactagtcactaacacgtgtaatagacctctacaagatgatcacactagtcactaaacggtctattagcttaaaatactcttgtaaaattttgttaatcatatgactttttctaaaatttgtatatatcataagtgctttaatttatttattttggcagcaaaacaggcctgctttaatttattaatttgtacttcacttattattttatttatttgaaatggtccattatccattatttgctaatttttggttttcctgattcttgcttggaagagcttcaaggcggaggactaggtcggggtgctccttctcccctcaaccatttgttgtctacacgttgccacttgccacacgtgtttttctcttagaaatcgttatcacaatctgttcttttgaactttaaatcaaaaaatttggctgacaaaaaaaaattgaaacattacaaattgaaatataggatactattttcattcataactttaggcatcagtaacacagaaattatgaaggcaaacgattattattttacatgattgattactaaccaaccacgactcgtctatagctttttcattatgaatatagaaattatacaagtctagccggatttgggggttttgacgacgatacggtttccatcaacaaaaactctgacccggtcgcacctgaagtctgcggtcaccggactcccatccaaaatcacggcagcattgacggtggggttctctctctctatcaccacggccgcatagtcaccatttgttcccgtaagctccggccacgagttcttccctgcgatcacgttacgttagatcggtcaatcatttacgtttgggattttggagatcaagaagctcatatttgagtaaatgaaaacaaaagaactagaaacatcaccatggattgaccatatgtaacataattaaccttctaacagactttagaaaatgtaatcatatatgttatagctattgaattacaattttaaatgccttgaatccatatctaattgaacattagctaactatttacaaacatataaaactttaattatgaactatacaatacaaatacaaaaacttactaggacattcggtcgacatttttcttcactcttgtatatatttatgtagtcttctgatgtatttgtatgctcacctttagagatttgagtcccatttatagaatcggatacgtacgttacgtcttggtgtcggtgtcgtcggtgaggttgcagattcaaaagtcaaactttgacgaaaccagcttttaatagccccttcgttgacattattaatttgtttggtaaaagctttgacacttctgattttgttttataaagctttgaaatgtacatatttatatcacgatgttcaaaccttatcgagaacaagataaggtttctaaggctaagataatgtcgaaatttgaaaaacaaacgaaggtgaaaaatatttctagcgtcgactgaattctgtttgcatgcaaaaaaacgcttctgccaaatttggcacttagccgacaaaaatgaccaaactgtccttcataaaattcatgtataaaaatactataatcaattgttgtcacacacacaaacaacgataatgtcaattatgttgaattgttgacgtacataaaatttgacaaacaacatcacaacttagtcatatagttttttttttgttcccgtttgataatcttgtcatatagttaatattcaatttgatatgtatatacagtttaaaacacgtatatacagttcaacttagtcatagtttttcttttggtctgtttaagattggtaaaagcacgtatccggaataaagatttaggtattaattggtaacaactctatatgcgggtttcgaacaaaattacaaaatcacatattatatgagaccaagtcaccatcacacttaaatatttgtggttgagaattaattagtgtttagttttgtgtatgtttcacactgcccaatgttacaaacttgtgtgtgtcaagaagacgaggccgcctgaaaacaaaacatgtaagcccattgaaacagacaccaaaagacatatggtctataagcctctccttgtgctggagctggacacaaattctttaagaccgaggttttcaaacgtaggcccaaataaatagaaccaaatccagttagaagcccaataaaatgttaattacttatctttgtattttaatttttgttctttaaagtttaggattttttacataagtaaaagaatttgttctttaggcactttgaatccacattgtcgttggtattgttattagagtatcttaattttctatgatttatttacgtagataattcattgaaaaattaaatgaatttatgtttaaattctcatctaattattatacaatagattgaaaaagtcacccttagtcaaattgttcatatagttttcttaaattgtctaattaattaccaaattaatccttgtctgaaaacttttacaaaagctaatacagaacaaatacaaaaaaacgtgtaatcatatcatataaacaccagtcgcagcgtttcgtagaaaaattcgatttctctaaagccctaaaactaaaacgactatccccaattccaagttctagggtttccatcttccccaatctgtacgccattttcgatttccttttttgttgtttactttagcttcatcgaccatgtttaggtttcaaattgagtgtttgttctgtttctgtagagtataa

SEQ ID NO: 12721 - DNA, 3000 bp, Unknown
  misc_feature (1)..( 3000): cDNA_ID_2709527_gDNA_ID_2214568_Annot_ID_134998 3000 nt of promoter + ATG
aagtgcaagacatgtaactctacaaaatctgatgatggacaaatcatcccatctgctacttcttcatctttgtctgattcatgcgaatgcaaagcttgcccttgtatgtataacttctctctctttttcctctagtcttcacttaacttagtaatctttgtgcaacagtctaatggggaacgtaacgatctacttggtatgtatgacacacttaaaaagatggtcctaattctgaatatcttaagttacatggatttctaacttaaagccaattagtaacgagtagatttgggcaatgtctcgtatatgtttttaagtatttctaaaagaatatttgatgtgagattctaacaagtcatttggagatgatgattctttcgtccatctcaaattgaaatccactgaaagataagcaaacatataccctacttggatcaaatgagataccatgttaagtttctaattctaaaccaattgacaatgaatggattagtctaattcttttatatactgtagatttttttctagtttctgatgtgaatcctactagaataatctaaatgtttattgatgtaaaagatttcaaattattaaggagtggagtgagttttttgtttaattatttgagattaggtggttgatgtaaaagatgatgttaattacaatgcagggtgtgatcagatgttcttcgaggagctgatgaaagaagctactgacatagcgggatttttcaggtcaagagtgaggcatcttctccatcttcatgtagccactgggatgcagagatacatgattcgcctacgcagatgcttcactgacgaaaaacaagctttagtccaagagggccaaatcttgattcaatacatcaccatgaatgcaattgctatccgtaaaatcctcaagaaatatgacaaggttagagattatggcaaagataataattcattttaaaataagaagatgtgacttcatttgttgtgagaaagtaaactgcttaaaaatgctttcaggtgcatagctcagagaatgggaagaatttcaagttgaaaatgcgagcggagcgcatagagctcttgcactcaccatggctcatagaacttggagccttttatctcaactctgggctagataatgttggaaacttcaagaattcgtttggccgtgtcgcttgtgaaaatctcaacgaagatcaaccagtgctaaaactcatgctgcctaactcaatagagctggagtatgatctaacttgtgcaatctgcctcgtaataaaaaatctctttgcattttttcacaaataaaatgtagtttgcatatctggaggtgaaaatagtaatttgttgtggataaatttgggcaggaaacggtattcaatccctatgctttaaagtgcggtcacatattttgtaactcgtgtgcatgctcggctgcttctgtattgattttccaaggcattaaagcagcgccccgacattcaaaatgtcccatctgcagagaggtttgtttagattcttgcaacattaaacgtgttcttctctcaacttttgtttccaatatctataatgaggtcaatcttgatttattccttgcggtatcaggctggagtttacgcggaagcagttcacatgatcgagctgcatcttcttttaaagacacggtaagacaagtctcaaattttagattgcaccaaatcagtatagatgtgtccataaaatttgaactgatgattattatcattcatatagcaagatggtgttttcattcgttaagtaactagaaaatgaagttgcgatcgaatttttgttcttaattttttttttaagttttgaagtcgttatgagtgagcctttcataaacatctgaatatattcttggggtggtatatattgttcaaactgtatttatattgcaagaattattaatgtcatatgatgaaagcataatatatttttttgtagaagcaaagaatattggaaggagaggatgatgaatgaacggtctgagatggtgaagcagtcgaagatgttttggaatgaacagacgaagcatatgatcggttattaatggtgtatctcttcaagttcaattattaacttcatctaaacaaaaggtgatgacaaaaaaaaagatatattacttttatttgtttctgccgtgcccgagacattacagattcgagagagaatcataattaggagaggtttattttattttttttctttggtgagacataaatcgagttgtgtttaaatacttttttgtgttgtttaagatgttattggatgttgttccttattaattgtttaaaagacaagtcaatagattacacacgttcatcagttcatgtctatatacatcacaagtttcagaattttactttagataaacaaaatttcttcttattgtatattttcttcaatcaaaatatttattaactaaatccttcgcagttaattccctacaatataatcactcaacgttatatattttttcaaaaaaattaattaattgttaaaaattaaaagacaaaaagaaattgtttttgataaaagtgagtcctagtctaaaattgggctctgtaaaaaaactttccatattttctcgtaaaaatggacggcaatggcatagtcctttccttgttctctctcgttccttcttcccctcctctgatcatcagctcatcagatcttctccgaatcaaatcatttagccacattttacaattccaagacgtttctcgaccattttgtatccggaaaacgtgcagaacaaggttgcttgcgagcgacttaggtggtcaattcattatctcaggttttcaccgagctgtgtcgattttgaagacacggcaatattctatatggattcatcattcacgttgatgacgctaatgagtggttcgtgttttcattgtcggagaagtaatagataatctcaaacagagagaagaaaaaaaaagaagcaaaattaggttttgtgattttaggttaaattttttgaatg

SEQ ID NO: 12722 - DNA, 3000 bp, Unknown
  misc_feature (1)..( 3000): cDNA_ID_2712427_gDNA_ID_2214568_Annot_ID_135002 3000 nt of promoter + ATG
actgatgcttacgatctcttttgcatctctctcgtaacgaagctcctcggtcgtatttattaccacgtggaaggcgcacaaaagcctgggactctccctcccaacgtcgcagccgccgtcaatggcgttgccttctgtgggactctcgccggtcagctctttttcgggtggcttggtgataagctcgggaggaagaaagtttacggtatgacgttgatggtcatggtcctttgttcaatagcctctggtctctctttcggacatgagccaaaagctgtgatggccacgctctgtttttttcggttttggcttggatttggcatcggtggtgactaccctttatccgcaaccatcatgtctgaatatgcgaacaagaagactcgcggagcctttgtctctgcggtttttgctatgcaagggttcggaatcatggctggtggtattttcgctattataatttcctctgcttttgaagctaagtttccatccccggcctatgcggatgatgccttgggatccacgattcctcaagctgatttggtatggcggataatcctgatggctggtgctatccctgcggctatgacgtattactcaaggtcgaagatgcctgagaccgcaaggtacacggctttggttgctaaggacgcaaagcaggcagcttcggacatgtctaaggttctgcaagtggagatagagccagaacaacagaaattggaagagatctcaaaggagaagtccaaggcctttggattgttctcaaaggaattcatgagtcgccatgggcttcatttgctaggcactacatcgacatggttccttctcgacattgctttctacagtcaaaaccttttccaaaaggatattttcagcgcgatcggatggattcctcccgcgcaaagcatgaacgcaattcaagaggttttcaagattgcccgtgcgcaaacgctaatcgccttgtgtagcacggtacctggttactggttcacagttgcgttcatcgacgtcattggaagatttgcgattcagatgatgggtttctttttcatgacggtctttatgtttgctctggctattccttacaaccactggactcacaaggagaaccgaatcggatttgttatcatgtactcgttaacattctttttcgccaactttggacccaatgctacaaccttcgttgtgccggccgaaatcttcccagccaggttcagatcaacctgccacggtatctctgcagcatcaggaaaattaggagcaatggttggtgcgttcgggttcttgtacttggctcagaacccagacaaggacaagaccgacgcaggataccctccagggattggggtcaggaactcgcttattgtgttgggtgtagttaacttcttaggtatcctcttcactttcttggtacctgaatctaaaggtaagtcactcgaggaaatgtccggtgaaaatgaagacaatgagaatagcaacaatgatagtagaacggtcccaatagtttaggtgatataatacgccttttgtaataattttcgttttttctttctccttgtctctagcaactcaagttgttctttgtgtaatccattgatacctaattaatgctagagaaatcaaaattttcatgagtcgattttaaatcagttcctaaattgaagatttattagacttgaagaagccgtgcaagttgtgcagtatatatgttaaatcacaatttatgcgttgcggggaagttgagaccacagataaaggcttcacttaaagatacattatggcttattaatctctagggtgaaaataacgaagtgctgaagaaaaactctgttcttttaacaaactcccttgcaccgaacaacattctcattgttcatcgacctatggaagaccaaaaacgattgctactttggtaaattttgtaaactttagggcatatgaaagcggtgggtatatattatagtttcacaatggtaagaaaaatatttgggatgttacagtatttttaggcatggtaaaaaggcccatattggacataaaaatatgtaatccctcaaatgaagtggaaattagataatttatttatttataaaactctgaatttagataatttcttatcttttgtttttgtaaaaaagaatttcatgttggataaaatatatattgcatttattgtgtgtgactatcttattggtggacaaaatatacatttttttaaaaaaagtattatcatcggaaattaggtttttcgacgggaaaaaaaaccaatcaccataacaaaatccagaggctctgttgttcttggggttgaatgtgtaatgtctcataagtcttcggatctcacttcgtccgggtatgtgttctactcgcttttcgtctgttaaaaactggaccttccgatcgctaatcaatatcaatcttagctttttttcgtcttccggttttagattttgtatcctaagctccgatactctttacgagaagcgtttttatttcaagctcagagtcaatcttagtatagggctgctaatggttttcatgtcttggatcacatcctgtggttgaaaaaggagtattctttactgattcttttgagaaagcaataaccaataaagtagaaggctctccttcgtaattgacctggaatctgtgatataagtattgaaagtaccataatttacagtttgtctctcagttcttgaaagtttagatgctgtctaatgatatatggtgtatgagtttaagttcctagactaatcaagaagaccgtttctgtgatctttgtgatgatgactgaatcttctaagtagcagtctttttcttcacacctatcattttttagttgaataacgtatcgtagttactgtgtttaatcacttggtttatacttgacattagatttctttccatcttctgcaggaagttgcatctttattgacctcatctgaagttcaatttatttcgtcttccggaaatcaatccttttggtggctgtaaggttta

SEQ ID NO: 12723 - DNA, 3000 bp, Unknown
  misc_feature (1)..( 3000): cDNA_ID_3026209_gDNA_ID_2214568_Annot_ID_186096 3000 nt of promoter + ATG
ttattactgtgtgtctctgagaggacgtgcaaggaagaagtaatggaagtagcagtacttgtatctgaattaaactcagaccctgatcctcctctagccatcgtagctgaaccaaactttctagtcttagcttcatcatcctgagttttgtctttgctgaagtagaaacatttcattgccttagatgaaaccagcctcttcactatccaaaccaggtccacattccaagtcaacacaaacagaaacacgatcagagatgaattaacagagataatcaccaatcattcaatccataccagatatcaagttatcaacacaaaaatcatcacatttcaactagattccctgacatttggaagaatgtagaacaaaaatcgatatacaacacaaaagtagaaatgtggtaagagtgttgagaatcagaaagggaaagagaagaaacctgatgtagaattattcatgaggatgaatggaatgctgtgatgggggtcttcatgatcatgattgagagagctttaaagcaaaagaaaatggtagagaaagagataagaggagaagagagaagacgagctcaccatgatcgaatgggggaagtcaaataggcaatggcagctggattgccgcttaccaacctatagaagaagccttttataatattttattttgtgttacacccgcttgcttacttatatcaatcaataccttaatagagaacgcgttgtttattaaaaaaatttccccgtgtatattcaccatttaatctttaaggtacggtttagaagagaaattcaaatgaactttcctcttctatggaagcttcgtgtaatttatctaaaactatgtatagttttaatttattaaaaattgatagtcaaattatagaaaatatttaatgttgttgaaataggtggtactcgaaacgtaagaaaaaatgatgaggtgaggaaaagcgttggaaagaaactttgggggtgagaatttttggtatagaagagacgtacattatggaagtagagagactaagtgtcagctatttgagaatccacctatagctatctcaaaactaactccacacctaaacttgcatcatctcaacatcttcctcctacctactctttaactcttggtttctcttacttggtccagtctttccactattgaacttccaagacaccaacagtcgcgttgtaagtctgtctatttacttcatttgacgagagcatagtgctcggttatctgcaagcgaatacaacataatgacttcagaaaaaaaaccatcgaagcaaaacaggttcctacttagtgaaaccaaacccacataatacatatcctaatttctttacctgttttttttactgctattactccacctcattgtattcaaccactgcatcataagtctccatcgtgagtatactctccgcaaaacatctgaaaaatgttttctttctcatcagaaatagtatatgaccaaaaaacctaaaccaaacagatatcagctctatcatctgttcagacttacaagtcactaggtttaggttgcctatgtgttttctgtactactatactaaacctgtaactacttgaaactctgaaaaaaccctagcgtataaaaatcttaccttagttcatgccaaaatatatccaccttatcagacaagaattttcgaagagaggagacttcatcttccaccaacatcccggtctgcccggtttgtcgattattctctctctcaagccttttgatgaaaagagctgacgcaaaatgaacaataactgagggatcaggatctccaaggactgcctgaagctctcttctaatccatggctcaattctttcagttatctttgctttggtgtaatcattcaccgccaaactctacaataatccaagatgacacaacgaagcaggtatatataaggcttccaatgtgaacatatatccaataatgtaagagtgtaaaccccaatactacaaacatcaaacagagaagaacacattgtataatgaaacttactagttccaagcgccttgaatgtaatcgaacagctcgtaattgcttagtgtatatgctgtatttagagccaacactagttagaaacaacggcgaactaatctaacacttcgaaaaaggagattgcaaatgaagctatagagttagaatcaatagtaaaccaacctagctcgccactgaagctttcgctggaagataacagaatcaggaactgaacctggtcgtccaaatgatctccgccatggcaatggccttgatcttgagctagagttttccaaaacatccctcgacctttgaattatcctaatgaaataataaccaagtgaatataataaagaagtgatttttaacttcatagagaggatcttagagagagagataacctccggcgatcggaaggattattccgatgataagttaaagtctcacgatcacgaagaattggtaattgctccttatggtattttctagaagcaaaatcactaacgataaaccaggaatcaaaacgagtgttacaaagaggacaattcctcttgaagctgctccacttccgaatacaagcaaggcagtatccgtgcttgcacaccgtgatcacggcggcggatcttcgctcggttagattttcgaggcatatcggacacgatttcccctgtaaagcaggaaatattgctctccctgcaaatttcgcgatactttccggcgatcgaagatgtctcgaagacgaaggcgccgtggaggacggtaatggaggcatgaccggagatagagattgttcggtgaagtcgggctcttggaaaagtcgggttttaatgaaccgagatggatttcagatagataaccggttaatgtcggtttgggttgactcggttcgagatttcttgtttcaaaatgaagagcgagcgtgaaggatcttttacttcatcgctgctccgaagaaaaaacttcaccattgccactaacgacgaactctcttgtctctgaaatg

SEQ ID NO: 12724 - DNA, 3000 bp, Unknown
  misc_feature (1)..( 3000): cDNA_ID_2994808_gDNA_ID_2214568_Annot_ID_186095 3000 nt of promoter + ATG
gtgttttgcacctctttctctctattttgcaattaccttttctgtgtgaaatccatacaactttgtaatttgttgtgtcatttgttcatttcagacttcaaatagaagtgcaaaggtttcactcgatcagatagatcctacccgctggttgcaagtaagcttactctttaacaggatttacaacgttgaaaattgtttgaaagtacactcattaatcatgccgccaagctgattattgtacgtgagttagaatcttattttatcaactattttcccccgaatacgacttcatatataatgattctaagaattctgtcttcaagctgttcatgtgtggaaagtgaataaatcgtcttaatagtattattccctttaacaaagtagtgctttgatgttcttgtgttagtagaagctcgactatttaaccaggaaactaatactccacataacttttcttggatggatgtttcattggtttcatgttgtagcatacctggcaataaaatctattttcttctttgtctttttcggtaatttttctttgttttcacagcgttatgtagaggcccagtgttgtgttgcttcgcatgcttacaaaggtagctctcttttctttttgggatgcctatgcctacaatggatgaaataaggcatttagttctttttttttaaccttgtagatttcatttcttgcattttatttgtgggaaattctgcaatctgatgcttgctttactggatatggtgtaatatttttttgttactcaggggcgctggaactctttgctgaactcttacaacgatttccaaataatgtacacttgttgactgagacagcaaaggttagggatgacatcgactacgatgcaaacagaatttcacctgaatttttcattttatcatgactgacgctgattgacatttatttcatttgtataggttgaagccattattgggaaaaatgatgaggccataatgagatttgagaaggtagtcaccacatggatatttttttctcaattctcaacttctttaattcatgcataatcatctaaaagcttttataggttcggtcaattgatccttacacactaaccagtatggatgagtatgcgatgctgcttcagattaagtgtgattattccaggctaaacaagctcgtccacgatttattaagcgttgatcataccagagcagaagtatttgttgctttgtctgtactatgggaaaggaaagatgcaaggacggcattatcttatgctgagaaggttagcttttttctgacactgaatttttgtgccaaaatctttgtgtgatagctcatgacatacactatgcaatcagagtatcagggtagacgagaggcacatacccggctacataatgaaggtaagctagttcaacgaggagtttatttatttttagtaagtttgcatatatatatatatccactaatttgttaagacgtcagggaaatctacttttacaagcaaaacgaccagaagctgcagcgatcgccttcagggctgcccagaatttgaggtccgatcttcgttcatatcaaggtctggttcacgagggaaaaagatctgatatacacttccactgttgtactgttttggtggtataaacctttaacaatcatgaaaaggttggagtgtgtaattaacttgcgctattgaggtcatttcaggcttagtccattcttatcttgcatttggtaaaaccaaagaagcattgtataccgccagggaagcaatgaatgcaatgcctcaatccgcgaaggctctgaaattagttggtgatgttcatgcgtttacatcaagtggcagggaaaaggtacaaacattcagctttgttatgcttctatggtgtcaattttcatcatatcaatattctatccagattttttacatcttaatcagaagcggtgaaagctttagggagttagttgcatataatactaaatattgaaactgggaaagttccttaaacttaactgttcaaatctcaattttgataagcatagtgtataccaaatctgagaaactattcagagcttgtgagtatcttcttgtgatctttacattatgtataaaaatttatggtgtaacagtagaatgatatggttttataacaggcaaaaaagttttacgagtcaggtctgaggctggaacctgggtaccttggagctgtgttagccctagctgagcttcatctaatggaagggaggaatggagatgctgtatcactacttgaacgatatctcaaagattatgcagatgattctctccacgtcaagctagctcaagtgtttgctgcaacgaatatgctacaagattctttatcacactttcaagctgcattaaggtttatgaaattctaagccagtagtgcttatagttcttgttgctcctatgcgaaacaataacgatataacagagtgtaaataatgtaaacgcagaataaatccacagaatgaggcagccaaaaagggactagatcgcttggagaaacaaatgaaggttgggaagaatcaaatcgaaccattttattatgaagctcgaacaaggatgatgtttagtgtattcacaaaattggggtgtttgttgcagggaatagacccagatgcaacagatgagaatgacgagaacgatgttgaagatgttgatggagacaccgaagaagctgagctcatgtgaagagtagagagacagaagagtgtgtaaactgtaaaactatcgaatccttaacattaatattaatagcaaatgtcattccttttgtttcctataaacaaacttagaatatgaaaagaaacgaaaaaaaagaccaatattctacaacattggacgtcgtgacgtgtaaatacgccattggttaaaacacaccaagagaacccattaccaaagtctcacggagaatcccatctctttccccacgccaactcaatctttttcgtcgtcaaaagccaaagctttttgcttttttgtcttaatg

SEQ ID NO: 12725 - DNA, 3000 bp, Unknown
  misc_feature (1)..( 3000): cDNA_ID_3026213_gDNA_ID_2214568_Annot_ID_186094 3000 nt of promoter + ATG
ggcgaaggatcattcttattcacatctagttctgcaccttatgattgctttgataacggagaatgcaacgaggtttgtctcagcacctgaatacctattttctttcagttttctccatcctaaaattcctagttttagactttaacaccacatttagtattattctatatcaaagttgtttaacacaattacttgttgaggtaatttggggaaaagagtctctcacatttaaaatctatgaaaatcaagtatacaatcaataaaaaaatttgatatttgagaccacaatgcaaattcttgttcattgtgaatatatatatgtgctattcaataagaatttctaagttcgttacccttcactgcaggattctccagtagtgccactgggaaagagtccaagaactgatgtgcttttgaaagctgaaaaagtagtgttggaatgtggagggactgtccttagactagcagggctttacatatccttttggatttcgatactgaaactgaatgagcaagtattgaaagacttttttcttggtctgtagaagatttgagcattatgtttctcctgaactttttatacacagaaactagaggtgcacatacttactggttgagtaaggagacaattgatgctcgtcctgatcatattctaaatctcatacactatgaggtatatttgtgattttgttcactctcataactaattagttgatctgcagattgaactcattttctagaatggcagtgtactatacattagtctcttatcaggttctctaatgtgtttttgaacaggatgcagcatcgctggcagttgcaatcatgaagaagaaagccggtgctcggattttcttgggttgtgacaaccatcctttgtcaaggtaatgctgctttcgttctaactttgagattactttctaacttttgatgagacatcaaatgtttgacccctcactcttctcaggcaagaggtgatggacctgatggctcaaagcggaaaatttgataagaagttcaaaggttttacaagtgagtttcttcagacattgacatgtagttgtcttgaaaaaccttaagcttcatggagtctgacaactttggcttttgtaggcaccagtggtcctttagggaagaagctgaacaactctaagacacgagcggagataggatgggagccgaagtatccaagctttgcccaattttttggagtatcgacataatatttttacttggattgattaagaatgtctctagcgctgaagaatccaataatgtgaagcattatttatgtttggtacaaacaaactcatgtatcctcttgagtgatcaaacagctgaaattttcagaattcttcataaagctccatggttcatatatataaatcatattttgttaatttacttaatacagttagcaaatgggttgagaagtaaataatcaacgcaaacttaatcagtttgaataaaatatataaacgtggttagatcataataataaagcatcttataaatcatctaattagatggattttaaaggtttctgtcaagatgtaaaagcttgtgtcttgttcattaccaaattaagattctaacaaagaaataggccaaacatacgaggcctcaggtatgagcctaacaaacacatccatgcctccatctcacccacataatttgatatgaaggtttcattatacctttattaataaaaatacttaattcattaacatgttcacaaatcatctcattggtgatatgtgcaagcaaataatcttatcagttatcacatttggtttcttaacaccagttatggaaggttgttataagttacacaatgtcttataattagggtgatggcccatcactgatgggtgatgttttatctatatataaaaaaatcttatattaatttggctatatacaaacattgaaccagattcagagggttgctaggcgtatgatatgtctgaagtgattaattcgactttaagaaatttgtagcctaatgcaaaaatactttgtcggatttagaaggcctaacaattaggaacaacacctaatgcaagacgttccaaccacctgattatttatttaagttaaatgtcactaaatttctaaactgctccgcaagttttagggttcacacagagttgacactttttgcattgcattttgggccttcatagagagatgaggagtaattactaattagctttgttttccgataaaacttgtgaagaaatgaaaatgatatgtatatgtctaagaaaatcaccaaagcttgagacaattgatctcatcctaaaaatatctcacattatgcaacaaaatgtctccacatgttatatttacaaaatcatgagtaacttggagacgacattgcaaattaacatcattgacatcagtagatactccatcgcaaattgtcaaaaatcacagctccatattttcaggcctaaaattaaccaccgaccatacatcccgtattcttaatatcgatattgattttaaatgaaaggaactcatcgcttaagacaaaaaaaaaaacaaaaaaaaaaacaagaaagaaattcgaagttatggtttcctcgatcagaacaagtattaaatttgcattaaaattggtttaataaaacgagaaactaaagaatttgctggttggcaaactaagaagtcagaagtcaccagcaatttacagccaatcagctatgcaaaagttatactatttgctactgagtgatcacattatattgtgcagaaaaaaataaaatccaggaaaacttgaaccaaacttttgtttttttgtttaaaaagagaaagaaagaaaattaaataggggacaaaaatgaaaatgcaagaatgactcactttttttttggtttaagggtttataagaatgactcactttttctccaagaccaatataaaatggaggtttgcatgaagaaactataattcaaagcagtcaactagcaagagaaagagagaaaagtgaagatg

SEQ ID NO: 12726 - DNA, 3000 bp, Unknown
  misc_feature (1)..( 3000): cDNA_ID_3026220_gDNA_ID_2214568_Annot_ID_186090 3000 nt of promoter + ATG
ggtgacgtttgggctattcctagctagcaaggtatcattggttagagctgtgtcgtacatggtggctcagtgtctcggagccacttgtggagttggtttggtgaaagtcttccagtcgacttattacaaccgctacggtggtggagccaacatgctctccgacggatacaatgttggcgttggggttggtgctgagattatcggcacttttgtcctcgtctacaccgtcttctccgctaccgaccctaagcgaaatgcccgtgactctcacattcctgtaagcaattttaactatcctacaagcctcaatcacatgaataacattaaaaagtatcaaaaacctagctaaagacttatagtagtacataaaattgatagttttctttcgtttcatttatttttaacaaaatgtagtactcgtggtaattacagaaataaataatggaagaaatattaggatagattttttgatttcgttgtcgacaatttttcgtacagaatcaaaatctagtgccagctatataacgcatttatttaatactgaaaacgatgtcgtctagccattttggccctaacgaaaataatacggaccaagtgtaacgtctatcttcttctatgagataaacgacgaaagggtgtccaattatttttcactcatttcttgttcgtttctttggtaccaaatgtctatttacacgttataacgacataccatatttgtgctccacgtctcttcatcacatgtctctgtatgtaaatggtccatattttgcatttccacaacgacccatgtgtatgtgtacatacattttccatgatatttgtccttgcaaatatatatgattcgttacaaaacaaatctttctgttatgcacatggtcattaattgattctttttcccattctagtaatcttggtacctatgattcattcaaatttaaatgtctatgtcattgattgttaatgacgtaagttgatttattttgtatgaaattattgaattgtaggtattagcaccattgccaattggattttccgtgttcatggttcatttagccacaattccaattactggcaccggaataaacccggctaggagttttggagctgccgtcatctacaacaatcaaaaggcttgggatgatcaggtttgtattttcaccatctgatattcgttcttgggttttaaattaacatattaatgagttttgttttaataactacagtggatcttctgggtcggtccatttgtgggtgcagccattgcagcattttaccatcagtttgtgttgagagctggtgcaatgaaggcctatgggtcagtcaggagccagcttcatgagctccatgcttaaatttgttatttcgaactagcgaagaggtgaagaattctttgggccaggaagggaggaaggaaaaaaaaaagggacccaaatcatataaaagaaaaaacgaatattatttaagatggtcggtgagtgacatttactgtgtcttatttgtggctttgtgggggaggtttgtgtgtaacaatttgtaacgtacaagcaatgtatgtgttatttgatgcatatgatatttatatatctacttattgatgattctatctttgatcaatcatcattataacttaaatttcatagaaaaaaacacaaactccaaaaccataaactactattgttcctaaattctcaggaatgtcaatgtcgatcacaatcttaaaatttcatgctaaagatcctttgggtcttttccatcaacggtgcatcctatcaatcactgaaaaataaagggcacaaacatttgtaatcgtctcaaacaaacaaataaaaaatgttgaaatgataacgccatggataaaatgttgaaataaaaataaatgattcacgacacatgtttagctatgtataggagaaaaaccaaatcctctcacttttctcttttatctggttcccctcagatttctttactatcttgttcctcttactttcctctatttctttggtattgccatctagtgagatcttaacatctcacaacttatatggcaccttcctctattttctatattttttcaaccgcataatgaacatgacaccaacaatcagaagtagaaacccaaccaatatccacaggtgtgaaacatagaattaccagatttagcatcagtctgacacatcttgtatggatactaagagagagggtagagtctagcatgattcttgagaataggtagataatcggcaataaatgcaacattgtttacactagtaaattgacatatttagcaataaaaatgtatatataaatgttaataaaaccaataaaagaaatctatttcacatttaatatcatgcgattgttgtaagatgtggtagcttagccgatcttccaaatatgcaagatctagctcatatttttgagcatgtgtagtttaggttcaaaataatatcttagagaaaataaagttggtaattagaatattattagaaatcaactcacacacatcgtgtgggtttattggtatcatatattattctacctattttattttattgaacaatgtgtctttaaaaatgaataagtacataattttttagacttatattttgaaattttgtctatattaatacttactatatatgaattgaacttgttaaatattgtattgacttttgtagtggtaagaagaaacaataaaaatccataaaaacaataacttggtttagcttttggttacgtatgtaagggggttactaaaagtaaaaacactgggtttgggctgggttcagtaactctcatacaaaatccataaaaactttgggctgggctcattcaaaatccatacttattttattactttcctaattaaaaaaaatacacatagcacaagaaaaaccaccgcccaagcttctctagaacctctccatcgttctcactatcactccccccccccccaaatataaaccctaattttcacaatcacagtaccaaaaaaaa

SEQ ID NO: 12727 - DNA, 3000 bp, Unknown
  misc_feature (1)..( 3000): cDNA_ID_3026224_gDNA_ID_2214568_Annot_ID_186089 3000 nt of promoter + ATG
acaaaaccattatccaaaaagacaatgtacattccgacccaaccacaagctcatcacgatccacaaatgtcgccacgtctctcgccgacatcatagaagtgtactaaccgtgtggtgtccagatgccatgtctcctgcttagaagtttccgcgacagaagattcacttcttcatctttttaaaaaaaaatgcagaatcattttcgatatcttacatgggtcactttttaatagttattgttctgttactttttttttccttacattaattaatactttatcgaatgtttgtttaagccgttttgggtaagctatttgttatgaacaataaagttgtcggaacaaagaatggagaaccttaaatgaagcctttgtatttcacgcaattgttttttacttttaagcagccctataccaattttttcacgtgttttaaacattcttgtttatagtaacaatttgagtctttttgcttcttcttttttaattacagcacgtattagcagcaaaatgatattattgacttatagtcatgtgactcatgtaaaaaataaaaattcaaaacaagaagatgttataaaaatatggatgaagatgaattgtatacatagaattaatattacaatgaatccgaatgtgtttagataagttgtaaattacaaaattgcgtagaaaaaaaaaaaatgttttgctatcagtatatccgtaatactttttatgaacggtcccatctctaggaaaaatgagtaatataattcatgaagcaattcattttcattttatttacagaaaaaaataatggtcgtcgctcgattattaagtgggacatttgtttttttttttggtattattaagtgatgcatcatctgttgtagtcttgtagaactctataatccgccaaatgcttcgcttcaaatatattcttgtatttatcttggtgtccaatcctactctgccatggacgggcctagctacgtaaattagatgggtctaccacggacaccacgtggacaagatttaatgttcatggttcatggaggtcgatcgtcttcccaaaaaaacagtcatttgatcctgtgttaataaaagtggatgatattcatgttaatatttattaaattatatggtttctcattctccattcttcatatcgtaattcttgctccacatatgaaacatttcaaatgttgggaataaaaggtttttttcagaaaatataataatcgtggtaaattcaatcccatcgcaagctctcctattggggttgggaaaatctttgaaaattttctttcaggctgtgtttagttccatggccaccttaatgaccagtatctttaaatacggcaagagttttaaatttgaaaagaaaaacaaaaacgtaaaatttcaagtattagacaacgtacattcttaaataggtgattgttgactccttgattaggagagctttcagatacattcgccccatttcactgtcatgtcatttgtatatactgttgctcgtcaaataatctgattctttgtttcaatttgtaatagcatttaaattacttttatttttctgcgttaaacttttcgactaaaggtcggtccaatttgcattttaaattactcttatattttctgcgttaaatgtatgagcgacgactctttcattttaagtagtctttttcattactttgcaacatctatcagtgtctgttattttgcattttttttggtcttttaagaactgaaatctaagaatctacgctaattacatgaatacaaccattctatcatttttctgtaattatggtgatatgaggaaaaaaataaataatggttgacagttatactaaacctaaacatattcgggtattaaagttacttggttagaaagaaaaattaaaaacccaaaatttatattttaaaatttctctttaaaggtttagctccggctatgaggatattgcgcacaacacaaagcctcgtatcaagtagtctacatgaaatgtttgcccattgtaattttgtaaactagcttgtttgttcgtgggtaaaataacttaataggaaaataccagcaaaaaaaggcgagaggaattagtgatttttccccccaacaaaattgttgcaaaataaccaaatcaaaatcaattgaaagcatattctttagacatcaatagagtcttcatagactaatcacaatcataaacacctgtagtgttcccttattttacgaactttttaataaataaaaaagaagaagataaattaattaacctcattgcaaaagaggaaaaacctaaagccacagctttccataaatagacccactcaccatctctgcacatcacccacatcttctaacagtctctcactttctctcttctctctctctctttcttttttgagtccgtgaaggctaagtctgaaagaatgacgaaggatgagttgacggaggaagagtcgctctccggcaaggactacttagacccaccgcctgtgaagacgttcgaggtgagagagctcaagaagtggtccttctacagagctgtcatcgctgagttcatagctactttgctctttctatacgtgactgttttgacagtcatcggctttaagagccagactgatatcaacgccggcggcggagcttgtgccagtgtcggcctcctaggcatctcttgggcctttggtggcatgatattcatcctcgtctactgcactgccggcatctctggtctctctctctctctctctctctctctctctctctctctctttccttaaccattttttgcattatctgatttgcatagcaaaatgcacatgcttcatcattcgaggctcctatacatgtcctcgtaacaaagaagcagaatttcaaaaataccaaatcaaccaaactatagtagttaaatgattgatgatacacaatgttggccagtatacatatgtggtaagaaaacttagctttctagaacattaaattccatccaaattaaaattccaaata

SEQ ID NO: 12728 - DNA, 3000 bp, Unknown
  misc_feature (1)..( 3000): cDNA_ID_2709517_gDNA_ID_2214568_Annot_ID_186086 3000 nt of promoter + ATG
ataattacagaaaaatgatagaatggttgtattcatgtaattagcgtagattcttagatttcagttcttaaaagaccaaaaaaaatgcaaaataacagacactgatagatgttgcaaagtaatgaaaaagactacttaaaatgaaagagtcgtcgctcatacatttaacgcagaaaatataagagtaatttaaaatgcaaattggaccgacctttagtcgaaaagtttaacgcagaaaaataaaagtaatttaaatgctattacaaattgaaacaaagaatcagattatttgacgagcaacagtatatacaaatgacatgacagtgaaatggggcgaatgtatctgaaagctctcctaatcaaggagtcaacaatcacctatttaagaatgtacgttgtctaatacttgaaattttacgtttttgtttttcttttcaaatttaaaactcttgccgtatttaaagatactggtcattaaggtggccatggaactaaacacagcctgaaagaaaattttcaaagattttcccaaccccaataggagagcttgcgatgggattgaatttaccacgattattatattttctgaaaaaaaccttttattcccaacatttgaaatgtttcatatgtggagcaagaattacgatatgaagaatggagaatgagaaaccatataatttaataaatattaacatgaatatcatccacttttattaacacaggatcaaatgactgtttttttgggaagacgatcgacctccatgaaccatgaacattaaatcttgtccacgtggtgtccgtggtagacccatctaatttacgtagctaggcccgtccatggcagagtaggattggacaccaagataaatacaagaatatatttgaagcgaagcatttggcggattatagagttctacaagactacaacagatgatgcatcacttaataataccaaaaaaaaaaacaaatgtcccacttaataatcgagcgacgaccattatttttttctgtaaataaaatgaaaatgaattgcttcatgaattatattactcatttttcctagagatgggaccgttcataaaaagtattacggatatactgatagcaaaacattttttttttttctacgcaattttgtaatttacaacttatctaaacacattcggattcattgtaatattaattctatgtatacaattcatcttcatccatatttttataacatcttcttgttttgaatttttattttttacatgagtcacatgactataagtcaataatatcattttgctgctaatacgtgctgtaattaaaaaagaagaagcaaaaagactcaaattgttactataaacaagaatgtttaaaacacgtgaaaaaattggtatagggctgcttaaaagtaaaaaacaattgcgtgaaatacaaaggcttcatttaaggttctccattctttgttccgacaactttattgttcataacaaatagcttacccaaaacggcttaaacaaacattcgataaagtattaattaatgtaaggaaaaaaaaagtaacagaacaataactattaaaaagtgacccatgtaagatatcgaaaatgattctgcatttttttttaaaaagatgaagaagtgaatcttctgtcgcggaaacttctaagcaggagacatggcatctggacaccacacggttagtacacttctatgatgtcggcgagagacgtggcgacatttgtggatcgtgatgagcttgtggttgggtcggaatgtacattgtctttttggataatggttttgtggctcaccaaatatcattggattagatcagaacttcgaaatctaacttgtccacgtcaacttttcactgaaatttctttcctgtagtttgtttctttctcattatttagatggaagttttgacaattcaagcgacatcaatataaagtatttttgtttgggatttaaggatggtctcctactatttcaaatttgtgatgagtttagtgtcgactaaagggaaaaagttatattcgtttttgaatttggatgttttgaattcgtaaaaaaaatataaacgcgcttagcttatttgttttattttctacatgtaaatttaaatttataagaaaattgcataatatggtggaataagtactgattttaaggaaatttataagaaaataaattgtaatttatgatgaaaatagttaaatagctaaaaaaattagcggattaaatccaaatacaaatcatgcaaatcagatttctacgtcacattggtgtgtttatgaaaatccaaatacaaaacatagataagtaaacttacaataaactgataacagtagtcttcgtaaagttcaaatacgaagcattttttttttgtggaatgatgaatggtaatggtataatatgatgaagatgatgatgatgaatgcggtgggtgaagatgatgatggatgatgttgatgatggtggtggtcatatggtgatgatggtgacatatgctgatgttatataatgttgataatgatgatgatgcttgtatgaagatggggattggggatgatgtttatggtatgataatgatgttgtttatgaagacggatgatgcggtgtggatagtgttcatctcttttcttgttttggttgccaaaccatttcactacagattttttttttggcataacagtagctacaaacttttgaaaaaagaaagagcaaatttgattctagacgttttggcaatgtggattggtggggtaaaaaaaacgtgtgaattggtgggaaaaaaaaagagtttatttccctaacgcgaattattaaataaaaagattactattagtgaatagtgacttaggataatcctgctggttctttattaaaatcgtgattggtgcgatttgaccggtcgaaccggccggtttgttgttaaaatcgtttgtgttgggtaagaaataaagatagctagagaagcagaaaaggcacggcgaacggagaaagatg

SEQ ID NO: 12729 - DNA, 3000 bp, Unknown
  misc_feature (1)..( 3000): cDNA_ID_3026232_gDNA_ID_2214568_Annot_ID_186085 3000 nt of promoter + ATG
tcgcgaatcgccgccggagcgatggagtaaaattgttacgattttgaaaaggagaagcgtggtggaagaatttcgaattaggattttgatagtgtgtaaacgacggtggtcaatccatgagctccggcgacggcgaacttcactggcaacgttgagagtttgtgtgattcgaaaacgtaaggatagcatagtttaattggatatagtgcccatttaatcaggcccaataaatttttatttggcccacttctttgttcattaagcgatgttgcatgagaagaaacatgcatgcgctatatatagcacaaaaagtggtccaaaatatttgatttcagtttacaagtaatttacatctaactattatagattgatcgagtttgtacgggatatcaagacctgataaaagtaaatttgaaaaatatttatgtatatataatcgggaaaaaacccgaaaaaaccgccatctatttaatttttggccgtttaatacccgtgtttttaaatttggaataataatacctcgtttagtttccgcgccctattaaaacattcatctaatttaaagtggtgaaattgtactcccgcgttaacggtgattaactttgctaacggaggctttaactggagttaaaatataaccacacgtggttaaatgaagtaaacaaaacacagtcgtgacctttagcctttttccccaaatcgaaaaacataaaccctaatttcgattggattgaaatcgagagattctatgtgtttggacgcttgattgactgcggtttggtcggaatttgggattgaggagtccgattagtcgcgtcgcgatgaggtatgtgttgatttagggttcatttaattctgggtttcggattaggatttcgcgttcttggtttttcctctcttttaatttcttctgttcgtttgcagtggattcgactgtctgaaactgaatataaagtacggaggagaggtctcctttgtcgatgagtcgttcacttaccttggaggattcgagaagagggacatgtcgatggatcccgatctgatgacgtggtcgatctttgctgatttccctagtgagaatggagtatctgctcccgtggagaacgtgtggtacaaacttgcaaatgaagacttagcatatgtaagagctatacccgaggatagagatagtgggattaggcaatcatcagattatttcgtcattactatatttcataattattctcttaagctaattatcgtatgtcatcaaggatacactgcccggagatatttcactttgttcaagatatttgcgttatatatttaatcgtgtcagtgtttttagaaattgtcaactccctatctcttgttagtttgccatttgtttactgtatcgagaaacgatggagtatgagtgttaggaggtcttgagaaacgttttctcattcatcttaactatatcaaatgtttaagaaccaagaaaaaaaacaatctttcattatacgggatcgaccttttctttgaaatgttgaaaaaggcaaaaaaaatttggtttgaaatctctataaattaatactcgataaattaataacttttataagttataaataattcatgtcttgactcgggactagtgtaaaaattgatacaaatcgataaattaataaaactataacttttttgaaaattctatgtaaatatatattcttatcaatattataaattaataattgtataaatttatgaatatatatttatatgtatgaatatagattatgtaaaatatgactttggtattatttttatttaatttatattaattctttgtagactttaattctaatatttttattacgtagaaaatttatttatttatttttaaacctaataatggttttcgacttgtaattggttttagaaagattattgattgtatagaaaaaactatttttttgatcaaatttttgtacaaaatttataatttatcgataaatcaaaactttattaaattaataattttttccgatcccaacattattaatttataaaggttttactgtatatactaaacgttcaaatctgttaaaaccatctaaggttttttttttgtgttttgattcaggtctccggaagtcgaagggtagaaaaatgcagagaagtgaagacatcaacgcacgatgtaggagtagctttttgttgcatctcaattatttcatcatcttttgttgtagctttagcaaatttccttttcagaaccagtacgttaaattgtgcactaagacgggagtgcgtttgaagaaccacattgtattttctcctcaatcacctgactctatgaattttcccaaagccaatttatttagaagtatgatttgaaaaacatatgtttttaaacagagctcttcacttcttcttgtgactcattttcttaaaacatttattgtgaacatgttgttgataatcaacattccacataacatatgttgcaaaaacataagtgatcgtagaccacaagatacgaggctctttttatatcgttagtgttgtccatattgccggctacataacttcgcatcctttcattaatttggaacattttggtagctctagctggtcccaagaccaaaccccattacatttaatcttttaaaaaaattgttccatccctttttcaaatactgtcgtagactatatgtttttttcaaaaaagattgccatataatattaatgtaaattttgaccgtaaatttttataatttgaatatatgtttcaaatttaatataactgtaaaacagaaaattttccaaaaggcaatttatttacaaatataacaaaaaagtagctaatatacgaactactttttccgtctgataaatgcgaaattagataacatcacttaaatgccaacacatttaatcaagagcgaaagaaaaacacagtaacttagtataagaaccaagtgtggctaaaggcaaagttggagagtaatcatgtatactatgaaaaagggaaaagac

SEQ ID NO: 12730 - DNA, 3000 bp, Unknown
  misc_feature (1)..( 3000): cDNA_ID_3026240_gDNA_ID_2214568_Annot_ID_186083 3000 nt of promoter + ATG
tttgctagagaagcgagggagcttgatccatgtgttcttgacaccttcaacaatggtggatgggttgcatctagtttggaaccctaaagtgaaaataatgaagcagtagagactcggcgaaacaaacaactgtgaaaccgggctaagtggctctattgccgctgtttcttgctcctctttcgccatgtcttttccctttttcatagtatacatgattactctccaactttgcctttagccacacttggttcttatactaagttactgtgtttttctttcgctcttgattaaatgtgttggcatttaagtgatgttatctaatttcgcatttatcagacggaaaaagtagttcgtatattagctacttttttgttatatttgtaaataaattgccttttggaaaattttctgttttacagttatattaaatttgaaacatatattcaaattataaaaatttacggtcaaaatttacattaatattatatggcaatcttttttgaaaaaaacatatagtctacgacagtatttgaaaaagggatggaacaatttttttaaaagattaaatgtaatggggtttggtcttgggaccagctagagctaccaaaatgttccaaattaatgaaaggatgcgaagttatgtagccggcaatatggacaacactaacgatataaaaagagcctcgtatcttgtggtctacgatcacttatgtttttgcaacatatgttatgtggaatgttgattatcaacaacatgttcacaataaatgttttaagaaaatgagtcacaagaagaagtgaagagctctgtttaaaaacatatgtttttcaaatcatacttctaaataaattggctttgggaaaattcatagagtcaggtgattgaggagaaaatacaatgtggttcttcaaacgcactcccgtcttagtgcacaatttaacgtactggttctgaaaaggaaatttgctaaagctacaacaaaagatgatgaaataattgagatgcaacaaaaagctactcctacatcgtgcgttgatgtcttcacttctctgcatttttctacccttcgacttccggagacctgaatcaaaacacaaaaaaaaaaccttagatggttttaacagatttgaacgtttagtatatacagtaaaacctttataaattaataatgttgggatcggaaaaaattattaatttaataaagttttgatttatcgataaattataaattttgtacaaaaatttgatcaaaaaaatagttttttctatacaatcaataatctttctaaaaccaattacaagtcgaaaaccattattaggtttaaaaataaataaataaattttctacgtaataaaaatattagaattaaagtctacaaagaattaatataaattaaataaaaataataccaaagtcatattttacataatctatattcatacatataaatatatattcataaatttatacaattattaatttataatattgataagaatatatatttacatagaattttcaaaaaagttatagttttattaatttatcgatttgtatcaatttttacactagtcccgagtcaagacatgaattatttataacttataaaagttattaatttatcgagtattaatttatagagatttcaaaccaaattttttttgcctttttcaacatttcaaagaaaaggtcgatcccgtataatgaaagattgttttttttcttggttcttaaacatttgatatagttaagatgaatgagaaaacgtttctcaagacctcctaacactcatactccatcgtttctcgatacagtaaacaaatggcaaactaacaagagatagggagttgacaatttctaaaaacactgacacgattaaatatataacgcaaatatcttgaacaaagtgaaatatctccgggcagtgtatccttgatgacatacgataattagcttaagagaataattatgaaatatagtaatgacgaaataatctgatgattgcctaatcccactatctctatcctcgggtatagctcttacatatgctaagtcttcatttgcaagtttgtaccacacgttctccacgggagcagatactccattctcactagggaaatcagcaaagatcgaccacgtcatcagatcgggatccatcgacatgtccctcttctcgaatcctccaaggtaagtgaacgactcatcgacaaaggagacctctcctccgtactttatattcagtttcagacagtcgaatccactgcaaacgaacagaagaaattaaaagagaggaaaaaccaagaacgcgaaatcctaatccgaaacccagaattaaatgaaccctaaatcaacacatacctcatcgcgacgcgactaatcggactcctcaatcccaaattccgaccaaaccgcagtcaatcaagcgtccaaacacatagaatctctcgatttcaatccaatcgaaattagggtttatgtttttcgatttggggaaaaaggctaaaggtcacgactgtgttttgtttacttcatttaaccacgtgtggttatattttaactccagttaaagcctccgttagcaaagttaatcaccgttaacgcgggagtacaatttcaccactttaaattagatgaatgttttaatagggcgcggaaactaaacgaggtattattattccaaatttaaaaacacgggtattaaacggccaaaaattaaatagatggcggttttttcgggttttttcccgattatatatacataaatatttttcaaatttacttttatcaggtcttgatatcccgtacaaactcgatcaatctataatagttagatgtaaattacttgtaaactgaaatcaaatattttggaccactttttgtgctatatatagcgcatgcatgtttcttctcatgcaacatcgcttaatgaacaaagaagtgggccaaataaaaatttattgggcctgattaaatgggcactatatccaattaaactatg

SEQ ID NO: 12731 - DNA, 3000 bp, Unknown
  misc_feature (1)..( 3000): cDNA_ID_3026248_gDNA_ID_2214568_Annot_ID_186081 3000 nt of promoter + ATG
aagtccttgaggaagctcctgtgttcaacccaaccgaagaggtcagttttgttttctttttatgaaagaaaaattagggtattaaactaaattatctttggtaaagaatcatgtactcttacagaggaatatattccttttcctcttacccagtgttactgaattatcaggaattcagggacacactctcatatatatcaagcttgcgtgacagagctgagccgtatggaatctgttgtgttgttcctccaccttcatggaaacctccatgtcttctcaaggagaaacaaatatgggaggcttctacatttttccctcaagttcagctctttggaattcagaccgagaaccgaaagattaaaaaggaggttgatgcagatagtaatgatgctgcatctgaaggggttcagttatgtagagtagaacgtggtcctgggtatactttgaagtcctttaaaaactttgcagatacatacaagaagagtcattttggcatgaaggatgaggttttgggttcagagaactcatctccatcacttaaaccaaatgagctaattgtggcagacattgaaaaagagtacagacaaattgttgagagtccacttattgaaattggggtaatgttaaaaacagttgttctgcttttatatatgaaacggaatatatcactaacttgtcgtgtaaatttaggtgctttatggcaatgatttagacactgcaacgtttggaagtggatttcccttatctgcaccatctgaatctagcaaatattcatcaggttggaatctgaacagtacggctaagcttcctggttctcttctatcattagaagactgcgaatcagtttgtgttcctcgtctaagtgtaggaatgtgcttgtcttcccagttctgggtaagttttaaggttgatgtcaagctatggtcgtcaatttctgaaagcataagtataactggtcaacgcagaaatagcatttgttttgcaaactaccactagaataaattttgcagcattgtaagtttattaatctaatttgcttgtgtagtctcatatttgtctcttggaatatctgttactgaacagaaatctgagaaggagagactctactctctctgctatttgcatgtgggcgctcctagagtgtggtattccgtagcaggatgtcatcgatcaaagtttaaggctgccatgaaaagcttcatccttgagatgtcaggagaacagccaaagaagagtcataatcctgtaagtatttgaacacattaagcatcaatacaagttactcttttcaaaattccgaaagaaaatagacagaagagtgaccaacaacgattccacttgcgatttagttcttgttcagcatacacgaccatgacatgacatagagagatcacacagtatttggatttatctgttcaaagcaaatcctatcattactttgttaaatttttgtgagctattatatactagtattggttcatttacaagggaagcaattcatttggcaggtgatgatgatgtctccatatcaattgagcgtggagggtataccagtgacccgctgtgtccagcaccctggccagtatgttattatatttccagggtcgtattactctgcctttgactgtggcttcaactgtttggagaaagcaaactttgctccccttgattggttgccccatggggatattgctgttcaggtgaatcaagagatgagtaaaacgtcgctgatatcgtatgataagctattatttagtgctgcaagggaagctgtaaaatgtcttaaggaatatgggttgtcgaagaaaaacacagcatgttacacgagatggaatgattcttgtgggacggatgggttgttctccaacataatcaaggtaatactcactgctcctcctctttgcttgtcttattcctcagattatgcactaaaacctgcgtagaataacttcctcagtaccttttgctaattttgtttctctcttttatgtagtcacggatcaaactggagaaaaatagacgtgaatttcttatcagttcactagaatcgcaaaggatggacaagagttatgatgctgtgaacaaaagggaatgctgtgtatgtcttggggatttgtatctttccgcggttaactgttcatgctctgctaatcgttactcgtgtctgaaccacatgaggaagctctgtgcatgtccgtgtgacagaaagagttttctctataggtacactatggatgagttgaatcttctcgttgaagccctggaaggtaaaaagctcagctctatgttcagatgggcaggcatagatcaaaaattctgtgcttctccagccaccacaagttcaaaacccgaagaagacaaaggcaaggaaacagatgaggttacaccctgtaatatcacgaggaaagatgtcgcagctggaactaaggaccagacaagagtgaaggcgagatctttggctgatatactgaatgttaaagatggaaacaatgatgcaaaggagactttagaatcttgttctaagaaatcaaacaggccatgcgataacgattcctctgaggccaacgcgccaaagaaacagaagcagtgatgaataatgaaggagattgtagtttagtcacaaaatgcaagacgataaaaacacttttgtcttcttcttaaatcgatatatgaagcaacttttttttttggtaggcgatacatgaagcaacttgatatgtgttttgtttgttttggctaatagacaaaaacatttttttggtttcactaatatttatttacgttgactctaactaaagtagaaggaaaatatttgacgaaaatacagagccgttggatttgatgactttatgagattgagattagttttgactttctttttttgagagctgcggttttgtaaaaatggcccacaatttctctgaaaattcaaaattcagtgccggagattactcgtcgtagtcgtctgtgtcagatttagttctatttgcgatagtgcga

SEQ ID NO: 12732 - DNA, 3000 bp, Unknown; identical to SEQ ID NO: 12722
  misc_feature (1)..( 3000): cDNA_ID_3026252_gDNA_ID_2214568_Annot_ID_186080 3000 nt of promoter + ATG

SEQ ID NO: 12733 - DNA, 3000 bp, Unknown
  misc_feature (1)..( 3000): cDNA_ID_1387372_gDNA_ID_2214568_Annot_ID_186074 3000 nt of promoter + ATG
atcattttgattcaatcacagagctggtaaaagaagttgcaagtagtgattaagaacaatcgccaaatgatcaagtaattcttctctctatcacacggcctcatgtacacaaatgaagagcatagtctatatgcatgtaggttcatatccaatcttcacttcgttacaactgatgatagtaggacatgccttgtaaacttgctgatcatgttatattttgctgtgtgaatgaactatggctagtttcaaaattgtttgtctaacgtgaaattctctaaaacggtgcaggggaaattagagatcagtgagttgtttatagttgagctgatcgacaactatttcgggtttactctcaatttcggttatgttagtttgaacgtttggtttattgtttccggtttagttggttgtatttaaagatttctctgttagatgttgagaacacttgaatgaaggaaaaatttgtccacatcctgttgttattttcgattcactttcggaatttcatagctaatttattctcatttaatacaaaatccttaaattaaatttgtacagtacctttgttttgggtatagacaattacattttaagtcagttgatctgtatcaaatactacacttacaaaatcacaaagtaaaggcagcaattaattttgctttgaattgaaaagctttgagagagtaatcaaatgcttaaatcacgaaaacttacaaatttcaaaattttgtctctccataaattctcttaataaaggctgttgtttttccaatttgaaaattctatttttcaaaatcaagaacaggctatggaatttcaagaagctggttcatcatcaagtagaatcatcttcctctgtttcctctcctatctaaaatctctttagtcttcagaaactgattatactttgtgcagcagcaagagtaaagattgactttgtgcagccgatggcacacaaagagagcaaatggaaccatcgcaaaagcttggcctgggacactgctttttccaccaaccctggtttcttcctatttcctatagattggttttgtgtagaaacaaaatgttaaattatatgattccaatgattttaccactttggtttgtaggagtgttagatcctgaagaattgtttgggagcttaaagattgacgagaatgagattgaagttgaagtaaatcataatcacacacttccttcgaaaaccgatgctcgtccaagttttgcttgggacaatgctttttttaccgatccaggtctcatctttttacttcaaagttctttaccctacttgattagtcaattatttcacactattccactattcctctcatatataacaatcaaaccttataatttagctttgactctgtatattcaaggctgacattgtctatatttatgctaaggtgttcttgatgctgaggagttgtgtcttgtgaacaatggtttcaccagtaacacgcagcttcgtaagtctgctgatacgacgacaactcaaggaagcagattttctgtggccagcattgagtttgatctgttccacgacctgagagcctctttacgtaattcaccgaatgtgaagcagacagtaactcaagagacccatcgtaagttaccagatggtataaaggtaaacggaaaacctcagaaactgtttcaatcatttgctttcatctaaattttacttattaattggttttgtttgtcaagaggactaaaggatacaaacagaaagttcaacctttgagtctcattcctcaaccaaaagtgtcttcttcttcttcttcttctttttctttatcatccatctccaaatctttgactcctagtcaagctatacgcgagaagaaatgtgttgcaagtgaactcggtgaggacatgattgatgatacatcttattctttcttcaaaacgagaagaaaatcaaaacatctttaaaagttgcacatctttgttttattttgaagagaggaataaggaaaaacacaagaatcatggttttgaagaacaatctggatcgaaatctaacataaggtcatcgtattcaagttacgcagtcaaggacttgacatcatcctactctggtctgaggttaccacttccaaagatgggatttttcgactcggtatgcttcctaagaaattcgttttattgaacctagcaaatatcttgtaatgtaagattcctgagatgatgaagaaaaaacaaacttttgttacagcaggagaacggagagaaagaaaacagagaaccaaatgctcttgaagcaaacagaagaagaagacacaaatccaaacttgagacttcttctacaccagaaaaccgcagcattctgggacaacgcaaaacacgaaagtgaaacgggcaatgatatatatgtcttgggtgcgttacaaggcatcgtttgcatgttgagttggataagtcaactgtcttcttttcttttggttgtagtagctgccttttttttcctttgttgctttaagaaatagcccgaaaaaaagaatgttctacatttcggagcagaaaactaaccgaatgagtttttggtcggatcatcggatcgatcagatatattttgagttacgaactgttataaaaaaagccataattttgtgttgagtttgcaaaataccttataacttgttatttgagattgcacctccatatatattaattcgtaagagtatttattaagtaagctttagtataaatccttttttcctttaaagtaagttaatgttctactaaataatagtaaagttgaagaaccgctccgttttacaccatgcacgtgttatctaacaaagaaaatatggtacacctaatggctaatgcaaaggacaacacaatgaaactaacttgactctgtgttatacaaacccatagacatctgcatacatcctagtatttgtataaattggactcaaattcctgaggacaatcatagcaaacaatcacatcatcgcaatatacataaacaaaagaggaagaaaa

SEQ ID NO: 12734 - DNA, 140 bp, Unknown
  misc_feature (1)..( 140): cDNA_ID_3026275_gDNA_ID_2214568_Annot_ID_186070 3000 nt of promoter + ATG
aggtttccaagatcccttcttcttcttcatcctaattcctacaagtctgggtcctgtctcaattcaattcccacgtttttgactttaaacggcaatctggttttgataacggatcgtgttctatcttggtcaaaatcatg

SEQ ID NO: 12735 - DNA, 3000 bp, Unknown; identical to SEQ ID NO: 12731
  misc_feature (1)..( 3000): cDNA_ID_2712423_gDNA_ID_2214568_Annot_ID_135003 3000 nt of promoter + ATG

SEQ ID NO: 12736 - DNA, 3000 bp, Unknown
  misc_feature (1)..( 3000): cDNA_ID_2712419_gDNA_ID_2214568_Annot_ID_135004 3000 nt of promoter + ATG
gttacagtaaaccggaacattagcgtcaattaatcacctaatctgatacctaaaagtaaatatatagctgcttctgtatatatgacaagaattatgacaagaattatataattctgtaaaacatttcagtcatatagagagcttattattaaacttggaaagtaatgaaaagtagtagtaataacttttttgacatgagaaaataagaatattgaaatagatgaggtatatatagcgttgatgactacactaattactcataattattcattgcacacactatattttttgtgttgacaattttactttttgaatgatcacactcgtgacaattaatgggcatgatattaaacaacacatcaaaaccgtgtacgcatcataagtcgttttcatttgttttataagagcaacccagggtccaacttatgttatcatggcacttataaccaaaaagtcttattaatattagcatttttgttagagccaacgaaaaaactagatttttttgtacggtgtgatttttattagatgagactgatttagagtatatgttttacgattgtttggtgtttaaatagtatatctagtcgacagagaagcgatatacaatcttccaagcaaaagctgattgtcgatgtagtggaaatcattgtgtgtcgtcatgagttaatgtgggctagctcatgattattgtcgtctcattttgccaatgatctttaataccatggtcaaacggcaatacctattttggttaactagtgttttacaaacgggtaccatccacaatatcgacttaagttgtatttagctactttggtcgcgataaagtagcaactttgttttccctatcacgtttttacttgcaagttgcaaacatttttattaatagttgatttcgaataatcactaaaataaacatcaaatgaaacaaaacacatctctataactttacaaggaaattaatatagtaaatatgtaaatatatttagttacttttaaatatatattaaaaattaattactaaaaatattgtgactaagatattaattttgaaaatatatatatggttactaagatattagtcaatcaatcttttcctaaaaaaaaaaatattcagaagataatcttttaacatgatcacctctacatattcaattttttttgaatttgtctttttacggacaaatgaagtggcagagagcatcaattgtactcaccattttttccactataaaaataaaaatattagaaaattaagagattttttcttagaaaaaagaaaataagatttaaataatgataaatatatatagacttcaaataggattgttggtgaaaattttgccttgctatttatacctttatagtttattagtaccgtgggagatttttgttcaaatatcatgggcgttatgataacatttatatgaattcatatgccataaattgtaattattatttttgtaaaagtaaaatgatgtcaattcaatgtccagtcgctaccaactcaatggaaattaatacatttgagtgtactaatgtgtttttcttgtgcgtgttaataaaaaatattcgatgtatgaatgattcttaactgatgtaggagttgtaggacactagctatatcttgaatcacatcagaaaagtttattaattctaagtaaatacgcataaggattgaccaattaattcacaacataaataacataaaatcagaaaaatcagttttaatatttagctctatcattaaaagtgacggattgcccattgctttccacaagataataactatcgtgacttagctaactcgttaaataagcaaaatttctctgacgctcaaaactataaaatctaatgatgtttgaatctttatcaaaaaaactagaatttgtagcgacttcgaatacataacaacaaatcaatacaacacactatacaaacaacaataaaaaaaaggatagaaagagaaactattacatgcaggtaatgtggttgcagccttcaccccgatcaactatactcatacagttttgacatttcatccatcctagactctttgttgcagcatcaaatagtccaatctctgaattcttataagccttggacttaataaactcatctcaagtctttatcttacatttttaggcataatttgaaactacattcaaggcatttggaaggttcagtctgagaataaccaaagttgcgctttgacatgagaagtgaacaagatgggttaggacattacattttgtccaaaacgtggatcttgtccattttttctttctggattataagagtcatttgatgatatcagcaatatcgtgaaaatattttaagagaataactaattctaaatcccaaaaactttgggttcgaaaacgtaggttaaagacgaatgtgttaaacattttgatcaaagttaaagagttaaaaatttatgtaacttgcaataatcaaagaaaaatagaaacttggatgaaggcataaatttagggttatgacttaaggtagaaaagagatgtagcagtgcacgtgtgctcccaaaacctcatcatcatagtgtagtgtcatgtgcataattaaataaaaaaactcactggcttgtaccattattaatcgcacaaggagtattacaaatcagttgttttcatcattctactctcatcatttcatttcctctcatcattagcttcttttttcttcccaaacttattctattgcatgatctagtcatttcttttgctaacaatttgttagtaaaattttttagatatttttgatccaaggagttttttttccaataatttttcattggtaagaacgccttcttacacctattctttttttcgtcaatttcttgcacctattttaaaaatgcaatttgatatcttttcaaataattaaataatattttctttgacaaactaaaatgatttatatatggcaaaaagcagaagcattaattaactttatagattcactttttctttttatatt

SEQ ID NO: 12737 - DNA, 3000 bp, Unknown; identical to SEQ ID NO: 12730
  misc_feature (1)..( 3000): cDNA_ID_2709542_gDNA_ID_2214568_Annot_ID_135005 3000 nt of promoter + ATG

SEQ ID NO: 12738 - DNA, 3000 bp, Unknown; identical to SEQ ID NO: 12728
  misc_feature (1)..( 3000): cDNA_ID_2709517_gDNA_ID_2214568_Annot_ID_135006 3000 nt of promoter + ATG

SEQ ID NO: 12739 - DNA, 3000 bp, Unknown
  misc_feature (1)..( 3000): cDNA_ID_4262304_gDNA_ID_2214568_Annot_ID_135007 3000 nt of promoter + ATG
aaaaaaatgcttcgtatttgaactttacgaagactactgttatcagtttattgtaagtttacttatctatgttttgtatttggattttcataaacacaccaatgtgacgtagaaatctgatttgcatgatttgtatttggatttaatccgctaatttttttagctatttaactattttcatcataaattacaatttattttcttataaatttccttaaaatcagtacttattccaccatattatgcaattttcttataaatttaaatttacatgtagaaaataaaacaaataagctaagcgcgtttatattttttttacgaattcaaaacatccaaattcaaaaacgaatataactttttccctttagtcgacactaaactcatcacaaatttgaaatagtaggagaccatccttaaatcccaaacaaaaatactttatattgatgtcgcttgaattgtcaaaacttccatctaaataatgagaaagaaacaaactacaggaaagaaatttcagtgaaaagttgacgtggacaagttagatttcgaagttctgatctaatccaatgatatttggtgagccacaaaaccattatccaaaaagacaatgtacattccgacccaaccacaagctcatcacgatccacaaatgtcgccacgtctctcgccgacatcatagaagtgtactaaccgtgtggtgtccagatgccatgtctcctgcttagaagtttccgcgacagaagattcacttcttcatctttttaaaaaaaaatgcagaatcattttcgatatcttacatgggtcactttttaatagttattgttctgttactttttttttccttacattaattaatactttatcgaatgtttgtttaagccgttttgggtaagctatttgttatgaacaataaagttgtcggaacaaagaatggagaaccttaaatgaagcctttgtatttcacgcaattgttttttacttttaagcagccctataccaattttttcacgtgttttaaacattcttgtttatagtaacaatttgagtctttttgcttcttcttttttaattacagcacgtattagcagcaaaatgatattattgacttatagtcatgtgactcatgtaaaaaataaaaattcaaaacaagaagatgttataaaaatatggatgaagatgaattgtatacatagaattaatattacaatgaatccgaatgtgtttagataagttgtaaattacaaaattgcgtagaaaaaaaaaaaatgttttgctatcagtatatccgtaatactttttatgaacggtcccatctctaggaaaaatgagtaatataattcatgaagcaattcattttcattttatttacagaaaaaaataatggtcgtcgctcgattattaagtgggacatttgtttttttttttggtattattaagtgatgcatcatctgttgtagtcttgtagaactctataatccgccaaatgcttcgcttcaaatatattcttgtatttatcttggtgtccaatcctactctgccatggacgggcctagctacgtaaattagatgggtctaccacggacaccacgtggacaagatttaatgttcatggttcatggaggtcgatcgtcttcccaaaaaaacagtcatttgatcctgtgttaataaaagtggatgatattcatgttaatatttattaaattatatggtttctcattctccattcttcatatcgtaattcttgctccacatatgaaacatttcaaatgttgggaataaaaggtttttttcagaaaatataataatcgtggtaaattcaatcccatcgcaagctctcctattggggttgggaaaatctttgaaaattttctttcaggctgtgtttagttccatggccaccttaatgaccagtatctttaaatacggcaagagttttaaatttgaaaagaaaaacaaaaacgtaaaatttcaagtattagacaacgtacattcttaaataggtgattgttgactccttgattaggagagctttcagatacattcgccccatttcactgtcatgtcatttgtatatactgttgctcgtcaaataatctgattctttgtttcaatttgtaatagcatttaaattacttttatttttctgcgttaaacttttcgactaaaggtcggtccaatttgcattttaaattactcttatattttctgcgttaaatgtatgagcgacgactctttcattttaagtagtctttttcattactttgcaacatctatcagtgtctgttattttgcattttttttggtcttttaagaactgaaatctaagaatctacgctaattacatgaatacaaccattctatcatttttctgtaattatggtgatatgaggaaaaaaataaataatggttgacagttatactaaacctaaacatattcgggtattaaagttacttggttagaaagaaaaattaaaaacccaaaatttatattttaaaatttctctttaaaggtttagctccggctatgaggatattgcgcacaacacaaagcctcgtatcaagtagtctacatgaaatgtttgcccattgtaattttgtaaactagcttgtttgttcgtgggtaaaataacttaataggaaaataccagcaaaaaaaggcgagaggaattagtgatttttccccccaacaaaattgttgcaaaataaccaaatcaaaatcaattgaaagcatattctttagacatcaatagagtcttcatagactaatcacaatcataaacacctgtagtgttcccttattttacgaactttttaataaataaaaaagaagaagataaattaattaacctcattgcaaaagaggaaaaacctaaagccacagctttccataaatagacccactcaccatctctgcacatcacccacatcttctaacagtctctcactttctctcttctctctctctctttcttttttgagtccgtgaaggctaagtctgaaaga

SEQ ID NO: 12740 - DNA, 3000 bp, Unknown; identical to SEQ ID NO: 12725
  misc_feature (1)..( 3000): cDNA_ID_2712416_gDNA_ID_2214568_Annot_ID_135012 3000 nt of promoter + ATG

SEQ ID NO: 12741 - DNA, 3000 bp, Unknown
  misc_feature (1)..( 3000): cDNA_ID_2712413_gDNA_ID_2214568_Annot_ID_135013 3000 nt of promoter + ATG
gggaaaaggtacaaacattcagctttgttatgcttctatggtgtcaattttcatcatatcaatattctatccagattttttacatcttaatcagaagcggtgaaagctttagggagttagttgcatataatactaaatattgaaactgggaaagttccttaaacttaactgttcaaatctcaattttgataagcatagtgtataccaaatctgagaaactattcagagcttgtgagtatcttcttgtgatctttacattatgtataaaaatttatggtgtaacagtagaatgatatggttttataacaggcaaaaaagttttacgagtcaggtctgaggctggaacctgggtaccttggagctgtgttagccctagctgagcttcatctaatggaagggaggaatggagatgctgtatcactacttgaacgatatctcaaagattatgcagatgattctctccacgtcaagctagctcaagtgtttgctgcaacgaatatgctacaagattctttatcacactttcaagctgcattaaggtttatgaaattctaagccagtagtgcttatagttcttgttgctcctatgcgaaacaataacgatataacagagtgtaaataatgtaaacgcagaataaatccacagaatgaggcagccaaaaagggactagatcgcttggagaaacaaatgaaggttgggaagaatcaaatcgaaccattttattatgaagctcgaacaaggatgatgtttagtgtattcacaaaattggggtgtttgttgcagggaatagacccagatgcaacagatgagaatgacgagaacgatgttgaagatgttgatggagacaccgaagaagctgagctcatgtgaagagtagagagacagaagagtgtgtaaactgtaaaactatcgaatccttaacattaatattaatagcaaatgtcattccttttgtttcctataaacaaacttagaatatgaaaagaaacgaaaaaaaagaccaatattctacaacattggacgtcgtgacgtgtaaatacgccattggttaaaacacaccaagagaacccattaccaaagtctcacggagaatcccatctctttccccacgccaactcaatctttttcgtcgtcaaaagccaaagctttttgcttttttgtcttaatgggtttcatctcttgcatctcatttccgacgatcaattcaagaattctatcgactcaccacttttccaagcactcgacttcagcgtcttcttcatattcacttaagtttgctttgagacgtcaggaggataaacccaaagtctcgttttttcttccattaacgtcttcgttaatggcgacccctattcaagcctcttcttcctccaccattggtatcttcactctctacttcttcaattcgactgctttaaggattagtgaactttgacttttaagataatcctatgttaatcttttatgcttagtgaggtaattagagctttcgaatgatttacaatttctgattacattgatgaggaagctaagaatatggtaaatgaaggtttagtgatctgcctctccaaagtagtgacctttttaatatgttgttttgtatgaaggtgagaccagtgatggcttgaaggtccagtctcatgtttcaattggagcaaacgatctgctgattgttggaccgggtgttcttggacgcttagttgcagaacagtggagacaggtataatttctgtgttgtatatcccctacaggggacttagctcaatttgatacttactcatattcttcttatagaacatccgatagatatggtgtttctgtactacgaaaacaaaaacgtttatgatgtcctgcaaatccctgttttaatgtgtcttgagtgtttatcaatatggtgtgtgtgtggatagtgactagtactttttcttcacaacgtatatatagtaagagtcatgtttttcacaatatggaagttagagttagagctttatatgtggagcaggaacatccagagtctcaaatctttgggcagacagtaacaacaaatcatcatggtgagttggagaatttgggtatcaaaccatctcttaaaggaaccgaatatgggggaaagttctcctatgtgatcttttgtgctccaccatcacaaagcgctgattatgctggtgaagtcaggtgattaattacaaaaaatcttatgttttaataactagaaagtcaatttatgcattatgatctgttagtgaatgccagaaatgtcgactattgtgcgcttgactttattagctggagaagaaaaatgaagctaaacgtcaatttgtgctttttagttcatcctatgtgacaacagtaaaaacatttgccttcattcaactgtctaatatgtgtgtatgcttgtgtttacaatcggatcaggaatgcagcatcaaactggaatggcgaaggatcattcttattcacatctagttctgcaccttatgattgctttgataacggagaatgcaacgaggtttgtctcagcacctgaatacctattttctttcagttttctccatcctaaaattcctagttttagactttaacaccacatttagtattattctatatcaaagttgtttaacacaattacttgttgaggtaatttggggaaaagagtctctcacatttaaaatctatgaaaatcaagtatacaatcaataaaaaaatttgatatttgagaccacaatgcaaattcttgttcattgtgaatatatatatgtgctattcaataagaatttctaagttcgttacccttcactgcaggattctccagtagtgccactgggaaagagtccaagaactgatgtgcttttgaaagctgaaaaagtagtgttggaatgtggagggactgtccttagactagcagggctttacatatccttttggatttcgatactgaaactgaatgagcaagtattgaaagacttttttcttggtctgtagaagatttgagcattatg

SEQ ID NO: 12742 - DNA, 3000 bp, Unknown
  misc_feature (1)..( 3000): cDNA_ID_3026209_gDNA_ID_2214568_Annot_ID_135015 3000 nt of promoter + ATG
tgtcggtttgggttgactcggttcgagatttcttgtttcaaaatgaagagcgagcgtgaaggatcttttacttcatcgctgctccgaagaaaaaacttcaccattgccactaacgacgaactctcttgtctctgaaatggaggttccaaaggagcagatcgcgactttaatagagcatgggctttacgattctgctgaaatgctcgtaacttctctagcttttagctcattttgattgtctatctctttttttctaaatccctagttttcatcaagagctaatgaaattctctctatatatgcaactaaatccagggctgctttctcgtttcttctcctactgttagtgccgaaactagtcctcagctcaaggcggagaatttggttaagcttctttctccgtcgatattttctattttagtagctgctgagtccgttagattgaagttagattctttctgtgttttttaatcagattctactgggtgatgctttatttcatcagagagaacaccggagagctattgtaagttctcaaaagtttcattctttatgtttctcttttgctgtgaaggaaatgttactcagttctcgatagtttagttctgcctcaaatttgaactctataaatcattctcggaacttgaatttgactggattatgataaaattgtaaagattctgattatatgaatttatggagtgagcagagataagttttatatttgtattgcttattcttttcctgtggattactttgaagtcatctcgaaattctgaatatgtattccttctttttgtcagcatacgtacaagcaagcgttgcatcattacacaaggattccgaagcaaagctccggtatttcgaggagttcattatctttatctaccagatcatctgtgaatgcctccagcatttctgctattaatgagaacgaggtaaataactgtgttgcagtttccagaaagtgatgtggtttggtttaatttcattggagttcatgtgcatcttctttttctaactttccttttaggtgagattcaagattgcttcatctcactttgctcttaatgaaacaaaagctgcgattgctgaggtatgagtgtcatctgtttgtctggttttcaagatttatttagtcttctggatttgttggtctagaaactttggtatatagaaaataaaatatgtgtgtatgagacggtaaaagagctgtctagggatttctctatttctaagattatagattggttttgtataggatgacttttatgtcttgctattgtattttataaccagagttaagtaactgtaatttcagtgaaacattcttgggccgtaactaatgcattgttatagtattcctgaatgtgagttgaattttgttgcgttgacctgctcccatcaatgcaaatccatattacaaaacaagtaaactaattggattccttccaacactgcatgtaggtattagggatgataaagccatggtctgcttagctataatctatttttgcacttgttatttctttgccagatggaatctgtcaagaccaggagcttagagatgaatatactgatggcaaagcttcatcgaaattctggatacaaccgtggtgctattgctttttataaagagtgtttaaggtctgtttttcgttttctttcccaacatttcctagcatagaaacactgttataatatctcactttttacgttaaataccaattcaacacatagtaaacatatatataatctttaatctctgcaggcagtgtccttatgtacttgaagccgtcataggtttagctgaactgggagttagtgcaaaggatatcatatcatcgtttactcaggtgtccctttctacgagatttctttcaccacttcttcaaatgtgttttgcacctctttctctctattttgcaattaccttttctgtgtgaaatccatacaactttgtaatttgttgtgtcatttgttcatttcagacttcaaatagaagtgcaaaggtttcactcgatcagatagatcctacccgctggttgcaagtaagcttactctttaacaggatttacaacgttgaaaattgtttgaaagtacactcattaatcatgccgccaagctgattattgtacgtgagttagaatcttattttatcaactattttcccccgaatacgacttcatatataatgattctaagaattctgtcttcaagctgttcatgtgtggaaagtgaataaatcgtcttaatagtattattccctttaacaaagtagtgctttgatgttcttgtgttagtagaagctcgactatttaaccaggaaactaatactccacataacttttcttggatggatgtttcattggtttcatgttgtagcatacctggcaataaaatctattttcttctttgtctttttcggtaatttttctttgttttcacagcgttatgtagaggcccagtgttgtgttgcttcgcatgcttacaaaggtagctctcttttctttttgggatgcctatgcctacaatggatgaaataaggcatttagttctttttttttaaccttgtagatttcatttcttgcattttatttgtgggaaattctgcaatctgatgcttgctttactggatatggtgtaatatttttttgttactcaggggcgctggaactctttgctgaactcttacaacgatttccaaataatgtacacttgttgactgagacagcaaaggttagggatgacatcgactacgatgcaaacagaatttcacctgaatttttcattttatcatgactgacgctgattgacatttatttcatttgtataggttgaagccattattgggaaaaatgatgaggccataatgagatttgagaaggtagtcaccacatggatatttttttctcaattctcaacttctttaattcatgcataatcatctaaaagcttttataggttcggtcaattgatccttacacactaaccagtatg

SEQ ID NO: 12743 - DNA, 3000 bp, Unknown
  misc_feature (1)..( 3000): cDNA_ID_2712409_gDNA_ID_2214568_Annot_ID_135017 3000 nt of promoter + ATG
ctggatttagttgcatatatagagagaatttcattagctcttgatgaaaactagggatttagaaaaaaagagatagacaatcaaaatgagctaaaagctagagaagttacgagcatttcagcagaatcgtaaagcccatgctctattaaagtcgcgatctgctcctttggaacctccatttcagagacaagagagttcgtcgttagtggcaatggtgaagttttttcttcggagcagcgatgaagtaaaagatccttcacgctcgctcttcattttgaaacaagaaatctcgaaccgagtcaacccaaaccgacattaaccggttatctatctgaaatccatctcggttcattaaaacccgacttttccaagagcccgacttcaccgaacaatctctatctccggtcatgcctccattaccgtcctccacggcgccttcgtcttcgagacatcttcgatcgccggaaagtatcgcgaaatttgcagggagagcaatatttcctgctttacaggggaaatcgtgtccgatatgcctcgaaaatctaaccgagcgaagatccgccgccgtgatcacggtgtgcaagcacggatactgccttgcttgtattcggaagtggagcagcttcaagaggaattgtcctctttgtaacactcgttttgattcctggtttatcgttagtgattttgcttctagaaaataccataaggagcaattaccaattcttcgtgatcgtgagactttaacttatcatcggaataatccttccgatcgccggaggttatctctctctctaagatcctctctatgaagttaaaaatcacttctttattatattcacttggttattatttcattaggataattcaaaggtcgagggatgttttggaaaactctagctcaagatcaaggccattgccatggcggagatcatttggacgaccaggttcagttcctgattctgttatcttccagcgaaagcttcagtggcgagctaggttggtttactattgattctaactctatagcttcatttgcaatctcctttttcgaagtgttagattagttcgccgttgtttctaactagtgttggctctaaatacagcatatacactaagcaattacgagctgttcgattacattcaaggcgcttggaactagtaagtttcattatacaatgtgttcttctctgtttgatgtttgtagtattggggtttacactcttacattattggatatatgttcacattggaagccttatatatacctgcttcgttgtgtcatcttggattattgtagagtttggcggtgaatgattacaccaaagcaaagataactgaaagaattgagccatggattagaagagagcttcaggcagtccttggagatcctgatccctcagttattgttcattttgcgtcagctcttttcatcaaaaggcttgagagagagaataatcgacaaaccgggcagaccgggatgttggtggaagatgaagtctcctctcttcgaaaattcttgtctgataaggtggatatattttggcatgaactaaggtaagatttttatacgctagggttttttcagagtttcaagtagttacaggtttagtatagtagtacagaaaacacataggcaacctaaacctagtgacttgtaagtctgaacagatgatagagctgatatctgtttggtttaggttttttggtcatatactatttctgatgagaaagaaaacatttttcagatgttttgcggagagtatactcacgatggagacttatgatgcagtggttgaatacaatgaggtggagtaatagcagtaaaaaaaacaggtaaagaaattaggatatgtattatgtgggtttggtttcactaagtaggaacctgttttgcttcgatggttttttttctgaagtcattatgttgtattcgcttgcagataaccgagcactatgctctcgtcaaatgaagtaaatagacagacttacaacgcgactgttggtgtcttggaagttcaatagtggaaagactggaccaagtaagagaaaccaagagttaaagagtaggtaggaggaagatgttgagatgatgcaagtttaggtgtggagttagttttgagatagctataggtggattctcaaatagctgacacttagtctctctacttccataatgtacgtctcttctataccaaaaattctcacccccaaagtttctttccaacgcttttcctcacctcatcattttttcttacgtttcgagtaccacctatttcaacaacattaaatattttctataatttgactatcaatttttaataaattaaaactatacatagttttagataaattacacgaagcttccatagaagaggaaagttcatttgaatttctcttctaaaccgtaccttaaagattaaatggtgaatatacacggggaaatttttttaataaacaacgcgttctctattaaggtattgattgatataagtaagcaagcgggtgtaacacaaaataaaatattataaaaggcttcttctataggttggtaagcggcaatccagctgccattgcctatttgacttcccccattcgatcatggtgagctcgtcttctctcttctcctcttatctctttctctaccattttcttttgctttaaagctctctcaatcatgatcatgaagacccccatcacagcattccattcatcctcatgaataattctacatcaggtttcttctctttccctttctgattctcaacactcttaccacatttctacttttgtgttgtatatcgatttttgttctacattcttccaaatgtcagggaatctagttgaaatgtgatgatttttgtgttgataacttgatatctggtatggattgaatgattggtgattatctctgttaattcatctctgatcgtgtttctgtttgtgttgacttggaatgtggacctggtttggatagtgaagaggctggtttcatctaaggca

SEQ ID NO: 12744 - DNA, 3000 bp, Unknown
  misc_feature (1)..( 3000): cDNA_ID_2702631_gDNA_ID_2214569_Annot_ID_135021 3000 nt of promoter + ATG
cataaccatgactataaccagaaccataactataaccaaaaccatagctataaccaaaaccaaaaccatcaaggcaacaaccccaagaagatgcatcgtcaaccatcttcgtccgattctgagaacataatgagcacacgagtcatcaccattgcaggtgaaaacaaaggtgcagtaatggagatcctacgatctcctcaaggcaacaaaaccggtggttcaggaacacattcctctagggtttcacacggcaccggagagaaaggacggagacttcaaagcagcagcagtagcagcagcgacgaaggagaaggtaagaagaaaacgacgaagaacgtccctaacaaaggcaatagtaacctcccaatgaaagcttttatgaatagtaacgttcagatgataaacaactccattgtctacaactcgacggcatctcatcatgatcccggcgttcatcttaaaatctcccggaaacctggctccgacaatggttttcatgtcagtgattacggtaataatggcggatacaccaactgatgaaagaagaaaaaaaactaaactaaaataaaaaaaaaggttttggatttaaaattgcaataaattcgatttaattaaaataaatgaaaaaaaataaagaaaatatgagtggggttaatggtttctgattcttctctaaagcttttggaaccctctcacttatatggaggctttgattcgtttacttaaaacgaacttctttttttaattacttttgtaaacgcgcgcattggttctctctgacgtaattaatgagaaatcagttattgctttaataataatcatgaaacccatattattgtgaaggcccgatgtatactacataagcccatattcatacctatgggcctatataaacaatttgtatttaccgtaatatatttacttttatcaattggggtaacgatttggataattgaatccaaaagattattgtgccacaagcgacaagtttatgtgaagaaaagagaaccaaaccttgtatattattaatcaaatgactttcaaatcaactcaaatgtctaattggttcctgtgtccgttatgagaaaagctcatgcttcaataaaccctctaataagatcacattatttatttatacaaaaatatcccaaccaatgtatatgcttttatatttttaattttttttgtaatgtagaatctattctacacaaatcgttttagtgattgtaacagtatctgaaaaagaagtggggaactaaagtgagcattttgaatgcataaaatagaaattggaggagttgaaaagccagaggggtcttttataagctgatttattctttattagttcttgagtcgatttttgtgaatatttaaaattcaccaggagcaaataaaaacatcactaccttataaaatcataatacaatactttcgaaaacttatgcaattgaataaattggccatataattaggcaaaagataacaagaaaaaatgtccaaatcccaaaaattcgagaacaagaagcaactgacaaagagaaaggagagtgaagtgtccaaatcccaacagtatgtgtgtggttttgtgtgctcttcaaaaagctttagagggtactttgcatgtgcatatgcatatgcattatgcatatagtcctcctaatctttaatattgtatctttgaggatttaataggtatctgagaccttgcaagttgcaactgaagaatttgagtaaagttggtcacagattataaatccgtaaattattacattttacaattaatccattagtaacggattggccatgtgatttggaatttacaacttaataatgttgtcaataatttaagtatagcttgtttctgtcaagagaaatggcaatggcatagctttttacaattttgaagataattttacgtcaacgttctaaaacgttgatgattatcactctgaaaatttgacgctagggtttgaatacattattgttgatagtgaagaatgatccgcgatgacattccgcgacatttatattatagtgaccacagtgaccgaattgcttccactatatttggacccttcttgagggaatccaaagctggtgaatatgacattttcaaataagatattaaaattgtacgtccatttttaaaaattgattgaaaccaaaactttcgctttaatgcagcgaatttttcctttgatgtctaatcaaatgatacaaacactgaaagcaacagaagtctaccaacaagattacaagaaatgaaccacggaaagatcaaggaggcactgaaaattagtattaaaattttcttgtcaaactttgataatttataagtaatcgggtcaaaaagcaatttcttaataattaagggtgggacaacgaatagtgtgacgaccagattagcaagtgacatgtggcacctacttattggccttgcctcccaaaagtcagaccgatccaacccactctttgtaattaacacgtgtcagaagctgaaggactctcctatatgatttatttaatgtcttaatagatttctcatttcacactatccttttttgcttgagaactttcttcactctttcaactgctaagaagaaatagagaaaactatgacggtacgtaaattttgttgttaattattttgctttaatccttttttcatatagttcgtaattataaatctataattgttttccgggatttttcgaagatctttaactgggtgcagaaaaagctgcaccaaaatgtcatcaaaggttagtttttttttttatagataatcaatatcagctttattttataaaaaaataacaaatttgctttattttccctttgtttattagaatatcgtaagcttcactaaaatagtagtttactttttgtagtagtatcatataggatcatgtggttccctgtttaataaatagttttatattaacgtataccacgttttcgctaaagcataaattttgtccaacctatatttattttcat

SEQ ID NO: 12745 - DNA, 3000 bp, Unknown
  misc_feature (1)..( 3000): cDNA_ID_1015524_gDNA_ID_2214569_Annot_ID_135022 3000 nt of promoter + ATG
ttttgttgttaattattttgctttaatccttttttcatatagttcgtaattataaatctataattgttttccgggatttttcgaagatctttaactgggtgcagaaaaagctgcaccaaaatgtcatcaaaggttagtttttttttttatagataatcaatatcagctttattttataaaaaaataacaaatttgctttattttccctttgtttattagaatatcgtaagcttcactaaaatagtagtttactttttgtagtagtatcatataggatcatgtggttccctgtttaataaatagttttatattaacgtataccacgttttcgctaaagcataaattttgtccaacctatatttattttcatatggtgaaagaaatagatggtgtgaggaaaaacgagaagaagaagaggaatgaaggaataagtgagattgagaagaacacgaaagctatattggatcaagttggtttagtggatgctcttgataattggttcgatggagttctcaccatcggcacatttggctttgacaccttgaacttcaaagaagaagatgaaatggatgatgatgaatgcgggagtggggatctcgactacgtcgtaattgatggcagcatcatcaagaacgtcgaccaagagtcggatcctcttatctccgttgaaaataagttttatgatcatcatgaagatgtcggggtacgtattctaatcagttctattgagtacatttttatgatcctcgggttgatttaccaatagagaagattatatagacatatgacatgcatatgcttcaattgttcgtgtgcgtttacgttgatttgattagtatattcaaatgaatccaaaattttaaaatctttaaactagtttaattgttattgtagaaataagttaactaaaatggaaggattatacgttcactaatctacaaaaatttgggttttctttcaaaatatgactttaaagacatataaatgcagaaattgcatttgagtcaatcgagatcgtcatttttttttctgtcgacaattaaggccattatacgcaaagaaataagtacataaaataagtacataaaattatatcttcttgactcttgatattgaatttcttgagatctttcgtattagaatctgtacgtacaggccgatactgatcactttggctcgatcaaaaccgctgaaacgccagctgtcacggcggcagccgaggccgagatagagccacagaagaagaggacaacacttgcggagcttttcatggaggaccacgacaaaggttatgacacgtggcattgcaagaaacccaataaccctaatcttgacggtgaggaggttaagtactataaacaaaacggttcaaaactaagcaagaggttctcgtttgttaagaagaagctggtcatgtcaaagtccaaagaggaagaaaacgacttacgtccaatcaagaaaatgcgtcaggtatttaaatttgttttagtcaattccgtaactatgaaacattgatgatgatggatatatgaacatgttacatgtgcctctatagctcaagggaaacaatgtcacgtcaagatctagataattattcgtgcatgttacaattacatcacttttgttgcttcataagtgtactcatatgtgagtaaatattcattcgatgtcaacaagtatagcatcattatatatgtgtatatattactgtagatgataaagaggatgttgaagaagaagatccatccagatgtcgatgcaactaaggctttaaagaaggacgttccatacaagccaactcggaactgtgaagctctcgagtcacattatcttcttaaaattcaaggtttgtatttcttaattattttggtttaggggttcgatatgatttatttctttcatttgctcgtatatatatgctttgtggacagattgcgtggcctagaagtctaagaacgacgacatcgtacaagagcaatctctggatctattgttctactccctataatatatgtgatttttttgttcttatttcagaatgtgttggtattgttatgactgttgagatgtattgctttcttcttacaaacattactaagttgttagtatttgttcctgttatgcatattgtattttattactatgtcatatgttttcttatttatacgtatatcaatgcatcgttctaaaatcgtggattgtcgtgaatctgtgatagtattccatcatgtctgctatagcttggtcagttttgaagaaatttcaaacctaaagtcataaactgataaaggactaaattatcctactcaaaacagaaagcccttttgtgcgttattgggcctaatcagaaaagtgattttgaaaaagggcctaatcagaaaagtgattttgaggctttttaaaagtttaaagtaaacaaaagaaaattgaggcttgacttttctttctttttttgacttgttttcttttttcctttttcttataagagaaaactaaaacgtgaaagagcttcaccaacctgaggtcgctgaccacttggaggcattctcagctaccaatccattaacttacaaactccatattcttcacgttttactatggtaggtacctttttttaaccttgttcgtaataacaattttatacgaaaagaatagtattaaacttcaacaaaaacaactatgtatattaactggtcagatatacattgctttgttcccttacatcttcaaagagctaagattaaactatttaccccaaataagactgtaatttcatcaaaatctagtaataataatattcaacagcttacaatataaacataacgcgtgtggtctccataagctacgcactgtcttttcatcggttcgtagaaactagaaactcttcccctcacgatcttgctttctttattttgcttcaaccctagtttatttgaagtctctatataaagttctctgtttcaagttactttctcagcacgagcaaccaaaagtaatcat

SEQ ID NO: 12746 - DNA, 3000 bp, Unknown
  misc_feature (1)..( 3000): cDNA_ID_2702627_gDNA_ID_2214569_Annot_ID_135023 3000 nt of promoter + ATG
tttctttaaaattatgtaattttaagttttaggataaaaataaaataaagttcttttcttaatgctaagttgaagttagatcaacggccaggcacttctcactgtgacacgagagaaatcttagaccgttgataaaagccatcgataaccgatatttagggaccatatagattttgtgtttaagcagatcatgtggattgtctgattagccttaaatgaccattttaccctctccgttgagtatgtctatgttttaggcggtgggtattctggtcagtctaaagcaagtattctacaaacgccaagtgtgcatatgtcaattataccacactcagaatatttgacacgatcaagcgctttgtcgtcgcatgcatgtggcgtaatggaaagcaaaggatgctgatcggtcaaatccggaacttgattactggatgtaaaacagaggtaccgtcacttgagtacacaagaccgcaccatagccaacaacaaagatccaccgcaatacatttataggagaatgtttttttccggcgcgaacggtcaatctatagctcaagtcctcagctaaaggtcaaaattcaattactccttcaaaattattatgtctagcacctaattaagctacatgtatataactatatatgttaaattcgtttcttttttttatcaagtcccttttgtaatatacgagtataatagaagagaaataccacgaatcttctattacgaaaatatttcgtcggaatctttctacagatataagaatatactaattttaaaacatcataatttagcggcaaccgaatgataaataatcacaatacatcatgtggcttaagaatatatataattgagtatatatagtactatgtatatgtgtaatatgatgacacctttaaataataatgtatagtaagttgtatatatgaatccaggactgaattttgtgatatatagaaattttcaactatatggtggtaatatacatacatttataaatagtaactattcttagcaaactaaacagctagaagttgaacaaattgtgtatatatagctgtcatatagcgtcatttaacacatctagggaggttagtaaactaatggataaatttaatctgtctcgtggataagtagcaagtacaaccgtatacgctattatctgttaccaatggagtttaaaatctttaaccttttcaaactacggttgattataaatttgaggattgaactttcactttgttatatagcatgttggcttattatattagataacaaaccaattaaagatacacttgttgataacccattggagaaatccttcatcgctcccacgtccgtgattagaaaacgtatcgagaattagaaagtgtcaagcggttataagttataactcctgaatccgtgaccgattaatcaagaactagtcaaatattaaaataatgaaaatcaaatccatcgtacactgcacacgcattcatttctttttattattggttacacttcaatcaagttgtagattcttatatagtttggtctatatctaagcctttaacaaaaaaaaactaactataaatggtactatatattcagtaaaattatctatatttagcttttagtttctagtccagtacatattgaattacatattgaattaattttttttttatctttttaagatctattgcattatgtttttgtttgtgcaacctattgttaatattacatttttaccgtaagatattgaacataggcccacgttatgacgtcttaaagaatgagaatagatcccacaggattggagagttaacgtatggcggcgctaaaccgttaaaaactttatttgattactttatgaattttgtagtcaaatttttttttttttttcttgtagtgaataagtaatttttgaacttgtgagaatcccaaaatatataattttttcgttcgcacttcacattatttgtttggaaaaaacgctgaaaaattgtttgatgtgaaagacaacacacaattgtaaaactgttatatataaataaagagacagataagtgatttagataagtcaagtcaactggattaccaattaacagataaaatttagtatttaatttatacaagcagactctatgatttatgtttgattcaacggttacgatgatgattaaatagcgtttacaataagttattgatgtaaccatcacagtgcatctatttataattaataagattcatattttcttttatttgcgatttaagccacctgttataaattcatttgttatcagtgaaacttctttacattaaaggctacatatgcactattaatattacaattattcgttacattctagagtccatgtaaatcatttagacgattacattcaaagtggtcttgcttttttttttaaacacctttagtttgatgtttatttatcaaacagatcggtgaacaagaaagactctgcaatcatatttatcctgtggctgaacggtcttgctttttaatttcctttaaaaaaacaggaatcaaatctataagcactatcaattatttcaattataagatattcatccaaaagagattcacaatcaacgtcgatcgattctcatggaatcgaggtccgtaactctactacatatgtagctggtttttaaataaaattgtacttagttctccgaataacattttagataaaaggtaaggtgtaaatagtgtataaaatgtaaattatatatgtcgaacaatgaacacattcgtaacatagagagcgacaataaaataaacacaaataagtatataataaacaaatttatttaaattataaactaaagttaataaataaataaaaatgtagccaattttgtatataaatgagttctgattatctatataaataccaaagccatctgctcatctttaagccccacaggccaaaagacactctccttttgtttatctctctcttctcttcacttactttgctttgatccgccatg

SEQ ID NO: 12747 - DNA, 3000 bp, Unknown
  misc_feature (1)..( 3000): cDNA_ID_1808306_gDNA_ID_2214569_Annot_ID_135025 3000 nt of promoter + ATG
aagaagtagggtaagattgttggccacttgtgacaatgaatttacgattattataacctttttgatagtaacattataaataaaaccaatgatgattttgaccaaaagtaattagatatttcatctattaattctataaagttattatcacgaaaagataagctttttttaagacggtgctaaatgtctcttccccattggcacctccttggcatcatatttccacagttccacaccatcagatattcagattacacattaatttgatctagttgtttctcaaaataaaacaaaaaaatttcgaatgtggtttagaatatttattgtccattcggaaaatatggaataatagagttctataattctatcaacaattccaaaattggtggaaaaaagtcttcttgtctgataaagtcactactataaattactttttctatcgttaaaaaccaaattactgtgtttgattctcatgtatcataaattgattagagatgcagtaacggtaataatctaaaaagcaggacaaaacttaattcattcgttaaagaaaataaaataaaaataataaattcattcgttaataaaatagatcttcgtttgaatattacgatggtatgaaaacaaagaaaaactttgtgaacgtgacaccatactgataatctaacataaaaagtcctaattaattgtaaatatatcaaaaaattaatgtcacacgcggcaagtcgaggagcttgcaaatacaaacaagccaagccatcgtttatttagtaataaattaaaattatactttttaaaaaaagaaatgaagaatttgtcttctcctacggctcttctcagaaattgcgatatactagttaaccacgacacgtgtgtactttgctgggccaaaatattcaggcaccaccacagatcaactgccatgtcatctcttctatcaactttgatgtcccaaagcattgaactctcatctctgattataacacttggctagttttcgatggctgattttgatactttttgattgccactttctgataagttcaataagactttagaaattgatctcttacgttaaattttagttggtacttctttttggtttaattttagttgatacttgatagatataatttcgaattatgtttttttttacaaatatcagatttaattattaaaaaaagaatattagggtttgaaaatatcttatctagatggcccaatttaatatttttgcttgtattaattagtcaaaagaaatttccgacaagcaaggtgaacgtaaaccttaaactaatcaggaaagcaagaattaaagttgcttttcacattaatactaatattgttaaattgttatcgctatcgtgaagaaaataaagtctagggaatctgcctcaaatatggtttccctgttggcaaaaatttaacttgcttccattcaaatgatgaaatgttacgaaaaattagccttttgtctttggagtaatgtttgttaaataatcacgaggcattcattcttaaaataccataacatttatagaggtttgaagtaccataatttgtaaaactaaactagagaaattttgcgaaatcagttgtatgaagactttcttaaaaataacgttatatagactctagaaaaaaactattatatgccatttctatttagtttttttttctaaaaatatatataaatatggtgttgttaacataaaaacagaaaaaaagaaaaatttagaaaattttctcaagaatcattatatctgtgatttatcatataagttcaaatatgatattagaaacaaatagtttacgagtataatagtattgtcaatttttcaatctgaagtaaatatctttttgtaaggaaggggtcaacaaatgatcacaacagagttggcaaaaagttatcaaatcgcatgcacggaagttttacgtgtggtgaaggtaaacttgtattacacttatctataaaaattagtttaggctttgattctaaatcaaatctccgattagaaaaaattgcgtaagcaaatagctggaaaaaattgtatcccatcatacttaagtcacaatgttttgtttttgagatttgtgatgtaatcaatatatgttttacaatgcaagtataataatattaaagtcacattctaagaaaattatgatttgtgtcatacgtatacaaaaacacccgtcacacatcctgacttctgaacgttaaatctgtcgcacacaatcataaaaatttaaaaattcaccagagatgtactgaaaagaatataattaatcacatgatgatatatgcataggagatgaggattattcattttctgaaattccctatatgaaccattataattgtttagtaatcagttcagaaatgctaatcattatatgaaccattataattcccttcatttttatttaagatccacttaacaggatttgttaatatgcacccacatcactaaatacattggtacgcaaccgttgttccatttccattttcacatcgaccagaatgtttactatgcggtaaattgtgtagtatgcagatttttttgtatcatttaattttctaacacttgttaagtcgaaactaattttgtcacaagtaaaagaaataaaaaaggtggaaattattaatcagtagttagatgattagtttcgagttgaaatgaaactcgacttaacaagtgatagcgacgactctagaaacagccaaaatccgccctattgctacctgtcgacccacaaatcgtttactcaaaaatgaataaaaaatttacgataaagcaaacccaaagttatatcttattatatgctaaggagccctcccaaaaaagaacaacaaatcacatttttatataactgttaacataataatctcagcctcatcaacacacatatatagatagccaacatcacacaaacatagagattccaaaaaataaaaataaagaaaacataaatcctctgaggaaaaattccgatgagatg

SEQ ID NO: 12748 - DNA, 3000 bp, Unknown
  misc_feature (1)..( 3000): cDNA_ID_2712448_gDNA_ID_2214569_Annot_ID_135027 3000 nt of promoter + ATG
gtagtgttacagtgtcagatagttagtccatatatataatacaaaaaatcacaatgaaaagtattaatgtataggcgtctgctgaaattatcatatgattccaacaatccaacaactccaaagaacgcaggtccatatgttcgactgcatgcttcttgcagaagcaaaaatataaaatattttcgttgttttaagtaaataagtgtactttttatttatatataacaatacaacatacacgcatgtatatatagaaaagggcttctaataattattaagtttaaatatagtaagtgatattgacatatattcgtatgattgtttaataatgttagcttcaaagttactcttggattcttaatttgtttcgtcactatatttaggtgttgtggcaacgaccttaaccgaaaccacaccaactagctagtgtctagagagacaagtgcctttttgaatgtttcgtttgatttaatccttaagatatgtatactgatcagttatattgctcatgctgtcagtatttattactaacttaagaaattaaaacaaaaccaaaatttggtaactataaacattgtcgtaatgttcttagtgaaaaattgtggtctcaaattttattgtatataatttattaatttatcaatcatgctttgattgaatagtttagatggtaaatattcagctgaatgacaaaaaaaaggttatatttctcaaagttggttcatgtttaggattaggcctagaagcgggttgatattgggcctatactgggctgaactgttttcctttgaaaattaaggataagatctacattgtgaacgacaagctgggctcgattgtttcgggctcataaggggatattattattatttaatcaatttctgcaaaatatttaccaacataacttaaaacaaattctaacaattaggatgacaacaaatctaccatttttttcgtggtttaccatttgtttaatttacgaagtagttgtgaaaataaacttgaaaggaaatattgtgtcgtataagttataactcatttttgaatggtgaatttgataaatatttttagacacatgtttattatattatcaaactgctgacaagaaatatattaatatgaatgagcattgaccattggacataaatccaaacgaagagttcttaaaacatacgctatgatatcagatgacggtaataacaaattaatacatacgctaaaatttacagaaaatacaagattttttcactttctctattttttaacgaaatatttgtcgacttctgaggtaatcgatgttagccttgagttttgtaatttgtataaaaaatgtactccaatcacaataattttggtgtataataaatccaattaaactaaacaaatgcatgttgttggacttactttaagtcggttcaatattttgtaaaataccatagaatattgaaggtggattctattccccatttacatttatttattttccttctattttcgacatactttaaaattatattattacccatttgttcggctttatggacaattattggtgtaaatgaccatatatttcctaatgtctgctgatacaaacaaacggtaacttctaaactttcaatttgtttaatttattacatcaaggtttatctttcaaaataaatttaaagaaaaactgcttcttacctatttgataagttgatagtaatgtttgtgttaaatctcctcatagacgtcgctttacctattaattaccactataatttaatttcataattggatttagtgtcaccctaattttagtacgagagatctctaaagaaaaaagtgaaaacacaatcacagaaaattattacaatttttaacaagattctagtataaaacatattgatttcaacgtaaagaaaatttaatcacaaagaaaaaaaacaataactttgtaatattgtatctccgtgtgattgctttacacatggatttatttaattaattaacagataaaacatattaattccaacttcttctttctttcttttttggacaaaaatttcaactttttttataatataacttttgtgtcgaaaatatatacttttcctgaaaaagagtgataactaattaaaaaaaaaatgtttagaagtacaaaagaaaagtattgtttccaaattcgagaaaaagctgtaatcacgcccttgtgtttaattctcaataaatcacatttaaaagcgatttttttaacggcccagatattgtcacgtaggataacgtactccgtatattctccatttccgaaccatccgaccaggtcgcatcatatgttgtgaaaaaatcgttatggaagaaactctgttttagttagatccaataatattaagccacgtggaattgatgaatccaatcttctttataaactccgttttcggaattttgattttgtttaaaatgtcttacaaatttatataaggaaacggcaaaagagcccaaaaagtaacaaaagacaaaacaattaaaggaaaaaagaaagagtcaaaagaactcgaactatcatataataagaaaagaaaaagacataggacaaaataaaatatattcatattcacaaaacacaaaacaaaattgttaatcaaatagtataagactaaaaatgcctgattaggggaaggtagttgttgttgaatagtgactagaacgagttaaatggtttgagatctccaagtttacatttcaacatctcagattttaatccaacggttctcaatccttctactacgtaaaaacaccaccgtccccgttccgttccgttctgttctctctgtcacttttgtctcttctaagtttttaacacttaccttgtcgtctctgttcttcttcttctctcattcctttcgtttatcgttttcttcttccaattttggatctctcttccttttgatctgattcgttacttgctctatgttgcttcaattttgaattcttttgatttttgattgtgtgggggagatg

SEQ ID NO: 12749 - DNA, 3000 bp, Unknown
  misc_feature (1)..( 3000): cDNA_ID_2709550_gDNA_ID_2214569_Annot_ID_135028 3000 nt of promoter + ATG
ttaaatgtgacaattaacaggtaacaacacgctggaaaaccagcagagatattaaatccggttaaggcttaatatttactgcttacatttccagtgacaatatagagaatctaacattaaattatatgaacatgagattaataaactcactatagtaaaataagcaggagacatcacgtgaagcgtcggattgtttgtcataatgtcttcatcgtacggcaacgcgatgaattgaaacagaagacatcacgtgaaccagtgctacatggttaactcaatcattaacggcgtatattttcttgtattgattcttctccggatcgttaactatgctcccgatttaacaccgtcagttcagtatttatacggcgcaataaattacgataatgtagcctcttgagagaatgttttgcgggttggactttggagaagaaaacaatcatataacctatctatataaaatcgagtagaacgagaaataaaattattgtaaagcgagagtgcattaggattatgtggtctaattatgaaagaaaaaagattatgccaataatgatgatatcgaataaacaccagcacgatggttttctaataatccacaactaaacaaacgtaaggcctttatttatctatttttatgttaatcttgaactatcgaagcacgacttgagctatctatgagttattacaaaaatatgatgtcgtcagtttgtcaccgagggcttattaattagataaattacaaaccaatttttgtccttcatataatttcatttaacggatcatgaaaattaagaatcaatacgatacaaaatgcataattgtgtatttgacgtgataaaagaacaacgaaccaatgcacatgtaaccatgtgataacgtatcccccgaaaacaaaaaaaaatagccaagacactacagcgaagtcgtcttttgtgatgtcgattctatatcgtcgcccccacttacaacgacgtcgtataggtttaatcatcaatcatggtttcatttataaacaatccaacaaaaaaaactttgtatacgttctaattgataaaacaaaattaaaaaagagagggatggatcctaacactgagttacagagacattagagacaaatttgcttgtgacttaactaggtcaatataaaacaaaatcaaagaaagttccaaaaaacgacactgactcgtatgtcccccattcttacttgtcacccatctaatctaaccatctcctaggcagcttcacgagccgtagtctaatctaaaatcttatcattagacatttctatatatattttaatttctttacctttttacaccactgtagaaaaccacgaattttactccataagttgatatcattttcatttacgtctccgtcactctttctccctatccactaaacacagatcccaaaaaagaaataaacgagtaaaaaatgtaaagaaacgtccctttgtttctacgcgattttctgtaaattttccttcgttttctcgcagtttctttctcaccaaacaaacccttatatcactctatctctttctttctctcacattcaaagcttcttcttcttaactctacccctaacgtcctctcatcttctctggcagaacagaaaacgatgactaacttctcccgatccaaatccaccggaactatcgggttcccggagtttaaacccactcgacccggtccagacaaatacgagaacatccacaacgatgacgacgagtacgaagaaggacatagcactacgagtacagactactacgacgcttcaacgccgttgagctcacacgcgtcaagatccgggaacgggtccggctcgggtcagttaacggtcgtagaccttcttgcggcggttctgaggaagtcgttggtgatgtcgtgtgcgatggagagaggggaagatgacgtggtggcgtctatggatataggttggccgacggaggttaagcacgtgagtcacgtgacttttgatcggttcaatggttttcttggtcttccttctgagctcgaaccggaggttcctcctcgagctcctagcgccaggtccgttattaattaattattatcccaaagatgagtaatattccaaacaaaaaatgaatttaatattttattccatatatattgaaaaaagattatgatatgaggaattaaataaatattttcctagctggaaatctgtatatggcatgttactgtgttgggtagaatcattaagatggttgttgtttggatttaaatgcatgattacgacactcgtttcttcacaaaagaagattctctttttgtttttttttctctcttcaaagattttcaatggtatgtaaagtcaataaccatttattcaaacaatgaaactatttagacataaatttggtctttaatcaactcatgaagtagtggttgaatgacacatcctggaattggggattagtgtttaagctttcacaacataatgatattatttttgggctttccctagagattggtttgtatgatgatacatggagctctaataagtttggtttgtatagaagatacaaacttttgggtcctatggagatatactaacagaaacacgattacacaacaaatttctcataaaaaaaaaagtaaacaatttgtaaaatcgaatttttcccctaatatgtacggctaaaagaatggaaatcatgaatttttcaaaaagatataattggtcttcttgaattgtgaaacttatggctttccgtacgtagatggatttgtgaagtaaaagagtgactgattatttttgatgatacttgtgagtttcactaagttggtgactttgtatatgatataatgattggttctttctaacgattgagcttatatgttttctctagatttatttctataagagtaaaatataggtttttatatgatctaacatattggtttttctatgagtaaagatttcttattttaattcagtgtaagtgtatttggagtatcggcgaagtca

SEQ ID NO: 12750 - DNA, 3000 bp, Unknown
  misc_feature (1)..( 3000): cDNA_ID_3026283_gDNA_ID_2214569_Annot_ID_186121 3000 nt of promoter + ATG
aacaatcatacgaatatatgtcaatatcacttactatatttaaacttaataattattagaagcccttttctatatatacatgcgtgtatgttgtattgttatatataaataaaaagtacacttatttacttaaaacaacgaaaatattttatatttttgcttctgcaagaagcatgcagtcgaacatatggacctgcgttctttggagttgttggattgttggaatcatatgataatttcagcagacgcctatacattaatacttttcattgtgattttttgtattatatatatggactaactatctgacactgtaacactacgtgtaataactataatttttttagtttataaacaaatggggtctaataacttgaaatgtactcttcaatgtgtgaatccagccaaatttggtcattataaactattttttgttatattatctagtgtttcatttattggcatcccaactagaaaaatgatatatatgaacaaacaaaatataaacaatattttacttgttacgttttggccttacactttttaaaattgaaatgactaaacccatttgcattgcatcagcattagtggtttatttattgttaagtatcaaagccatctctgctcatagattccgcgcatgcgtttgtacctccactaaccatctcaatatttatttcctttggtatttgatctctattataccaacttatttttttacatatataaaagagatattaccaaatatgttgaatctaaaaatattaaccactaaacttagatataccttaacttcgtgaatatacatatacttgtataagtattattaataaaacataaaacaaaatgactatacatgaacgaacacatcttttatcgtatatcatttcatatgttttccaataatagatgttttggaaaatttaaatttttatacaaatacaaaaaaaatatgcaaattttatataacactttcaatgttattctattagttagagatttagagttgaaatacttaatttaaataactaacaactaataattaactataaaacaaagtgtattgcattgcaatttgtaaaaatgttcttcgtatttatataatgtctaaaacatacaactttataaaacgagtgagtattgcagatatcttactgcaataatgccgacaaaaaatataaaagtaaaaatcttactgcattaggtatgctttcgaaagttaaaagttttcaagtggcaaacatttgtccgcctagacaggaataaaacaaaaaaaatattcataaaaccaaaactgttgcttttactaaagaagactttatgctacatttttaacaaaaaaaaacaaaaaaactttatgctaaattttatattttaaatgtgacaattaacaggtaacaacacgctggaaaaccagcagagatattaaatccggttaaggcttaatatttactgcttacatttccagtgacaatatagagaatctaacattaaattatatgaacatgagattaataaactcactatagtaaaataagcaggagacatcacgtgaagcgtcggattgtttgtcataatgtcttcatcgtacggcaacgcgatgaattgaaacagaagacatcacgtgaaccagtgctacatggttaactcaatcattaacggcgtatattttcttgtattgattcttctccggatcgttaactatgctcccgatttaacaccgtcagttcagtatttatacggcgcaataaattacgataatgtagcctcttgagagaatgttttgcgggttggactttggagaagaaaacaatcatataacctatctatataaaatcgagtagaacgagaaataaaattattgtaaagcgagagtgcattaggattatgtggtctaattatgaaagaaaaaagattatgccaataatgatgatatcgaataaacaccagcacgatggttttctaataatccacaactaaacaaacgtaaggcctttatttatctatttttatgttaatcttgaactatcgaagcacgacttgagctatctatgagttattacaaaaatatgatgtcgtcagtttgtcaccgagggcttattaattagataaattacaaaccaatttttgtccttcatataatttcatttaacggatcatgaaaattaagaatcaatacgatacaaaatgcataattgtgtatttgacgtgataaaagaacaacgaaccaatgcacatgtaaccatgtgataacgtatcccccgaaaacaaaaaaaaatagccaagacactacagcgaagtcgtcttttgtgatgtcgattctatatcgtcgcccccacttacaacgacgtcgtataggtttaatcatcaatcatggtttcatttataaacaatccaacaaaaaaaactttgtatacgttctaattgataaaacaaaattaaaaaagagagggatggatcctaacactgagttacagagacattagagacaaatttgcttgtgacttaactaggtcaatataaaacaaaatcaaagaaagttccaaaaaacgacactgactcgtatgtcccccattcttacttgtcacccatctaatctaaccatctcctaggcagcttcacgagccgtagtctaatctaaaatcttatcattagacatttctatatatattttaatttctttacctttttacaccactgtagaaaaccacgaattttactccataagttgatatcattttcatttacgtctccgtcactctttctccctatccactaaacacagatcccaaaaaagaaataaacgagtaaaaaatgtaaagaaacgtccctttgtttctacgcgattttctgtaaattttccttcgttttctcgcagtttctttctcaccaaacaaacccttatatcactctatctctttctttctctcacattcaaagcttcttcttcttaactctacccctaacgtcctctcatcttctctggcagaacagaaaacg

SEQ ID NO: 12751 - DNA, 3000 bp, Unknown; identical to SEQ ID NO: 12747
  misc_feature (1)..( 3000): cDNA_ID_1808306_gDNA_ID_2214569_Annot_ID_186116 3000 nt of promoter + ATG

SEQ ID NO: 12752 - DNA, 3000 bp, Unknown; identical to SEQ ID NO: 12746
  misc_feature (1)..( 3000): cDNA_ID_2702627_gDNA_ID_2214569_Annot_ID_186112 3000 nt of promoter + ATG

SEQ ID NO: 12753 - DNA, 3000 bp, Unknown; identical to SEQ ID NO: 12745
  misc_feature (1)..( 3000): cDNA_ID_1015524_gDNA_ID_2214569_Annot_ID_186111 3000 nt of promoter + ATG

SEQ ID NO: 12754 - DNA, 3000 bp, Unknown; identical to SEQ ID NO: 12744
  misc_feature (1)..( 3000): cDNA_ID_2702631_gDNA_ID_2214569_Annot_ID_186110 3000 nt of promoter + ATG

SEQ ID NO: 12755 - DNA, 3000 bp, Unknown
  misc_feature (1)..( 3000): cDNA_ID_2712517_gDNA_ID_2214570_Annot_ID_135031 3000 nt of promoter + ATG
ctctcctcgagattttgcgattgaggaagtccaataggcacggaaattttctcattatcttctcgtcttccatcatcaaaattcagagagtagctcaaataatcatatcggaacatgcttttgtcatatgtcgaacgttgtcttcttacatttttcagctttccacacaaatttcccattatatttttcttggagatcttgcttagcctttcaacaaatgttgcagttcgttagaacaatggattttttcttgacgtaatgtgctgaaattacgttagagcctacacgatagaaaaaaatgttagaattgttaaatgatgtgtttgagatctcggcttttatgaccaattaactctaagaatgatacaactacttgtagtttggagagaagcatcaacgagcaaaccttaaatattctgagaagttaaacaatggtcggtttattttttatctatattgtgataactttaaataatgggagataacgatctagttatggattttgcatgagctcattaataaaaattgcatgcattggatcatgacacaattacacagtgtaatgataactaattatgatcttatatgtaatgagtttgtaaaacaaaatagtaatttataagaccaaaaataaagttacaagtttaatccaaaaaacttctgtacacaaacaaaagtaaaacaaagttaaatcttaaataatttatattattagaaaaatatctaattaatatcaaatttaccacacacaaaaaaaactatgtaagattatttcttaataaatttgtaatataacaaaaataacaaaaacaattttgaaaatgagaaagtatttataataaaactaagaagtttggaataatgacaacaaagcttgagcgtaaatggaaatcttatgtaaatataacattcaagagtgatatactatgtgataagaatttataagattttgacatgtattaactaatttattatattttgacatatgtctacataataaaatttgaaaagatagaaaaaactattcaatgtaaataaatgtaagatatctttgaaaagaaaagataaactaaattttatagtagtactttgggcctttggggaatttaaatggaaagcaagatctacggtgtgatactttttattgtaaatattatagatatggcaaatgataaagttagaatcgagattttggaatcaaggcttggagatttaaagagctagccgcagttgggttattacttacatagtgaaatggtttcctaaacgaagatggctacaaatctttacatatctcaataataaatatagaatatcttcacattgattggtgcatcttcttgatcattctattatttctatatcacattcgtctgtctccacatcatcacttctcgtttcgtcttattgttgttatctttcgtgaatagagaagaaactcaagaatcaagatgaggtacttgaaaaattcttcctttactcttctaccaattttcatatagatctctctattgatatagtcttattgctcaatgtatctaacaattgagaaatgggtttgttcgttttatagtaagcttaatagtgatactcttagagaagccattgcaaatatcactcgcccatcggaggagaggaaactcaaaatgaggtacttgaaaggtctttcattaagatatctcttattgctattgttctagtttttgattcctatgctaagattgtcgtacatagatgtatcatatattgtccaatggattattgctagatctaatttacttagtgaaatgggtttgttggttatatagacaacttgagagtgagtctcttagagaagccattgcaactattgagggaaaatctgaggagaagaaacgtaacgttgggaagacagtgaagcttcaaagtgaggctcttagagaagccattgcaagtatcaatgaaaaatctaaagagaagaagccagaataatttgtgtgtccattacgttggaatgattcttaaatgttgtttctttggtttatacgtacgggagcttgaaactaatgggtctttttcatctctttaattagtcctatattattgaataactttatcatatacttctctgcaatcacagttttcaaagcgcttatgtggtgatttttctatccaactagggtattgtctttcgaaagttatatagaattgatcaaatcaaatctcatctatgtaaatacgtcaagtcaagagtttcaatatgagctaagttcatgtctttgttggattaaaactaatgcgaaatggcctataatttggattttaacaaacacaactgtgtttactttgcttaagattagtccaatccgaacacacactaattcccaaaaaaaaaaaaaaaaaaaaaaaaaaaaaaaaaactcttaacatacttaaataaaccttttcaaaataccacaatgtagaagatgggcttttttagtaatgatcacaagcggcccactaatataacaaaagcccatgaaacgaaatcaattcccctagggttttagtctcttccttccatttttcttcttccttgatataaaatcttcagccgcctctgaaacataactagggcttccgctttcttcaccattcaggtttgtctctctccacaaacatcgtcacttctcatttcgtcttcttcgttcatcgtaattccatgaagtttttcgatttctcctgcttaatctgaattctatgtcacaatcgaaaatgaggtttttttttttctttttctaatcgatctcttattgttttcaggatcagagattcgtgacctgagaagacactcaatatgaggtactgtgaaaaaaatcattcctttacgcttctttcaatctccatattgatctatgttcacttgctttagaattagtgttgcctttagattgatagcttggagagtaattgctcaacagaatcatatcatttcaaatgaatggtaaagtagattgctttacctgatttggtgaaatg

SEQ ID NO: 12756 - DNA, 3000 bp, Unknown
  misc_feature (1)..( 3000): cDNA_ID_2712511_gDNA_ID_2214570_Annot_ID_135033 3000 nt of promoter + ATG
gtaaaaataattgtaatgtactaatgtttcatttagcaaagtatctaacgtaataatataacaaaaagagtctaatccctttttcttgtgctgaatatacataaataaaaaatacagatttataattttaaatcgataaatattttttaacaaagaatttgtaaacttatcgcgatatcatagtttttagcacgttaaacaaatagttatatacttatcatcaatatattacaattatttttatttaatggcatttttgtaattattttttttttaaaagatatttttggtttatatattatttcttcttcatacttacctaaataactaatatttatgcatagattcttaatttcttcatcttctatgcatagatattaatataaccctaaaacaaaagaagaaaatgtgatctactatagaaactttcactaattttcaaccgagtaaatcaacatttaagtaaacataatcttatcgtcaattggctgtattcaaagtccattgaattccatgaattaactatttccaaaattgcatttaattatacttttgtacgtggaaaaactaaatgataatctctgttttttatggacggtctctagaccaatcaagtcggtgcgaaaacatgtcagaaatgcctaaatgcgttatgtctatatgtatgtgtaaatgcatttagtttcaaaacatttttctggtatacactgaaatttctaagttcaacaaagtttgcaataaactatagctgtcttaatatataagtcacgaataacggctctaattaaacgatgtaactgacgagctttaatttcgattgtttttttacttttcagtttcaaggaacaaatgaaaggttggtttcctctacctgagaagaaaagttctatcacaggacttgcgaataagaccgtatatatgattgacatgttgtgcttttaatattaatgttagtgtcacagattgttgtgggagcatatgctaaagtataaaaaaataataattaaaaatattatcacgatcacatgcaaagtacacttgaaacgtgtaatctgaagacagttaggttggaatcagggtttctataagaggaaacccagatcttgtttttctacctcatagtttttttttatggaaaaggaaagaaattacatataaataattcaaaagtggcagaggaaatgaatctctttgtcaagttgatgtgacctttcacaatttgtcaaactgtcagcttttgaatgtgttggaaacgcattggggttgtgggtcgccaacattaacatttccaaaaatggtaagtccaagaataatattagttgttttgggatatattctttgcaatacatccacacacctaacagagaatatatttcttttcctcatactccaatattattactttttaagaaaataattaagtttcatattacccttattgcaaaagcgacgtttagaattttaaacagaataatgacacttgaaatttgtatctttctttctttaacattaaaaaacaagggggcgataaaagcaaccaaagctgtgattcatggtcgacactaacacatggaataaaaaaaggttatctcttttttccaacatttctctggtgactaagttaattgaataaattgtatgcatatatttatatgttctatatatatactgtccaaaaaggaattgaggaatttttaacttttaaggaccatattggaaaatctgccacttctcatccactcataggttcgaaattggtttattataattttaacgcacaaattcccttgttagtgctaaagaaggatacctacaaaaattcatatcgaattctagacgaagagacctatattgtagagctgaaaactgatgttttacaaaaactgatattttttcgggaatgatttggtttaagcaagaaatatcttagtttgcattattcctaagctggtactagaaaacaactatcgataaaacgaggttgtcttccctttggccacctattgacataagaaaacaagacacctatcttttttctctagcaaagatactcctagagtcctagtcctacgacgaatggcgatgctttcttaaataaatataaaatattagttctctacttctcctaacgtactagaagtagaaattctgctgaaaaaagaaaaagaaaaagctaaattcccgacgccaccatttataatgcgttcattctgtttaaataatggctagagaagaacatggccgtaaatccgtaataacacttccaggttctttcattctaacataaatttatgtataaaataaagtttttaatctatccacctgactaattaaatttttattttcataaaggaaagagttttcctataaaacaactataaaaaaaataatagtatcagatttgaaatgacgacttcagtgacgataattttactgaattaccatcacgcccattattatgttttattttataaagcaatcttttattgtgtcctaacaaaaaagctaacttctaaattcttactagggttcaaagacatatttttttatcgaatcatgtcgtatgtatacaaaaataatttattttggccaatacaacagatagttgattagtgttcagaaatacccaactctccaaaaaaaactactctcatttttttgtgtaaggtatgatcctagattaaagaaacgtctttttttttattctctctgaagcatcttattgacaagaaaataaataaattccttggatctaaacgtcaaatcaaatgcattacagccatttcttctcttaaaccctataaatatacatgttcttctcactttatgcttcatcaaatcaacacaaacatatcccccaaagcagaactaaagcaagcccaagcttgtctctccccattccaacacacacattttcatatcaaactcaaaacactatttccttaatttctttcacttattcttcatttcttcgtctaaattcttaaccaagcaatcgag

SEQ ID NO: 12757 - DNA, 3000 bp, Unknown
  misc_feature (1)..( 3000): cDNA_ID_2709566_gDNA_ID_2214570_Annot_ID_135035 3000 nt of promoter + ATG
gacggaaatttcagctacaactaaaagacatggagtttagttcggataagctatgcacctgcatctgcactagaagctctgttttgatacgtcttgaagcttcactctcgtttccttctccacgtgtaccacacaaagaatctatctcatcaacaaaaataatcgagggagcactttcacgggccatctcgaaaaggtttgatactagcttctcactttcacccatccacttcgagacaaggtctgatgaagacacgctgaaggttgggaagtaaaaaggaaacaacttttcttaagctataacatgtttccaagtataaacactgtaaaaacaaactgacatagaaaaacaaccaacataaagtacatagccatacctaattaaaaacccaagtacctcgtgcaaacaacattgaaattagaaattctggcacccttaaaccaaaggatcagcattcttgcctaattaaatcgatccgccttggttctctaatatgctatttagattctaccaggcctttaaaatcgggttgcagctgcttatgtataacatgtacagatagcagagactcatacatctattctagcatagagcagaatttgcatataaactataaaggaacatcaaacctttccttaatatttctatccgaacttgtagtacaccgttagaattcaaacacaaacaaaaccaaagaccaccctccttaaactaatcccaaactacttcaatacgcttatcatccatagcaactattcaaatccataagtatttgactatggtctcaagctataatgaaagagttaagacactacaccatcctcttcctatatactttcagaaattcaaacacttttaaacatacgttacctaaaaaaggtagagtcagcttcagtggcaacagccttagccaaatacgattttcctgttccaggaggcccatacaacagaaaagctctccaaggccgtctctttcctaagaagtaacaaaacaacagataaagctcacaactttacaaagagaacggtttcaaaacttcaatgaatagctccagattacacaaatttaccagtgaagaactgtggaaacttgacaggcaaaatcacagcttcctgcagagcttgtttagcactttcaagcccagcaacatctgaccacttgatattaggtttctctctaacaatcgcagagtttaacccagctcgaagctttgattgttcaggatcttctccatctttaccaccaccttctccatctttaggcttagttttgggcctcgttgcgacggctgcatcaccgttagatcctggacccgatccaccttcatcgagaacagcacggatctcctcagcacgacggagatactcggtgaatttctgggtaatagcttctctgatcttagggttcttctcatacttgagatgagttttgaagtactcaagcgcgttcatgtatagagggaaagctttattgtaattcccagcattgtcttcatgaaccgcttgcttcacgtactcgatcgcttgttccttgaaattgctgtacataatttagggttttacaagagaaattgaaattctctcgatttgaaattgtgattccgaattgattgaatcggtgatgatcaagggttaaaggagccttgaaattgtgataggaagattccgaattggagacgaagatcggaggaaggagatggagaagagagaagaaggaatggattatgcaaagcgatgaagaaaaaagctagatttgacgacgaagacgaaaaggtcttgaaaacagcggagcgtaggttggtagaagaatgaaacggtgaggcgtttttggaagttgtgaagaattggctcaatgttttgatgaatgataacgaaaacgcttgccgttttttaatatatgcttattttttccaataattttgtattaaatggtttgaaaaagaaaacaaattgtattaaaaagcagaagaaaaacaaaaaaatccacgtagagagatacatcaaaatcccaccattcaaatatattaagtacaaggtccttctaataggaggcaaatttgaaaaaaaattcaaatagtgacaatataaagcatgaccatgataagttttcttgttatcaaccttaagaaaacaaactagaaatattatttcaaaaacaaaccttaacatcaacacaaattagtaaatctactttgaatgcaattgtagcaaaaaatagtgaccaaaattaaacttgcaacaaagaacatttaagttgcagaaaggacattccttttattcattcaaaacatttggagtcacttgtgcacattgcaaacgcaaagaccggagtttcagcagcgaatcgtaattgtcaaccaaagcgaacaggttctattgatacccaactagcaagattattgattatgtctcaatgataaaacgaacgaatgaatttttcactagttgacaatgcattaaagaaaaaaggaaattttcaagttcaaagaatatgttcattagtgtggaagcgattaggcaatacaaaaatggtaatatattattgtcttaaacacaagataatcaatagttattggcaagaaacacatatcttcaagtaagaaatacattatccatcataaacttataataagaggagatcattgcaagatctattgagattttcaaagtactatttgttacctatgcgtctagtcatctccaacgaaacaccaaaacactattttaggtgataattaaccaagtttttctaaaccatagtaaaaaaaaaaaaaaaaaaaaccccacatgataaataccatccgaaccactaaaaaccggtatttgacccaaaaaaaacactaaaccgagagcaatagggcctacgtggcatagtttagggcactcttcagtctaaagacacactaaacacaaagtcaacgcttttctcttcttcctcgactgctctgctctgctctattctctggattgagaatttggactgagaacgacgacaaatg

SEQ ID NO: 12758 - DNA, 3000 bp, Unknown
  misc_feature (1)..( 3000): cDNA_ID_2709559_gDNA_ID_2214570_Annot_ID_135036 3000 nt of promoter + ATG
tacctcacccagccaaccaaaattaccaaaagcctacacttatcaagttatctaaaatgctaagcaaacccctaagtaccaaatatgcttcgtttttttgtaactgtaatattttcttaaggcttgtgggagattgtgggtaatgactgtcccactttgaagaaagaatggatgtggaagtagactacaggacacttacagtctccagctatatgaaaaagcatggcgaatctttctgttctgcttctgaaggtgatagtgcagactgatccttgtcttgcggcttaaaatatcaaactcagcctgctcccatgtatactgccaaatgaatatggacaatcgttagtacggttatctctagtaagttcgatatttatggctctgacacccttttttaccgaatgaagtacaagaatgaactattaccgtgaaattagggaatttccgttgaagcttcaactgtccctcagcagaagcacctccatataaatccatcacgaagataccacctttcttagacaaagcgtcacgtgcattcttgaagtaagaaaccaactccgagcgtttgtggagacaacaacaactaaaattaaaagcacacacaatatccctctttggcaacgaatcaggtccatctttctctaaagattcgacaacactcggatcagccaaatcttcattatcatcaccatcatccaagctgatattttgtatcagctcatgggatttagatttcacttgcttagcctcaagaggagttaaaacattcccatggaaaagcgacattcttgaatacacgtcagaaccaagtttactaatgttgttatccatacaccattctaacgcctcaagatcaaaatcaagccctatagcagtccgtctagtgtcagtcttcagccactccgcactattccaacaatcaatgtaaaaacttattcaagcaagaaaaccaaaagctacattattttgtaccatttagtgaaacacacaacaaccttaaaagagcagtgccgcagaaatcttcttggaaatggaaaggttgtcttccaccaacatacattaaaaagaacttctgcaagtaacttatgtctccttttggtgactgcaacaaacaaaaagcaatgaaaagacaagaacaacaaatgttaaagcttagtgcttgatgatagaacaagaacagtgaaacacaaacaatacaatttgttaaatcttagtgcttctttatacaagagatacagagaactctctccctaagaaaatttaagtacttttaactgatttcataaaaccagtaagaaccactcaatgaaacttagaaggccaagcacagaattgcagttacctgaacggattgttggtaaaggagaaactttgaaggcaaatccgatgattcgtttccatcattttcttcttcttcttcgtcagagttttcttcatcttcttcgtcgacggaggcaacagccggcgggtgttgatcgtagaaatcttcagcatcattcgaatattcacctttgtggcgacgtcgattaggttttttctctcgtttccccatttgtcgtcgttctcagtccaaattctcaatccagagaatagagcagagcagagcagtcgaggaagaagagaaaagcgttgactttgtgtttagtgtgtctttagactgaagagtgccctaaactatgccacgtaggccctattgctctcggtttagtgttttttttgggtcaaataccggtttttagtggttcggatggtatttatcatgtggggttttttttttttttttttttactatggtttagaaaaacttggttaattatcacctaaaatagtgttttggtgtttcgttggagatgactagacgcataggtaacaaatagtactttgaaaatctcaatagatcttgcaatgatctcctcttattataagtttatgatggataatgtatttcttacttgaagatatgtgtttcttgccaataactattgattatcttgtgtttaagacaataatatattaccatttttgtattgcctaatcgcttccacactaatgaacatattctttgaacttgaaaatttccttttttctttaatgcattgtcaactagtgaaaaattcattcgttcgttttatcattgagacataatcaataatcttgctagttgggtatcaatagaacctgttcgctttggttgacaattacgattcgctgctgaaactccggtctttgcgtttgcaatgtgcacaagtgactccaaatgttttgaatgaataaaaggaatgtcctttctgcaacttaaatgttctttgttgcaagtttaattttggtcactattttttgctacaattgcattcaaagtagatttactaatttgtgttgatgttaaggtttgtttttgaaataatatttctagtttgttttcttaaggttgataacaagaaaacttatcatggtcatgctttatattgtcactatttgaattttttttcaaatttgcctcctattagaaggaccttgtacttaatatatttgaatggtgggattttgatgtatctctctacgtggatttttttgtttttcttctgctttttaatacaatttgttttctttttcaaaccatttaatacaaaattattggaaaaaataagcatatattaaaaaacggcaagcgttttcgttatcattcatcaaaacattgagccaattcttcacaacttccaaaaacgcctcaccgtttcattcttctaccaacctacgctccgctgttttcaagaccttttcgtcttcgtcgtcaaatctagcttttttcttcatcgctttgcataatccattccttcttctctcttctccatctccttcctccgatcttcgtctccaattcggaatcttcctatcacaatttcaaggctcctttaacccttgatcatcaccgattcaatcaattcggaatcacaatttcaaatcgagagaatttcaatttctcttgtaaaaccctaaatt

SEQ ID NO: 12759 - DNA, 3000 bp, Unknown
  misc_feature (1)..( 3000): cDNA_ID_2712485_gDNA_ID_2214570_Annot_ID_135043 3000 nt of promoter + ATG
ccgtagaactatctccacctctgtgaattgttcggtggagattacggaggctgatcggtcggtgaaactgaagaacgggaacgattcactggagatatgcagagttctcaacgggatgtggcaaacgagcggaggatgggggaagattgatcgaaacgacgccgttgattcaatgcttcgttacgccgatgctggtctctctactttcgatatggctgatcactgtaagtagctaacaagtgaaattgaatattcagaattgacttgaaattgaaaggttttgtgtggagattagtaatagaactgtgcttagttttgatcttgatgaccttcaatgtgtggagctatgttttggtcacagaagaattgaattgtgtggagattagtgaaatagagttgtgcttagtttgttttctatgatgttcagatggtcctgctgaagatctttacggtatttttatcaatagagttcgtcgagagcgtccaccggagtacttggagaagattaaagggtaagcaaatttagtccaattgattagaatttgtataagatatggtagggtggcttaatggttaggctatatttaatgatgtagtttgacaaaatgggtgcctcctccaataaagatgacaagtagctatgttcgtcagaacatcgatatatcgaggaagagaatggatgtggctgctcttgatatgcttcagtttcactggtgtgtgttactctcgtcgcttaattgctagtcgttgacgtttcctatcttcttgctaaagtaaacctgtgatgtgggaataggtgggattatgcgaatgacggctatcttgatgcactgaaacatctcacagacttgaaggaagaaggtaagcgagaggggctatatctttctcctttgttgtgattgtctatttgtttatctattgggctgctttaagtgtagtattgaaatgctttcagggaaaatcaagactgttgctttgactaattttgatacagagagacttcagaaaatcttagagaatggaatccctgtcgttagcaatcaggtgaatgtcagcccgatgtccgaacattatatatggcctttattcggactcttttttttttttttgtaaatctctaactctctgtgcaaactctttccaggtgcaacactccatcgtagacatgcgtcctcaacagagaatggctcagctttgcgagcttacaggggtcaaacttataacgtaattatactttatgaaattcttttttgatttctctctttaaaactgatttaacaacacatcgttggtctttgtgtgtagatatgggacagttatgggtggtctcttgtcagagaagtttcttgataccaatctaacaatcccttttgctggccctcgcttgaatactccatctctccaaaaatacaaaagggtaagagtccaatggccgttcttgttttatgagtttaggatggctgatgcatgatcatcctactttgtactgttttaagatttttgagagttacattacagatggttgatgcatggggagggtggaatctatttcaaggtttacttcgaacaatgaagaccatatccacaaaacatggagtctctataccaacagtggctgtgagatatgtactagatcaggtatttgttcttcctcacattactctttactcttaaggccaatctggtttttgatttgtcggaaaaatgaaaatatcatctcagcaaggagttggtggatcaatgattggagtgagactcgggttagcggaacacatacaagacgcaaatgctatattctcattggtattggatgaagaagatgttaatagcatacaagaggttaccaagaaaggtaaagatcttctccaagtgattggtgactgcggagacgaataccgacgtatatgatgtgtagctatgtactctatactgtatacaatatcatcaactcatgtaattacacttttatgtgtagaggaatcatttttacatttataagacttctctggctttatttcttttgcttctatgcatgtttggagagacaatactaatataaaccacaaagctacatgtaagctatagagtaaacatgtttaaggtaagtaaacatagttttatcataaaaaaaacttagcaattctttgattcaaaggaaaacttggcaaataccacttcttattgaaaaactagtttactaattattcagaggacatgaccaagataactatgaaaacaaaatttatgaaaagaaaggtttgacgggcacctagctcccagcacatcttcttttggaggtttcaccaccagactacttcacagctggctttgagtcaaacttggaacatactcaaacaaatttggcatagatgatgtgaatccagaatacacctgttcaactttattatcctctccaacaatgtatacctcttgtttgaggggaatagtgatagaccaacaggtttcctcgatgtcgagataatcttacatggcctatgtaaagcaggagcggatccatgttgatgattatgtggacaagagcactataacttatacatatttgattttatacagaagaaagtataatataaagtggaacattggtttaaaatacacgcaatattacaattttagtgtgattctaggcttttttcatcagatcaagattttataattcaacacaaaactcatgattctataattttcaatttatgcttttaatcacgagtatattaatattggcaccaaatttctatattttctcttctcatgtaggtctcgcatgtacgtacgccaagaaagaactcacgagaatggagctgcctacttcatttttttttccttacgtaaaacttaacgtgcaccattctctcaacatgcaaacattgtatttaatatcactcccacatgttaaatacaagctttagttagtcatttacgtactcttgctctcattatgtaagtatagtttatggactaaaaaactttcgaatagaaatg

SEQ ID NO: 12760 - DNA, 3000 bp, Unknown
  misc_feature (1)..( 3000): cDNA_ID_1010079_gDNA_ID_2214570_Annot_ID_135044 3000 nt of promoter + ATG
tttcgtacatacgaaataagactttgtcaattatgattatagatgtcttgcattattttgttgggtaattcagatacatgactataatattgtgatagttgattaagtaaatgtataaattttaaaagaaaaaatcaacattaaaatgaggtgatgatttttaaaaacaacattaaattgaggtgatgatttttaaataacatgttatgttttctaaaacatgttatgatgagtaaaataaggtgctactttccaaaaagacatattattttagaaaatagtactagtactcattgttattgtactagaagtctaaaatcatttacctaatctaatagtactactaaatatttgtggtaatttaatacacattcatttttgaaatgtatccttatttttttattgggacatgccaaaacgttttactatttagtcgattatcaagattatgaatatatttttttaaaataacatatcaaatacagtatacctttaaactactattaccagattttgtatttgaattagaatcaattttgttgttttggtaaattgctggttgaatatgctgtaaatattataacatttaagtgaccaacaaaatagaaaaatagtagtaacatttaatttgtaagattttacttcaaatgccattaatatacttcctatcttccattttctaagttatgttttgctaaaaacgcatatttaagaatttttgtttcaaaatgataatttaatattttaatttaatcaactcaacaaatcatagaatactgcatatacaaatgatcaaaaaaattaaatacataaatgttttgcaaaacatctgatatgagtgacataaaaagtattgactttatttatgttattagaaataacctactaagtaacatgataaaaataccccaaaaacattcttttgtggacgcggcgtaacaaaaatttattttgagggatctgtaatgaaattttatcaaatataaacataaaattaaaatatacttttgagggatcggcaaagaattataagaaaatatgaactgaataaaattataagatagtaagaaatctttgtttgttttttttacacgagagaaatattttatttttaagtaatattttaaataaataacaaattataagaaaattgtttgtattactgacatttctatgctataactcgaattaaaatttccataaattgaaaaaaatatattaatgttttaaaattgtaacgtctacatagacagttggagttgtgttcgttaacacgtttcccaaagttattcgtgtattttgctaactcatttccgaacggttacgttcaccaaccaagctattcatgccaattttttaatctagttactattcaaacaaaatgccaaactacaccaaactaatggccaatattttttatcgatattaattacatttataatatttataatgttcaatcatacttttagtgtaaagtagattcgaaccttaacctaaaacataataaaccttcaaaacctaaagaatcgaacaatttagtttgaaccatgcatcaaaacctttttttgtttttacttgtaattgcaaaataattatcggtgtatcataacaaaactatttggtaaacttgttttgatttctgcttaaggtaccttcacgaagaagaaaaaacaaagaaaaaaaacatgtgcttcatagaattaaacacgtgagtttaaaagacggtgttgaagttagcaagtggtcatgtgttcagagtatataaccgcaaatgggacattggtttatgcaatttgcatgtcgacacgcgtctctcatgcactgaactagctgtttccagttgacgttattagtcgttacttcgagagtcagaaaaaaaactttaatagcttcgacaaagccaaaataaaatgttttggttacccatttccacttgtagagagacttttaactgatatcttacaagtcgcttcgttcttgtccaatcgacatatttgcaattcgtatctattttaaagttaaaaagtagacgcctttttttgtaagattttaaaacatctttttttctagaaaaaaaaatcgtagtaaaaattaaggaataaagctaaattttaccatagtagtattatacttttaaaatttaaacccttttccaaataaaaacatatgttttcataactcataagataatttagaaatcagaaaaatcaataactaaaataaaaatgttactgccttacagtcttagacatttcctacatgaccaactttttgaaagaacatcataaattctaatattgcaatgatttacatcagcgaactttttttatgaaagaaaaacagattgaagattagaatatgaatgacaaatttagtttaacaaatagggattgttgatttggttaataaaaacccaaacataccttttttctaaatgtataaaatagtggtggttctaaaacaacaatctcaagattctctgataaatcatacttaaacttcgaatgattgtggcggttaagacttacaaatctgtttgagatttagaccttttttgtttatcgttcaaaaactgtaatatctattagtgtaaattgaaaaaaatagaacaatatgcggcgaacaaactatatatcaacgtaaagataaatttggtatgcataggtttactgcatactccaaaaataaaatggtttaatatgttagatgtttagtccattttgcacacagcatatattcaaagcctaaagttacacatatagaaagcgaaatcatgcaagatactctagatatttgcttttgttagcttcatcccttttatgatttaaaataaaattaaaattaaaaacaatcggcagtttgagttttgaggtcaaagtgatcgaagcgtggagggtctaaattaatttgggcctgaaaagaattagaggcccataagccacagagttattatccacttttcctcttccaccgagagagaagcgacagagtgaggccatg

SEQ ID NO: 12761 - DNA, 3000 bp, Unknown
  misc_feature (1)..( 3000): cDNA_ID_4262388_gDNA_ID_2214570_Annot_ID_135047 3000 nt of promoter + ATG
ctcctaaaaaaaccaattattcaacatatatatgcctgatactgatcgaataaatgatacatgatatcagagcagaagattttaacttccatttcgtcagcaagttcacgagcctctgtagtcacttccacgtctaaagccaaaattgtagcaaattcctttttcctctcgagcatcactcccgccttcattacatccttcttttgcacaggccctatgccaataccaccaacaggtaactttacagctggggacttcaagaattcaagcaatgcttccaaagaacctaatgtagacgcttgtatataaactccttcaccacttttgtcaatcctgctcaaaactgagtttacatcttccataaccaactccttaattgcttcgatgtcatcatcaggtccaacgacatgcagggcagtaccaacaattacatgttcaaggtccttttaaacacaaccaaaaaatggaaaataatattcaggatgtgatcattaattaaaagagactagaaattaagattaatgtagtatcagtccaatcaccttggcaataatattgatacactctgcagcctttattacttcgtgatgtacatgattaccctgaaataccagaccaagaattctcattgtgtatagaaaaagtacgtaatggtatttgcatgaactataatttcttaaggaataacagtaataagtacattcacatgcaactcctttattggatgaggagtcagtaatgctctaatcgttgtgacaataggtccctaaaatataagaagatataagatcattatttaagttctaagtattatccaatgcattacttatttgagtttggataataagtttttacttgcctgtagaccacaaacgacgatttgaccaccttcatggagttcaccatttaccaacacaacatcaatcgttgtaccatagccttccataactttgacctctaggacagtacactgcttaacagtttcaagaaaggatcagaatccaacatgctgaagtattgtacaaacaagtgttacctaaaagagaaaaggagcaagacctgcactttgtcaacatatgtaattagtttctcaaccattgttttctgagtcaattgaaccaacaacaacaatagatctgggatcccttccccactgaaatatcaagaaccaaaattactcaaccatttaggataaattacaaacaataaacaaagagagactcatatacctaatagcacaagtaggaacaatactaaaagtttctcccatttctttattcttgtaataaagctcactgttgagtccttgctccttaaactggtttataatctgtaataccaatgaaacaacatatacacaaagtgatagctcaaacccatagatgatgataaactctagatgaataacttacctcattcagcctcatgttaaattcatttataacatctttagtttgttgcttcatcgcctccaagataggagcattttcacatattctccatccatatagcctatccacctataagtacattgaaaattttattttccataaaaacatttacaccatagaacaaaacaaatcacaaacagttttaccttattcaatgcaataatgaactccgtattcttcattctcagaagatttagacattctatagtttgtggctctaacccatgcattatgtcaacaaccaaaattgcaaagtcacacaaacctaagcctcttgagcgaagatttgtgtagaactcgtaaccaggtgtatcgataaacagtggacgtggcaccttaagttttgtatcggatttcagttccatggtcttctctaggatgtttctcgctgagagatatgttgcacccatcttctgagtggtacctccagcctcgccttcttgtacatttcctgtgatgtaatctaacagctttgttttaccagtatcgatatgacccatcatacagcaaatgggagaacggactttgtcttcctcggagagcttattacgtctagagtgttcatcgccaacaatttgctgcttatcatctccacctcgagcactcggcttcttcagatccattgctaaacaatcgaataagctttaccttatatgggagatgacttgatcgacaaggttgagacagaaaacgagaattagctatgattttttctttgtgaaacttcctatacggtggagcaaacacgttgtgtagatatataccgattctaagtatgtaacgatgctgcttaaataatttctagaccatgcaagatataattgttttttctcggattaagattcatttacataaatgattttaaatggaatgaaatctactatatattaaaaggtaaatttttgtaaatctttaattattattcatatccaatgccattaatgtttttatataatacattttaaagatttttctaacttacttaaaaggataaaaaataaaaaagattacacatatagacacaatctagctactgcaaaaaagatttttttaaaaagcataaatctactttatttactaattataaatttaatttgtttcacttttattagtgataacaagattaattgttttgtttacacaaacaatattgttttatgatttcacttatatgaacattattatcaagagttataaagtttgcaaaagaaataggtttttattgactgaagaattgagaaattttctcatcacctttaaaattaatattgggcctagcgatgaaccgggccaacgcccattaaacatatccgataatagtttaaacccggagagactcaaagtagagaaaaccctaattgtatataaactaaaaatacttccttaattcttcacttcttcatcgccgtctgcacaaaaccctaatctcacaatctcctacgagatctatcagtctccacggtaaacgacactaatccatttcaatttctccatcgtcttctccgatcaaattctccatttacttatctgttcactatttttccagaag

SEQ ID NO: 12762 - DNA, 326 bp, Unknown
  misc_feature (1)..( 326): cDNA_ID_1807736_gDNA_ID_2214570_Annot_ID_186157 3000 nt of promoter + ATG
ttatctagttaaaaagaagttttttcttaactcttaaacacaattattagactactaaacattcataattaataatcatacaaaatgattagtcgaacaaataaaatatcgcatcctttccaatttaaacgagatcacgtggaagcgagtacacaccacgcgccgatacagagagtgagatttcaaaattcgacgaaccaatttgcctccgttcacatgcgatgcatcttctctcttaaatatccaccgtcaccactctctcttcctctttagattctctctctacagagaacttgattattttttctgatctgagaaaaaaaatg

SEQ ID NO: 12763 - DNA, 3000 bp, Unknown
  misc_feature (1)..( 3000): cDNA_ID_3026354_gDNA_ID_2214570_Annot_ID_186146 3000 nt of promoter + ATG
acagaagaaatggctcggtgaagaagaaatgaagaggaaggtgtgagatatggaaggagctaaaatgggcttaaactaaactattgggcctaaaatcattttagcccattgaatgcgcgttgaacatttgtggtcacgaacactttagctattgaacattaaaaagttttctaggatttgaatcttgcctttgctcaaaatagtttctattttattatgatatacaatattgcttttcccgtaagtttcagccagagtacaactccatatttcactgtctcctccacattacaagaagccttcaattacaagcactctaacatctttattagcctttttcttttgtaaagaaaaagaattatatatctatctgttattctcagttttgttcttcatgaaaactcaattgcatattgtaatatctttcttttttttgttttctgttttgccttcaacttcacacctaacatattttttctaaatctaatccatacatttccctactttatctatacgtatctttgtcttatttatagattgagaaccaaacaatgagaataacattttagctacctatttataatacaccaactcaagaaaattgttgtattaccaattcaatataaacatgttaacctacaagaccttttagccccacttggtattctttttttactatatgtttttcctttctatgaaccaacttaatatatttcatacaaaattagtttctgattcaaattttgccctactaagtctctaaataagtttagaatatgtttaatcagggatagtgtggttgactgagagggcatttttgtcattatacatcggtaacaagtcttgataggctcttaaggccagtcttgggttatataacaaggcatctcccttttggtgctcatgtaaattgaggaagagaaaaaggatctgaggaacaatggctacgacaagacagatcttggagcagccacaatcgccatttattcaacgtatcaagagctcggggaacattagcatgaatggcagtcctatgattgatgagaaagaagaggagctttcacagtctgcttttgctttgtttaaggcaaaggaagatgagattgagaggaggaagatggaggttaaggatagggtccagaaaaagcttggactcgctgaggaagctactagaagattagccgagattcgggaagtaagtttggtttgtaacattttcaagaacttgaacaaagattttcattttgagagagttttggtttgtacattttcaggagcttgaagctcttaccgatccaatgagaaaagagatatccgcgataaggaaaagagtcgatgctattaaccgagaactcaagcctttaggacagagttgtcagagaaaggtaaactaatgtttgtgttaatgttcataactctttatctttcttgcacattcttgagaccattggttgttgttgttgtcacaggagagagaattcaaagaagcacttgaagcttacaatgaaaagaacaaagagaaagctatatttgttagcaagctagttgaggtgaaacattctgtttccatttgtaattttctttacaaaatgattattgttttctgaaatcttttggtatgaaaatgtgtttcttcagctggtcaccgaaagcgagaaactgcggatgacaaagctggaggaactcagcaaaagcattgaaatatcgctacgctaacacaaaatgataacaataaaggctgcaaaagcagccagctttggtttcttctttcttctgctctttgtaattgtttgattcgatatttgctttttggtgtgatcaaatctgttttcctgattcagtaaccttagtagaaatgtgataaagattcagtatgatctcacatttttttgttttcatgtgtgtgacaatgttttattcctgacccttcgagttttgtaaccggaaactttaacttctatcaaaatttcttacaaaagctttcctaatccagtgtatagtgaaacagagaaacatactcaaataggttaaagaactcagtgaatagatgaaactattaataaccaggacgcaagagttttttctctcttttagcaatcttcctcatcttcttctgttgaatcctatcaataacattctctgatctcttttgctgtttctctgccctaaacttctgttgcacgtcaactctttccttccacttctccgtgttcttctcacgcatcttcgtttccttgtgaattctcttcttcaatcgctttggatcatcatgaatcttgataccagcagctctgcttatagccgcttgccacgagtgatttttcgcaacaatatcccctttctcttgatctttcttcaaagcctctaacgtcatcgccatttcaagctctttagccttagaaaccctctttttctttctgtgtttcccgtatatctcgtcaccgtccccaatcttcatataaccataagtaagatccttcacaacctcttcaaaaacattcaaacctgagtctctcttcctcttattcttctgaagacggctttgtctcatcttctcaaatgtatcatcttcttgcaaactaagaaacttaggcttcttcatgatatccgattcaagatcaagtttctcctttttttttgtcttctacaaatataatttaaaaaacagtcacaatcagaacattttcgtttgcttgtgtagtcaagtgtagaagccaagaagacacaagagttgcagaaaaaccctaaacctaaagctttgagcaccaccaaaaggcaaaaaacaagaggaaataaatttatagcgaataacacgtattgggctaagttttcattgggcctttcaaataatagatgtcaagtatcggttagaaaaccaaaaccaaagtgaattgaaaacgatttagttataaaccggacctatttttgttctctgtttactccggttaaaattgataaatcggtgcggcgaagagagagagagagagagagacgaaggcg

SEQ ID NO: 12764 - DNA, 3000 bp, Unknown
  misc_feature (1)..( 3000): cDNA_ID_2712475_gDNA_ID_2214570_Annot_ID_186144 3000 nt of promoter + ATG
attatccgaataaagatatacctaattctgatcaaaagagagcgaaaataagtctctggagtttagattgagaaactaaatgtcaacaaaccggaaacaaaaaaaaactgtgtcaagtaacaaaaacaaaagaaaagactcaaagagagtagcagcaacgtaagatttgattccaaagtgtctcacaagggaggaatgagtaatgctactccctgttttattcactcatcacaagtccatcaatcaatctatctctttactcttggacctctggctgcttctttccacctgctttcaagtaccaaccaatcgaaccgacaatagcaaccacacctgccacaaccgcatagtttctgttcttgtcttctgacacctttgggcccgactcagctgatgcagatgctgttgcaccagcaacctttgcttcgcttgctgaccctgctgcttgttctccaggaccctagtaagttcataagaagtttcagccacacaagactgtaaattttctctttatctaaacaagctattcgtagtttcaacaactggagttaaaggaattatttacctgtcgagctaacttctgaagcttctcctgctccattttctgcaatgtagaaaaccataaacaaggtaaaatataaggacagaagatgacttactcaaaaatataaattgttttgaaaagagtaagtattatgtaacaggtttctagttcaagctagatgctacaaggtttagataacaaatagatttaacttctacgattaagacacaagataagtttcttataagtaaaaccaaatattatctaatagtttacaacagagacagatagaatcaaacaagagcttgataataagtgttcatcatcaacatcacaaaaggaaagtaaatatacttatagttttttcgaggattcttagtctactattattgttcacatcaataaggaaagcttctgatctttaccttaatgaaaacattctcagcggctctctcctcttcgctaagaactttgccactagagaacctacgagacacaattctcaaagcatttcttgttgccatggtaatgaagaagtatcctgtgcataaaacattaaactcattttaactaaagcagacagtgaatgagagagattctaggaactaacaaaatcgttcactttgaaaaccctgaaattgtttgaaaactccataaaaactattacagaaaacctataaggagtaacattggactcttacaatccttttcgtcatcatcaatcataacatggtaaatttgtttttgctaaataaacatggtgaattaagatactaatgtatcaagtgtcaactattactgtatcccacgtatcagcgacaatggtgaattactttaacagaaacataatctacagcacaatagcgatgctagaggtaatctcaagattccacacagacagttacagaaaatctataatgaggaaacacttattggtacttgtctctcaaaatcctttttgtcatcatcatttcatacaatggggaagtcaccaaaaaatctattactgtatcccaagtatcagctactacattcaaatcaaaatacatatactcatggatccttgtggaggctgtagaatgttaagtgtttgttaccacaaaaaacagtgtaacaaacacagcttctcatataccaaatcgatccaaatctaggtttagaaaacgtatagaggaagcacaaaagatcatccagcgaaaatccgaggatcgcgaataaacaacaaatcactgattataacaaatgtaatcataaaatcaaaacctaatccggatatgataacacagatacgaaaacggtagctctgacctcgaaaatggtggtatcggtaacgaaaaatcgaggtcaggtgttagatcgacagagaagaaaaggttagaaaaatttctgagctaatctaaaaacgagaaggaaagaatcgtaatcggagaagatgatcggaagatatgagagacctggttcgatggtagatcgttaaaagtttcgtctggctgctgaatgctgatgaaatccgcttacagaagaaatggctcggtgaagaagaaatgaagaggaaggtgtgagatatggaaggagctaaaatgggcttaaactaaactattgggcctaaaatcattttagcccattgaatgcgcgttgaacatttgtggtcacgaacactttagctattgaacattaaaaagttttctaggatttgaatcttgcctttgctcaaaatagtttctattttattatgatatacaatattgcttttcccgtaagtttcagccagagtacaactccatatttcactgtctcctccacattacaagaagccttcaattacaagcactctaacatctttattagcctttttcttttgtaaagaaaaagaattatatatctatctgttattctcagttttgttcttcatgaaaactcaattgcatattgtaatatctttcttttttttgttttctgttttgccttcaacttcacacctaacatattttttctaaatctaatccatacatttccctactttatctatacgtatctttgtcttatttatagattgagaaccaaacaatgagaataacattttagctacctatttataatacaccaactcaagaaaattgttgtattaccaattcaatataaacatgttaacctacaagaccttttagccccacttggtattctttttttactatatgtttttcctttctatgaaccaacttaatatatttcatacaaaattagtttctgattcaaattttgccctactaagtctctaaataagtttagaatatgtttaatcagggatagtgtggttgactgagagggcatttttgtcattatacatcggtaacaagtcttgataggctcttaaggccagtcttgggttatataacaaggcatctcccttttggtgctcatgtaaattgaggaagagaaaaaggatctgaggaaca

SEQ ID NO: 12765 - DNA, 3000 bp, Unknown
  misc_feature (1)..( 3000): cDNA_ID_3026358_gDNA_ID_2214570_Annot_ID_186143 3000 nt of promoter + ATG
tttcactatacactggattaggaaagcttttgtaagaaattttgatagaagttaaagtttccggttacaaaactcgaagggtcaggaataaaacattgtcacacacatgaaaacaaaaaaatgtgagatcatactgaatctttatcacatttctactaaggttactgaatcaggaaaacagatttgatcacaccaaaaagcaaatatcgaatcaaacaattacaaagagcagaagaaagaagaaaccaaagctggctgcttttgcagcctttattgttatcattttgtgttagcgtagcgatatttcaatgcttttgctgagttcctccagctttgtcatccgcagtttctcgctttcggtgaccagctgaagaaacacattttcataccaaaagatttcagaaaacaataatcattttgtaaagaaaattacaaatggaaacagaatgtttcacctcaactagcttgctaacaaatatagctttctctttgttcttttcattgtaagcttcaagtgcttctttgaattctctctcctgtgacaacaacaacaaccaatggtctcaagaatgtgcaagaaagataaagagttatgaacattaacacaaacattagtttacctttctctgacaactctgtcctaaaggcttgagttctcggttaatagcatcgactcttttccttatcgcggatatctcttttctcattggatcggtaagagcttcaagctcctgaaaatgtacaaaccaaaactctctcaaaatgaaaatctttgttcaagttcttgaaaatgttacaaaccaaacttacttcccgaatctcggctaatcttctagtagcttcctcagcgagtccaagctttttctggaccctatccttaacctccatcttcctcctctcaatctcatcttcctttgccttaaacaaagcaaaagcagactgtgaaagctcctcttctttctcatcaatcataggactgccattcatgctaatgttccccgagctcttgatacgttgaataaatggcgattgtggctgctccaagatctgtcttgtcgtagccattgttcctcagatcctttttctcttcctcaatttacatgagcaccaaaagggagatgccttgttatataacccaagactggccttaagagcctatcaagacttgttaccgatgtataatgacaaaaatgccctctcagtcaaccacactatccctgattaaacatattctaaacttatttagagacttagtagggcaaaatttgaatcagaaactaattttgtatgaaatatattaagttggttcatagaaaggaaaaacatatagtaaaaaaagaataccaagtggggctaaaaggtcttgtaggttaacatgtttatattgaattggtaatacaacaattttcttgagttggtgtattataaataggtagctaaaatgttattctcattgtttggttctcaatctataaataagacaaagatacgtatagataaagtagggaaatgtatggattagatttagaaaaaatatgttaggtgtgaagttgaaggcaaaacagaaaacaaaaaaaagaaagatattacaatatgcaattgagttttcatgaagaacaaaactgagaataacagatagatatataattctttttctttacaaaagaaaaaggctaataaagatgttagagtgcttgtaattgaaggcttcttgtaatgtggaggagacagtgaaatatggagttgtactctggctgaaacttacgggaaaagcaatattgtatatcataataaaatagaaactattttgagcaaaggcaagattcaaatcctagaaaactttttaatgttcaatagctaaagtgttcgtgaccacaaatgttcaacgcgcattcaatgggctaaaatgattttaggcccaatagtttagtttaagcccattttagctccttccatatctcacaccttcctcttcatttcttcttcaccgagccatttcttctgtaagcggatttcatcagcattcagcagccagacgaaacttttaacgatctaccatcgaaccaggtctctcatatcttccgatcatcttctccgattacgattctttccttctcgtttttagattagctcagaaatttttctaaccttttcttctctgtcgatctaacacctgacctcgatttttcgttaccgataccaccattttcgaggtcagagctaccgttttcgtatctgtgttatcatatccggattaggttttgattttatgattacatttgttataatcagtgatttgttgtttattcgcgatcctcggattttcgctggatgatcttttgtgcttcctctatacgttttctaaacctagatttggatcgatttggtatatgagaagctgtgtttgttacactgttttttgtggtaacaaacacttaacattctacagcctccacaaggatccatgagtatatgtattttgatttgaatgtagtagctgatacttgggatacagtaatagattttttggtgacttccccattgtatgaaatgatgatgacaaaaaggattttgagagacaagtaccaataagtgtttcctcattatagattttctgtaactgtctgtgtggaatcttgagattacctctagcatcgctattgtgctgtagattatgtttctgttaaagtaattcaccattgtcgctgatacgtgggatacagtaatagttgacacttgatacattagtatcttaattcaccatgtttatttagcaaaaacaaatttaccatgttatgattgatgatgacgaaaaggattgtaagagtccaatgttactccttataggttttctgtaatagtttttatggagttttcaaacaatttcagggttttcaaagtgaacgattttgttagttcctagaatctctctcattcactgtctgctttagttaaaatgagtttaatgttttatgcacaggatacttcttcattaccatg

SEQ ID NO: 12766 - DNA, 3000 bp, Unknown; identical to SEQ ID NO: 12761
  misc_feature (1)..( 3000): cDNA_ID_4254590_gDNA_ID_2214570_Annot_ID_186142 3000 nt of promoter + ATG

SEQ ID NO: 12767 - DNA, 3000 bp, Unknown; identical to SEQ ID NO: 12760
  misc_feature (1)..( 3000): cDNA_ID_1010079_gDNA_ID_2214570_Annot_ID_186139 3000 nt of promoter + ATG

SEQ ID NO: 12768 - DNA, 3000 bp, Unknown; identical to SEQ ID NO: 12758
  misc_feature (1)..( 3000): cDNA_ID_3026384_gDNA_ID_2214570_Annot_ID_186133 3000 nt of promoter + ATG

SEQ ID NO: 12769 - DNA, 3000 bp, Unknown; identical to SEQ ID NO: 12757
  misc_feature (1)..( 3000): cDNA_ID_3026388_gDNA_ID_2214570_Annot_ID_186132 3000 nt of promoter + ATG

SEQ ID NO: 12770 - DNA, 3000 bp, Unknown; identical to SEQ ID NO: 12756
  misc_feature (1)..( 3000): cDNA_ID_2712511_gDNA_ID_2214570_Annot_ID_186129 3000 nt of promoter + ATG

SEQ ID NO: 12771 - DNA, 3000 bp, Unknown
  misc_feature (1)..( 3000): cDNA_ID_3026394_gDNA_ID_2214570_Annot_ID_186127 3000 nt of promoter + ATG
gaagttgagtacgatcttaagtgatatatataagatataggcctctccacctattgccaattggttttaggttggaagcccacagtctaatagtatgcgatctgtatccggtgatcctcaggcgactcttggagtcttggtaagagaaaaattgtaggactttacttaaccaagccgctggatctccgctggagaaccgaggaaactccaacttagccaacttggattgaaacattagagcatcattattggttgtttcttagattagttcttaggttttttcttgttattgattactaagaacatctcatttcaactcttatataagagacattttgtcattttgtctcttatataagagttaaaatgagatgttcttatcataagaactaatctaggagacaactaataatgatgctcttagttgtttaaccaagtggtagcttgtggtctagtgactattagataaaatgacagcttgaactgcgactgggattgtgattgtcgaatagaaatttcttctttgagcacaaatagacaaaatgttgggttgcagtttcagcaaagccctctggagttcggttcagtccaggcttaggttgcactcacttatttttctgaaattgggctgaacttctttcatggattcgtcgttctagcacttctgctccctccacactgaggaagcttgttgttcattccgtcgtctacgtaacttggaagcagagaaataacatgctacataactcgcatcagatggatcatgcttcagtcttcaagatcatcgataggaaaatcattaactccatcaacgcaagaagacacaaaaagaagttccgtaatcttatgagtttttggctcatatagtgtttctttctgaagtttgtttacttccttgttttttatcataatttttgccaaggaactaattatttaggagttctcagtgtaattcctaactctttcattttatatgatatttaccgatttagcaaaaaatagacaaaatgtttgtatggctgaaatgaggcacaatcttggttgatttattcattgtctatttcccaatgaactgtatagtcccaaaagtaacttaaccaaggtttaatttatatcacctttagttagttttccattttcaatctacttgtttagcaagctaacctattcacaaataaaaaaagaagcgtgatttttgttagtagaacatcaaaacccaacgagaaacgctttactgatatcaacttatagatgcattgtcaactgatcaaagatccctcgatctgaatgatgaaaaagagcgatcatatgagaaaaaaagtcaaggatacttgttgtgagacttataaagaaaatatttcgtagttagagtttataaaacaggagcatttgcttgttgataaaagcaacgacaaatttttactgccaatttaattacaatttcattttcattatctaacgttaatatgttttaatgtacatagttaaatattatgttatacacttatactaataaaataaatacatgaatcaaactctcttttatctctcctcgagattttgcgattgaggaagtccaataggcacggaaattttctcattatcttctcgtcttccatcatcaaaattcagagagtagctcaaataatcatatcggaacatgcttttgtcatatgtcgaacgttgtcttcttacatttttcagctttccacacaaatttcccattatatttttcttggagatcttgcttagcctttcaacaaatgttgcagttcgttagaacaatggattttttcttgacgtaatgtgctgaaattacgttagagcctacacgatagaaaaaaatgttagaattgttaaatgatgtgtttgagatctcggcttttatgaccaattaactctaagaatgatacaactacttgtagtttggagagaagcatcaacgagcaaaccttaaatattctgagaagttaaacaatggtcggtttattttttatctatattgtgataactttaaataatgggagataacgatctagttatggattttgcatgagctcattaataaaaattgcatgcattggatcatgacacaattacacagtgtaatgataactaattatgatcttatatgtaatgagtttgtaaaacaaaatagtaatttataagaccaaaaataaagttacaagtttaatccaaaaaacttctgtacacaaacaaaagtaaaacaaagttaaatcttaaataatttatattattagaaaaatatctaattaatatcaaatttaccacacacaaaaaaaactatgtaagattatttcttaataaatttgtaatataacaaaaataacaaaaacaattttgaaaatgagaaagtatttataataaaactaagaagtttggaataatgacaacaaagcttgagcgtaaatggaaatcttatgtaaatataacattcaagagtgatatactatgtgataagaatttataagattttgacatgtattaactaatttattatattttgacatatgtctacataataaaatttgaaaagatagaaaaaactattcaatgtaaataaatgtaagatatctttgaaaagaaaagataaactaaattttatagtagtactttgggcctttggggaatttaaatggaaagcaagatctacggtgtgatactttttattgtaaatattatagatatggcaaatgataaagttagaatcgagattttggaatcaaggcttggagatttaaagagctagccgcagttgggttattacttacatagtgaaatggtttcctaaacgaagatggctacaaatctttacatatctcaataataaatatagaatatcttcacattgattggtgcatcttcttgatcattctattatttctatatcacattcgtctgtctccacatcatcacttctcgtttcgtcttattgttgttatctttcgtgaatagagaagaaactcaagaatcaagatg

SEQ ID NO: 12772 - DNA, 3000 bp, Unknown
  misc_feature (1)..( 3000): cDNA_ID_1570116_gDNA_ID_2214570_Annot_ID_135048 3000 nt of promoter + ATG
taaacagtggacgtggcaccttaagttttgtatcggatttcagttccatggtcttctctaggatgtttctcgctgagagatatgttgcacccatcttctgagtggtacctccagcctcgccttcttgtacatttcctgtgatgtaatctaacagctttgttttaccagtatcgatatgacccatcatacagcaaatgggagaacggactttgtcttcctcggagagcttattacgtctagagtgttcatcgccaacaatttgctgcttatcatctccacctcgagcactcggcttcttcagatccattgctaaacaatcgaataagctttaccttatatgggagatgacttgatcgacaaggttgagacagaaaacgagaattagctatgattttttctttgtgaaacttcctatacggtggagcaaacacgttgtgtagatatataccgattctaagtatgtaacgatgctgcttaaataatttctagaccatgcaagatataattgttttttctcggattaagattcatttacataaatgattttaaatggaatgaaatctactatatattaaaaggtaaatttttgtaaatctttaattattattcatatccaatgccattaatgtttttatataatacattttaaagatttttctaacttacttaaaaggataaaaaataaaaaagattacacatatagacacaatctagctactgcaaaaaagatttttttaaaaagcataaatctactttatttactaattataaatttaatttgtttcacttttattagtgataacaagattaattgttttgtttacacaaacaatattgttttatgatttcacttatatgaacattattatcaagagttataaagtttgcaaaagaaataggtttttattgactgaagaattgagaaattttctcatcacctttaaaattaatattgggcctagcgatgaaccgggccaacgcccattaaacatatccgataatagtttaaacccggagagactcaaagtagagaaaaccctaattgtatataaactaaaaatacttccttaattcttcacttcttcatcgccgtctgcacaaaaccctaatctcacaatctcctacgagatctatcagtctccacggtaaacgacactaatccatttcaatttctccatcgtcttctccgatcaaattctccatttacttatctgttcactatttttccagaagatgaaggttgttgccgcatacttgctcgctgttttgagcggaaaagcttcaccaaccagtgccgatatcaagactatccttggatcaggttcgttttgatgaatcgcaatcgatttcattacaatatgattagattcgttgtttgagtcgctggagaattcgatttgaaatctttattagatagttgagaacttgcttaagctgaaatgatatgtatattagggatttttatggttcctatcgacttaaacggtgtttatgatagtcgagatgcgtaagtattgttaagagtaatgatttagtgaacaatgggatacaataatgagtttgggatgattgatggaatgtggcattgttgtttttgtttggtgttgcagttggtgctgagacagaggattctcagattgagcttttgttgaaggaagtgaaaggaaaagatttggctgagttgattgctgctggaagggagaagttagcttcagtgccgtctggtggcggaggtggtgttgcggttgcttctgctacatctggaggtggaggaggtggtggtgcttctgctgctgagtccaagaaagaagagaagaaggaagaaaaggaagaatccgatgatgtaagtttactttccttctaacaaaagtcttgatcttaatagtagcttgaaatttaacctaaaaatgatggctcacttgtgtgtgtttttgtttttaatttgcaggacatgggtttcagtctattcgagtaagctggtagtagcatgaaaagtccggttttgttgtcctcttttaatattgtaaccttttgaaatctatatgttgttgttgtttagtttgtattcgatcatcttttttagacattgctgaaattctcaagagtttttgacccgaatgtcatttgcactttgttgttagcatttctgcttctatctcaatcgcctttgtcactctggagtttttagtagccaacaaaagcattggtcctagtcatggtcttaaatcttgactcgaatggtgatgagatacctctagccttgactttgctaatgatacgttgtcgttcatttggaacctagattcagattcggcttacgtatgacttcaagaatagtattattgtaagaaaaggataaaaaaaaaattctagtcttgaattgttcccccttcaatgccgtccaatatgtaaatacatcataattcgtatgagaaaataactagactatgctaaaactttgacaccacaaatttattagtaacttgcaaaacatatcacttgtcaactacatataccgagaaatgccatacgcaggcgatgtttcggaaacaacaggtgtagagttgaagctacttttgatgtcatcgaccaagaaggtgctatagaagacgaggttagaggtgaaatcccatccatcaaacaaaataaaactagagaattgtataatctggtcgttctcttctcaacatcaatattacccgtcaatcgaaatattgagcccatataaatatgggcttgaaagaactgggcctaaataaaattttaaattcggagatacattgataagattaaaaaccctaagcgtatataaatcatatagttttcattttttcgtacttcttctccatcgccgtctaaaaaccctaatctcactccgcctcctgcgagatccatcaacacttccgcagtaagcgcctccatttccatttctctctccttcttctcctacgtaatcgtactatgtttgatttttgatctgtttttgtttttcttcagaaa

SEQ ID NO: 12773 - DNA, 3000 bp, Unknown; identical to SEQ ID NO: 12765
  misc_feature (1)..( 3000): cDNA_ID_3026310_gDNA_ID_2214570_Annot_ID_135049 3000 nt of promoter + ATG

SEQ ID NO: 12774 - DNA, 3000 bp, Unknown; identical to SEQ ID NO: 12764
  misc_feature (1)..( 3000): cDNA_ID_2712475_gDNA_ID_2214570_Annot_ID_135050 3000 nt of promoter + ATG

SEQ ID NO: 12775 - DNA, 3000 bp, Unknown
  misc_feature (1)..( 3000): cDNA_ID_2712467_gDNA_ID_2214570_Annot_ID_135052 3000 nt of promoter + ATG
agatatggaaggagctaaaatgggcttaaactaaactattgggcctaaaatcattttagcccattgaatgcgcgttgaacatttgtggtcacgaacactttagctattgaacattaaaaagttttctaggatttgaatcttgcctttgctcaaaatagtttctattttattatgatatacaatattgcttttcccgtaagtttcagccagagtacaactccatatttcactgtctcctccacattacaagaagccttcaattacaagcactctaacatctttattagcctttttcttttgtaaagaaaaagaattatatatctatctgttattctcagttttgttcttcatgaaaactcaattgcatattgtaatatctttcttttttttgttttctgttttgccttcaacttcacacctaacatattttttctaaatctaatccatacatttccctactttatctatacgtatctttgtcttatttatagattgagaaccaaacaatgagaataacattttagctacctatttataatacaccaactcaagaaaattgttgtattaccaattcaatataaacatgttaacctacaagaccttttagccccacttggtattctttttttactatatgtttttcctttctatgaaccaacttaatatatttcatacaaaattagtttctgattcaaattttgccctactaagtctctaaataagtttagaatatgtttaatcagggatagtgtggttgactgagagggcatttttgtcattatacatcggtaacaagtcttgataggctcttaaggccagtcttgggttatataacaaggcatctcccttttggtgctcatgtaaattgaggaagagaaaaaggatctgaggaacaatggctacgacaagacagatcttggagcagccacaatcgccatttattcaacgtatcaagagctcggggaacattagcatgaatggcagtcctatgattgatgagaaagaagaggagctttcacagtctgcttttgctttgtttaaggcaaaggaagatgagattgagaggaggaagatggaggttaaggatagggtccagaaaaagcttggactcgctgaggaagctactagaagattagccgagattcgggaagtaagtttggtttgtaacattttcaagaacttgaacaaagattttcattttgagagagttttggtttgtacattttcaggagcttgaagctcttaccgatccaatgagaaaagagatatccgcgataaggaaaagagtcgatgctattaaccgagaactcaagcctttaggacagagttgtcagagaaaggtaaactaatgtttgtgttaatgttcataactctttatctttcttgcacattcttgagaccattggttgttgttgttgtcacaggagagagaattcaaagaagcacttgaagcttacaatgaaaagaacaaagagaaagctatatttgttagcaagctagttgaggtgaaacattctgtttccatttgtaattttctttacaaaatgattattgttttctgaaatcttttggtatgaaaatgtgtttcttcagctggtcaccgaaagcgagaaactgcggatgacaaagctggaggaactcagcaaaagcattgaaatatcgctacgctaacacaaaatgataacaataaaggctgcaaaagcagccagctttggtttcttctttcttctgctctttgtaattgtttgattcgatatttgctttttggtgtgatcaaatctgttttcctgattcagtaaccttagtagaaatgtgataaagattcagtatgatctcacatttttttgttttcatgtgtgtgacaatgttttattcctgacccttcgagttttgtaaccggaaactttaacttctatcaaaatttcttacaaaagctttcctaatccagtgtatagtgaaacagagaaacatactcaaataggttaaagaactcagtgaatagatgaaactattaataaccaggacgcaagagttttttctctcttttagcaatcttcctcatcttcttctgttgaatcctatcaataacattctctgatctcttttgctgtttctctgccctaaacttctgttgcacgtcaactctttccttccacttctccgtgttcttctcacgcatcttcgtttccttgtgaattctcttcttcaatcgctttggatcatcatgaatcttgataccagcagctctgcttatagccgcttgccacgagtgatttttcgcaacaatatcccctttctcttgatctttcttcaaagcctctaacgtcatcgccatttcaagctctttagccttagaaaccctctttttctttctgtgtttcccgtatatctcgtcaccgtccccaatcttcatataaccataagtaagatccttcacaacctcttcaaaaacattcaaacctgagtctctcttcctcttattcttctgaagacggctttgtctcatcttctcaaatgtatcatcttcttgcaaactaagaaacttaggcttcttcatgatatccgattcaagatcaagtttctcctttttttttgtcttctacaaatataatttaaaaaacagtcacaatcagaacattttcgtttgcttgtgtagtcaagtgtagaagccaagaagacacaagagttgcagaaaaaccctaaacctaaagctttgagcaccaccaaaaggcaaaaaacaagaggaaataaatttatagcgaataacacgtattgggctaagttttcattgggcctttcaaataatagatgtcaagtatcggttagaaaaccaaaaccaaagtgaattgaaaacgatttagttataaaccggacctatttttgttctctgtttactccggttaaaattgataaatcggtgcggcgaagagagagagagagagagagacgaaggcgatgatgatgttaaaccctagcaatggcggaatcgagggagagaag

SEQ ID NO: 12776 - DNA, 3000 bp, Unknown
  misc_feature (1)..( 3000): cDNA_ID_2712456_gDNA_ID_2214570_Annot_ID_135056 3000 nt of promoter + ATG
gagattttccggaggtactgcagaaagaatgggaaagtatcaaattttgttgacatgaacctgatgtgatatgaaatttttgaagtaacataacttcaagaagaaaatcaaaacttgtaactagcatccaaacaaactccatttgcaaagagggcggataaaagtaacttcactaaacttacaagagcaaagatgatcacaagtagtatctgcacaacaccgatctcaagacatttaccaacaagcgggaaaccatagctgtaaaaggaaagtccaactgcagctaccgtcggagcaacaactactggattgaccaacctatacagaaggtcaagagaattatgaatacaagttaatactgcaccacacaaagccacaacaaccatgtgtaaacaaaacagcaaataggacaaactcagagatgtatacctcaaaatcagtgacattaggccactgtatccaagcactgcttgaaaagctgaaccaattatgattgcaccttgcagctccctcatgatatgcttgaagttctaccgtattaaccaaaacacaaaactagaacaaattaacaaaccatagaaaaaagaagaattgctatagacaaacacagaataatcagaaatgccaagagtagaaaaggatgttttcaatccacccttgcctagtgcagaagtcttcctaatgacgatttgttatttctcgctaagtaaaatttgccataaaagttgaaagagagctccaacaggttacttgcatgatttttacaacagattaccctaagcagcaaaaaattacgaggctacattctgaaataacagctacatttcgatagtaacatcaccatatcctcaacggaacccaatgactgacattttacttaatcatagatagcagaagaggttcttctttcaaacttacattatttccattcaaaccttgaaactctggagagtttattatagccaaagccggagccagaaagacaaaggaaggaccttgaatcaaaggaagcctcgacccaaacgaagtatgcaacagtgtagtgattccagagacaaaaagtacagtcgatacaacatttgcaacctcctcctataatccaaaaaaaaagttgaaattacatttgcaatcatcattgtccaaagtagagagtccaaaagaatcacacttacatgtgaacctcccattgcaggaacaataacaagtggaaccagaatcaatgatcccaacattgaaaggtaatgctgcaaaccatagaacccaattggaactgaaaacacaaacacacacaacaatcattaaccaaacaccaaaaataaaaaaaagaaactttaaaaagattcagtcactatctgacatgaaatccacaaatggaatctatcaatatattattaattaccaattatatataagtcataatcaagagaatcaataacaatttaacaaatagtaataataaaaatcagtactaaccaagtccaggagtatctctaagaccatacttcatatgcaaattcctagccactaaatcatcatccatactctgaggcaaaacctcaactgtttcttcaatacgacccggtcttctaaccgggtcacctgacccattagctccatcgggtccatttgatcttccaacaaccccatcagaatctctccttctcttaaccggttgatccttaaccggaacagcaacagaaccaggaggtggtggtggtggcttctctttcttatccttgtcagtctcaccgttagttactgcggcggagacaggaggaggaggacggagtctggtttgaccagcttcaagatccggttgggtttcttgttgtttagctctaaccggtaatgagagctgaccggaagaagaatcagtggcggtagtttcaccggagaatttgggacgaaatccggtttttttagcccaggaagacggtggcattgcggcggattctggagttggtggccatggacccggtttaggtccgggtttcgggtcggagcttgacattttttttccttgtggaatttcttctcagtattgcatagtgaagattgaaacttttttctttagatctaggaaaactctcaatcgtcggagaaggaaaacgacaaaagaaaattgggaattagggttttcttcaaatctccagagagagtacagttgtgtgtgagagagagtgagaagttctatgaagaagtaacagtgaatgtgaaaatgagagagagagagaggaaaaaaaatctaatcttttttttttttgacaataaatctgatttaacataagatttaagatattaaacatttcaactttttttttttctgttttcattttttttgttgtggtataaatttacgtcgagtgatgcaataaatcgatttatatggttagaaagtagagtatatcctgaaagacaagaccaaaataacttatgtctttttttctttctgttgtcataaaaaccaatgtatagcttatctgaaatctgtgtttctgatgatgtaataaaattgacatgcatgaggataaataaccttttaagggaacaaatatttatttggcaaaaaaaaaaaaaaaaaaaaaaaaaattatttggcatgaacttgagaatatttagatgacgattgatactctttatatataacaacaaaaacatttcatagagatctatgaatgataaagattttttgttcaataacaaattattaagaatttaactcatttttaagatttaagcaatcattctaccttaactttgatagataaataaaaacaagaagagtgtggatgtctaaatgtaattgtggtgattatattcatatctaaacacttatgctaacatacttataagttataataatgtgctcgccttcatgattccggttaatcaaaccgagcaattccggtttagtttctacagtttattgaaccgtcttcttcagtcccttcaaagtttgtggttttgggatttgcagaacgaagcagtcgaagaaaaatg

SEQ ID NO: 12777 - DNA, 326 bp, Unknown; identical to SEQ ID NO: 12762
  misc_feature (1)..( 326): cDNA_ID_1807736_gDNA_ID_2214570_Annot_ID_135061 3000 nt of promoter + ATG

SEQ ID NO: 12778 - DNA, 3000 bp, Unknown
  misc_feature (1)..( 3000): cDNA_ID_2709630_gDNA_ID_2214571_Annot_ID_135063 3000 nt of promoter + ATG
gagatactctctgggtttcttaaaaaaatatatattagtattttaataaatattagttatataattagattttaattattaaaataaaatttgatcaatggatgataaacaaatgtctttgtaggtttctcatagtttctcagttaagagactctcttcactctctttcttactttttgattaaaactatgagaacacatttaaatttcataagcgataatattagatacaaactaagagcatctcaattagtgagatactctctgggtttcttaaaaaaacagtattagtattttaataaatattagttatataattagattttaattattaaaataaaatttgatcaatgcatgataaacaagtgtctttgtgggtttctcatagtttctcagttaagagactctcttcactctttttcttactttttgattacattttatttttatattaggtggtttctaaatgagaaacaattgatggagatggtctaaactcaaattcatatagatgcttcggaaacatacaagtttcataaaggtagtgacttttgaaagagaaatgattcaatcatggattttccgttttttccaaaccgctaaatgcaatcaattacgacctagggcaaagatcctaatcctaaacttgaacttctacaaggcaaatgaaatcattaacccatatgcatttgcaaacgcaaactagatgctattagactcaattctaataacaaaaataaatatgcaaagctaccagattctttttggattttcaaacttttcaaaatttttgatttatctcaaaacatatctattgataatgcaagactcaaaatgaagaaatcaaaatatctccaaggtcttgcgagaaaactatatccatagagacttgaagccttccatacttataggctataggagatgacataagagcgaagatttctgattttggctgtatgaagctcgtactcgagggagtagactcatttgagacattaagagtggtgggaaccttcaactgtattgatccagattatgttggtaaattagattatcataatcagacttaatcttcagctcattatatgtatcagtatttgtgttaatttaactattttcaaaataaggaaaaatataaaaaataatattttcgaagtatatttgtaggttctaagagggtcacaaaaaaagcggatgtatatgcattcgaggtgattctaatggagttgatcacaggaagaaaagcgaattatgagactttgagtgttgatgaacaaaatctggtcatgtggttacgtccgaagattaaaatttcaacattcttgaacttggttgatggcaccatagcaacggacaaagaaaccattaagagaatcaagaagattgcaaaattggctgaatattgcacttctcaagaagttgaaagtagaccattaagagcatcaagaacaaaatctggtaatgaagttacgtccgaagattaaagatacaagtcatacaacattcttgaacttaataatattacattttaaaaataataatattaaataataggaaacaaacaagattatctgttcatcaatgctttcaatgataatttgaattatctcaataacatggacatacataacactttacaaataattttatcatatttaacttatgttttgctcatatttttcttatattttgcttaattttcatcaaaactctttttaattatttaaattattcaataactataagatattgatagaagtgtagtcacgtatactgaaattcattcaaaaaatttctcaaattaaatccagtttctaaaattatttaccaaataaaattataaaaaaatgtgcaggttatcattctgaattcaagtacaattaataatatttaataaatattttatctacatgtttacatttacaaaacaaaagagagagagattaataattcagaatgtttttttattattatttactaacgctaaaaagaaaacttaactgactaaaatttaatttgtttttaaaactattcaagattttgtgcatcagtcacttcttaaagattctggaaatcgattatgtgaaggaagtcttatcaaaatttgcatgaaaaaaataaatataatggaaacaatataatagaaacataaaagcaaaatctaactttgtttttccgagccatctatttttgttttctatttttttgtttattttcacgggttatgaaaattttaaatcaaaaacccgcatatatgcggatcctaatctagttatttctataagattcatcatatatagtacacatgatatctaaagattttcttactttaaattaaattaagactcaagagaatcaccatatatattacaagaaaacatgtgaatagcatgaaaatattgcgtggaaataaatgtgtcgctaaattgcatgtaattagcgtggaattaccatcgcattaacgattcgactcaatatcgtcgaaaatgtgtttggaaaattttcgtcgctaattcgaggcagataagcgtataattagcgacgaataaggatggaatagtgtaattcaactcaacttcgtcgcaaatatgcttggaaataattcgtcgctaattcgaggcggataagcgtctaattagcgacgaatgtgagtcgaagtcaacagccaatccaattcatcgcaaagtacatgcacatttggtgtggaatttgcgtgtaaaaatttgacacaattgtgagacatatttgagacgaatatatatggtaggtgataaacgttttaaaatgtgctacctaactagtttacaattcctcgcaatatagtcgcaaaaattcgtcgcaaatagatttgtatgcctatataaagtcacgttgggatgagtaaggaacatcacaatctctcttcttcaatattaaacattcttcttcaaatttcgttttcaaatcttttcttctcaaattttatatttcttttatcttcaaaataaatatatataatatg

SEQ ID NO: 12779 - DNA, 3000 bp, Unknown
  misc_feature (1)..( 3000): cDNA_ID_1807882_gDNA_ID_2214571_Annot_ID_135065 3000 nt of promoter + ATG
aaaacggaaaatccatgattgaatcatttctctttcaaaagtcactacctttatgaaacttgtatgtttccgaagcatctatatgaatttgagtttagaccatctccatcaattgtttctcatttagaaaccacctaatataaaaataaaatgtaatcaaaaagtaagaaaaagagtgaagagagtctcttaactgagaaactatgagaaacccacaaagacacttgtttatcatgcattgatcaaattttattttaataattaaaatctaattatataactaatatttattaaaatactaatactgtttttttaagaaacccagagagtatctcactaattgagatgctcttagtttgtatctaatattatcgcttatgaaatttaaatgtgttctcatagttttaatcaaaaagtaagaaagagagtgaagagagtctcttaactgagaaactatgagaaacctacaaagacatttgtttatcatccattgatcaaattttattttaataattaaaatctaattatataactaatatttattaaaatactaatatatatttttttaagaaacccagagagtatctcactaatggaaatgctttagtttgtatctaatattatcgcttatgaaatttaaatgtgttcttatagttttttaaaagactcattcaggttttcttatctattttgtcaatctttgtaaaccggaatttcaatcttacaaattcgattttacaatacaatttaaatatctattttactttaatcaatataatttaattctatacattacattttattgttagttttccattttagttaagaaaattataagttaattttttagatatagacatataaattaaatatctagaaatatgtttatttatttagtttctttattttctttaggaaaaaagtaaaaaaaaaaaaaaaatctaacacatgtcaaaatctaaaatcttaaagattgacatgtgtcatgatattgtgagttactaacttttaaaaccgtactttatataataagattttatatatttatagacttaaaaattaatatatgtaaatttatttacttttttatgttttctatttttttaagaaaaaaaaagttcaatctttattgacatatgtaaacatcttgtcgttagatttactacgtgtcatgatctcgtgaattagtaacttttgaaaccgtactttatataataaattacatttgaattcgatttatacaaaatcttaaccgtaaatcacgagatcatgacacatgtcaggtatatcattgagatgttgacatatgtcaaaaaagtttcttaaccgtactttatataataagatgtgcaatttcgatattgaacctcatcaaacaatttacgtagctcgaatcaacccatacgattctaggcgcaaaagttatttcgctgtcatgctttgaacccaaaatttatcatctttagaggatagatttaataattgtgataaaacggaacttttgttaagttatgaatatattgtgtataatacatttatgtattaaaaaattaagattttcttgtcaagaggtatggtcattctcttacattaatttaaactcaagaattttttatatcatttataccaaatatgataaattttataaaaacaatgtaatttcgatatcgagcctcattaaacgatgaatagctccaatcaacccataggattctaggaggaaggctgaaaaacctcgtcgtaaaccctttatcacatgtagatcaatagttccatcatgaagttggaacagttaaaattacaggaacaacaattatttctgctgcctaaatttgaacccgaaatttatcatctttagaggaaaaatttaatcattgtgccacagtggaacacttgctaaggtatgaatatatcgtgcatatatacagttatgtattaaacttcttatgactcattattggttttaaaaagaatttaccaaaaaaatatgatcattctcatagattaatttaaactcaagaatctttgaatatcatatttaccaaataatacatatcctcaatcaatccacatagttttaagcgcaaggtcgataacccacggcttaaacccttcatccataattcatatagatctatagtattatcttcaagttgtaaccgttaaattacaccgcttgttctactaactcaggatcaagatccatcaaatctgcatctaattttggtatcgatctattaatagtactatatgtatattttctcgacataattaacttatgataccaatacttgtttaaattattaaagttccggccaaatacttatttatttaccatcttggaagaagcattaatgtgaaagaaataacacttcaacatgaacagaacaaacatctgtttaatccctaattgcaaatacaaattgcatgactttcctacactgcaagatctttctccttaaaatcaagaaaatagccaaacatctccaagaatttgcaagaacagtggacgatgttaaaatttgtaaaatacgtgcgggtagggtcgtgtaaactttcttcttttttattcacacttcacgtgttgtgtgtggaactatgttcacattagtttaacagctcgacacaaccatattcatacaaagtcttgataatattgattgcgttcgagccagaaccttcaaaactccattaaaaaaaacaaaaaaaatatatttgaaggaacaagaaaatttattgctcagcacagaaggttagggagatcattaagagtccattacaaaatttggaggctgaaacattaatattcttgactcgtacggattctctcatgttcatacacataaactagttatgtttttgtctttgtcaacaacctcaattaatatttagcagttgatggttggagaggaactttttatttactctttttatcttctgccttttaaagactacttgtttctcttcttcttctttattgcttatagcttctgagcatca

SEQ ID NO: 12780 - DNA, 3000 bp, Unknown
  misc_feature (1)..( 3000): cDNA_ID_3026439_gDNA_ID_2214571_Annot_ID_186189 3000 nt of promoter + ATG
tgtaataaaaaaagaagaagaagaaattgttataattttaatacaaacatatataatatataaagtagagttttcaaagttgttaactcatatgattgatgagatatcgacatgtattaaatctaattttgttaatatataaaaaatcttctaaccctatcgggaaaataaaatatatacataaatcacaaaaattatttatataatcaaaaaatttaattatattttatataataaaataattcatattattagcgaatttgttttttttaaaggaccgttcaaatatgtttttttgtgtattttgtcgaaatttttgttatttttctttttattttgttaaaataactctaaaatatagatttcaaacaacacataaaatagtgagatgcatagataaaggttataatgggaaaactcaatagtatcaaagataaatgagaattaattatagtcatgtttgtgtaaaaaatttaggacaagttactaatatttaaagtttaagcctagttatttagtaaacaacaaaaataacttacgttatctaacgatatttttggagaatagatagattgaaataagagttagaacactaaatattgaaaacgtgtgtgggttactatttaaaatttaaatatcataaagaattaaaacacgaagatgaaatatgtagaaatattttttcagctcttatccattaaaatgaaatatatagaattaaaattcagtatattttcatgaaatatatagttaaattattgcaaaatagaatggataaaattaaattttggttttaaaatatttagataaaatgaaaaagtgtacattgctattagaattcaattattatttgaaaaattatatatgttttttatattcgcctatttaaacggggtttatctaatatatatatatatatatatatatatatatatatatatatatatatatatgatcttataaagaaataattaaaagatagagaggaatggacgagaaagcaacatgacagttctctcttattaactttcactcctcttcttcttattaatactgagatccaccagaaaagggttattgctattgattgatgaagatgatccattgctttacgagtacgattataacttctaagcttttttatatggtttcccatagatattcttagctttaactgaccaaggtagttatatgttgtagtcggaatagccattaatatctcaggtgcatcgcagcactgtaaacgccttgcaagcctggacaggtggacagtcatggtctagaagaagatcatgttcatagcttttttggagactttggcttttatagaaatcaaggaataagaaagtattttaaagtatagaggctttaggtattttaagtcatgctagaagtgaacaattggcatgggaggctgctcaattgaatcttgtaggagagataaaggaaagagaagtacttccaatgttttctccaataattttgtgccagacgagttgtttttaggaagatgcaaaagtagtacttttaaggcaaaatgtcacaggaggaggagtctctcaccgattcacttggaaatggaagccttattatatgagccatgaataataatatcctatcaagacggataaattatcagctttttgaaatacattgtgtagaacttgtcttaatagtggaattccttgagaattaaaccattttctctaatcttttcgatgaatttgcttcgagttaagttttttatttattttcaaagctaattatttctcgttcttgtaacttcaagttgattgtttagccaagacctcataaacctttactttcagaagtttcttatgtacacactctttctcctaattggattaccaatcaaaaagtgaatttttaactagtacaagattgaaaaaagaaacatttatataatatccgtttagattgaaagaatttttcttttgttaatctttatctcttttttatatttcgatataagccgtttctcggaaaattaaaaattctaagccgtttatatggccataagtaatgaggcagctctaagcccgaaatagccggtggccacacatattcacttgggacttggcccttttaaaacacctaatttcatgccttttcccgctaaacttgccactttctcctaaccaactcatttcttcatataaaaccaacaacatcacacaaaaagagccctcatttattcacctttcttttcccttaaatataatctttataaaaaaaattaaaaattaaaaaaaggaagtaaattgaaaaaacaaaattggtcccctgtcttcttttgttcactggacccttttcttggcttcgctaaatcatactatctctatcttctcaccgacactttcttcttctttgatcatatcatatttatcttcactacaaaaaaaacaagtaaaataaagccaatcttcttaaatatctccagaagatctatcagcatttacgtattcaggtcctccaatgtaagtttcttttttactttcttattctatttgtgtcaatctggtttcattagtcgtggcagctgggcaggtacaaatgctgatggcacatggcatcaaaactatcaatttatttatgtcctaaagacaaaatttaatgataaaatacaaaggatttaggtgatactatgttgtctcttaatgctcatcgtgtatctcttaaaaatccaaaatcttcttattttccttatatttaattaaatgtgtcttgaattttcaagtgtgtctctctctcaatactctggagtttttgtttgtttgtatctgatagttgttacaacatcaattttctgattattctatctttcaacttccctataaaataattatttagagaacaacataaagtttgtattttaaaaatatttaatagccattgattacttttgtaattgcgttttctattagttcttctcacaaagaaaaaggaagaaaaaaaagaagttgtgagagcaaaaaaaaa

SEQ ID NO: 12781 - DNA, 3000 bp, Unknown
  misc_feature (1)..( 3000): cDNA_ID_2709607_gDNA_ID_2214571_Annot_ID_186187 3000 nt of promoter + ATG
aaaatttcgacaaaatacacaaaaaaacatatttgaacggtcctttaaaaaaaacaaattcgctaataatatgaattattttattatataaaatataattaaattttttgattatataaataatttttgtgatttatgtatatattttattttcccgatagggttagaagattttttatatattaacaaaattagatttaatacatgtcgatatctcatcaatcatatgagttaacaactttgaaaactctactttatatattatatatgtttgtattaaaattataacaatttcttcttcttctttttttattacaaataagaccaaaccaaaataaaaaggaaaaaaagaggaattgtgagctttaaaacaaggcatacttctgggtccagcttcgagccatggcttcatatttggtcttgtcagttttgtatatgtgagctatctctggcaccagagggtcgtcagggtttggatctgttagaagagagcatatagagagaagcacctataataccaaaatgttagtaatttgtgttacctattggagcttcttggttatataccaaatctgatatatggaattatagaaaatattgacaaataactaaatacatatatagaatttcaaaccttagaaatggtaagggcagggctccattggtctttgagaatgtccaaacatatgtttccattactgttgatgtttgggtgaaacactttggttctgaatacaacctgattttatcaaacaaacataacaacaagagtaaagaagaagaaaaagattgaaaataaagatcaaaacttaaggttccaaaagatcataaacgatccaatatttaatgttggttttgtgccttttggttattggatttaagaagtagattaaaaaacaaaaaaattgttgagaaagttgttaccttgggaggtttaaaaggataatcaggagggaaatgaatattgacaaggaaaacacctccggagtaaggactttcattcggacccattatagtagcttgccagtggaacatatcttctcctgttggacctaaaaatcccaaaccaaggagaaaggaaatatcaaaatctttagaaaaaatttctgatacatggcttatattgtattaagaacaaattgtgatcctttacctgcactgcatgatacaggagggtctctttgcaactccttcaattctttcaatatccgtctcgttgccatcaggttgctgagtgtttgatataatggaaagtagcactacaaagaagtatgtgaaaaaaaatatgagtggtttgtgaagagaaggagaatgagagttgtgtttttaaagcgtgaaccgtaagcaaagatttgtgattctcttgcaaacaggaatgcttgcactattgcatttatcattgtttaagtaaagatttaccattgtaaagtctctttttagccgcccgctttgcccataaaggtaatggagaaagatccattcttttgttctgattctgaaagagagacgtgccttgaagtggatggtcttacgtacatgcttactgtaatataccatatctattgaacggtctataatgggatttgataaagtctgagaatcagaataacttaacataaagaatggttattacaatatcctttgttcttaatcttattgtccacgttcactggaccagcaaagtgatgggtgatgagcatcatgttcaacaaatataatcataaatcataacatacatttgatgaggtaaaatagttattgaaaacttataggacccatttcaaaagtttcttaagattataggcccatgtatcattaggaaaaaaaattataggccctatttacatactttaaaattttacaataaaaaatttacaaatcagagtggcgtcgagtgaggaacactccacaaatcagtgatgcatatattatttccttattttaaagatttatatcacaacatatcgtagagatcgtcattgatcaacctatatatgtaaatgtaaatcattgcctttcaatctaagtataaccttcaagcctctgtttatttcagacttattaggtcttttgaatattgctataagaagaaactccacagctgttagtccaaagttaatgtacatgcatgctacgtgatttgcccaaccgatattttatgatggtgattacgggaggaaaataattctcaacaatagttggtctcgattttttaaaagacgattaattgattacttaaaaaaatagccattttttttgtaacaaatgttgtttgctttgctttcaatcttcaaccacacggtcaacacatttatgtattttacgtaaaagaagcataccaaagcttttacaatttttgccgttatgatatttaaagttagaaataagctaaaggtttaaacgatgataatccaaattacagcaaaaaaatttactcaacttgtagacaaagaataataactagataacaggttacacaaatttttgttagatctctcatggatttaatccacatttccacaattaaagaagaaccaaaagtggtgtttataatgaacataataaaataaaataaaatcattggtttcgtatgaaccatttttttttggtgtaatacgcaccttctcaacataagcattggctcacatttctttttggtggtgattgagagaagtcattgtgtgtatacccgccaaattaggctcttcaaccaaaaaccttaaaattagaaaattcaacgaaaacaaaatgaaaggaggaaataaggaaataaaagggagagttattggaagttttatttacaaacaaaatgtggaatctcaaattgagaatacgtgaatttctctgaaaccttatgttctctgcgaaacattctcttatttcattttctttctctaaagtttttatttctctgacaaggaagatatccctttaggtggattcttgtttaaatttaaaaatcctcaagaagaagaagaagaagaagaagatagtcaaatg

SEQ ID NO: 12782 - DNA, 3000 bp, Unknown
  misc_feature (1)..( 3000): cDNA_ID_3026446_gDNA_ID_2214571_Annot_ID_186182 3000 nt of promoter + ATG
cttttacgggccaaatcaaaattataaatctattataataatttaagcattagtattttagtaataagtatatagtaatttttagtgatcaacaattaacaaaaattttttatgttcaagtctagttgttagtgatcctacaagttacatgtataataacgatgtataataaggaataacatgacaagtatcaaaatgagggaaataaccaaactagtatcaaaaaatattttgatacttgatacttgacttcgacttataagtaataaattaacccatttgttatccgacttacctatagttagtatttgaattttcaaggcaagtacggtcaagtaacgagtaattgcagagtaaagagtaattatgtgcaggcctagatattataggcccatgtttattactgttcaattgtggaccaatttcgtttgggctttttctccatgcatacacacattttgggattagttggatcgttgagggtatatttatttctcggccatcataaactggggcttgatttaggtttttaattctaatatgataaaatatgataatcatcccaaattcttttcaacacacaaaaagatatatatattttttgttctttttaacacacaaaagagataaatatcaagacagtttgtgaaaatttgaaaatcgatattgaattctttgcacacacaaaaaaacatagctagttcttttctctttgtgtgtcgccaattgtttttgttgttaataacaaattgtaactgtcccaaaaactaaagaaaaagtccctgaacgagtctcaatgtaagccgcaagtaaatggtcacccactggcctcactgctgtcactggcttgtacatgtaacctgtaggtaggtaagacatttttgtcaaaaaaaaacattctagaaaaaattgagtgacgtaaaaaaaattctattattatttcatttgtatctgtttatctgtttttatctagacatttttatctgtttttttcatttgtattttaaaaacattattatttcctcttcttggttttatttgagcattttttttaatagttaatctgtttctatttttttttttctttttttttgaatgaatgttaaattattttgttcttgttaaatagagaatattgtgtttgatagtgtatagactatagagtatccaaaaaaaaacagctggatatatttttgtcttcgtggttcgtaaaatatttgatcttaacagtaaaaataacttacctttttattttggcacatttgactcgttcaagcatattaagatttgattaggtgcggtgcaacatggttatttaaaaattagacgatacaattcgcgtaattgttaaatagacaaagcatgaagcataacgctgttcttatatagcttttgtaaagtagtggcttttggagaccatctaaggcgcacatgtagaacactacggtccttttcacgtcgtacacttactttttagcagccatatattctctatctctctgttaggattagtaagagcaaaccaatttgtacacttgttaagtgattttttttctttctatgttaagtgatttttaatagtaatatttactataacattttagttagtggatggcaaagttgtgtttactgaggcaaaaatgtgaacgcaataattactattaaagttatttaaatgtaatatgtttttaattctgtaattatataataatatgtactaatcaaaactattaaataataaagaatatctttaatttactaatatgatagtagctattttagtgagatatttagtgttgtggtttgaatgctgaccgaatcgcacagtgcggtgcgtttcaaatagtaacaaaattctttgcatatatatatatatatttgttattatttgaaccgcactgcattttatgcgcagttgaactgcacgtcttcattcggagcctaaaatggtgtggattttttaggagatgtccatagagtaaacaaacgattttgcaaatccctatgctctattctatcagtattgagcctcacaaactaatttttgaaaactattatcctctaattaaagttaaaaatgtaatcaaatgtgaatcatgtgataatagaaagaaaataggttaactgtaaaaggaaagaaaatacacaacattacaagacaccatgctgcttctttcctctgtcgtctctttcagccatttggatctatttgaagaaaaatgaggccatgagggacaacgtggacaatggacgtaccaacgggataaagtttcaaattcaaataatttgcgtcatattcaaaatgtgataagtaaattgtgataacctctcacgagaatcagattcatggttcaaaatatgaaagcagctgatctctattattgatgatatatcgtcttatcaatctatttatcttgttcgttttagttttaaaggttaatatcatgatttatctcatgtctttatcactttataattaattttattttatggataaccaagttagcaagttgcatgactttcgttaaccatagtatcaccaattattttcaatagaaacatagatcaaatctttatcagccacataaaagtcgtctaatcgttggtattcaccataactttttgtttcatttgaattatttagatgaagtaatcctacaccaaactaacctaaatgggtgaccaaacacactcacctactaaaaaattttctctgttctctctcttagtagctgaaatttctaatttcaaatcgccgtttgttcgccgtcccttttcagctgggcttaagaacttctccctctattgcactcttgttttggagcggagcctttgtcgaagatatttccgttttctgtcggagttctaaatcttttgagtttcaatcaagtcaagatctttgggttgtagttgcagctgtagttgtatcaattctctgtgaattgtgttgctgtgagtatcttctgaaagtgttttaaaggggttcttatcatgaatatg

SEQ ID NO: 12783 - DNA, 3000 bp, Unknown
  misc_feature (1)..( 3000): cDNA_ID_3026450_gDNA_ID_2214571_Annot_ID_186181 3000 nt of promoter + ATG
gaggatcctcctttgtttatttcgtatgttgcttatgcaactaatgaatcacggaatagacttagcctgattgcaaggcctcttaatcctagagctcaaaatcttaatgttgtggttgctgccttgccaagggtttggggtctgacatctagagttcacgggagagctggatctcttgtctgtgctacgaagggaaccctggctttacaatagttggtttgtcacggctcatcgttgggaggtaaactcggcttttgaatacttgtctaacattgagttgtgggttcaaatgcgtgggattcctctcctctatgtttgtgaagccacagtgacagagatagctcttggtttagggcaaattatatcattggattttcatgatgctactacaacccaaatagcttttattagagtgagaatccgatttgagatcactgatcgtataaggttcttccaaagaattacctttgattctggtgagactgcgctgataaggtttcaatatgaaagactaaggcgaatttgcagtagctgtttcaggctgactcatcataggaattactgcccttatcgacaacctgagcctcgttctatcattcgtggtcctaccaacaatctcactaggtctagaagagaaggagtgtgtacccgggatgaatatcatcgttcttccctgaactcccaatcacagatgtctgagaacgcctttccagcacctattgaacctcctccaagagtggcagctcctcctttgaatcctgatgaatttagggctgcttattttccagaaggcagagcaggttctttaccaaatataggaacattaaatcttaatcctccatctcgcaggcaagaggcgtcaagaaactctaatgtacaaccgtttacgggtcctgcatttggtgcaaatgttcctcgagtggttgaagtaggtgaatgttcatgacaaggagagtttggagcttcaaggactcaattggataagggagactcaataaaaaggaagaatatgggaagacctgggagtgatgaagaaggaagaactcatagagttgaggagcataaggaaggaggtattctgaaacctcctaagaagcgttaaacactctgcaaattctgtcattttttggcttttgttgctgctgaggatccttgttggcaacttaaacgtttgaataatagggactgcaatggtacaagtttgcaggtctaaggtttgcaaaagtagcagatggaagtagagccggtggaactctttttggttatgacttctcttatctgctgttgttgtttcagtttactcatcactttttgattttcggcatgatcaacattgtgttttgttagatcatgttttttcttgttatagtgtttgtcttcatcctgtaagtggaaggtcaactagtgtactttttgatgtatgttcttaatacaaggtatgttcttaatacaagaaagacaacacttagtgaaaaaaaaaaaaagtaatcatacacctaacatttcaagttcagccgcaaaacaacgtcacccacttgcgcactgcttttatttgtatgtaggtaagatatttccttacgtcactaattatcgttagacatattatttgtttctttttgtcatttccttcttacaaatattttctgtttcggtaatatctaaaaatttatcagcactttttccagttgatcatttattctctaataatatctaaaaatttagattaggcgtctggatttccaatttataaatttttaaatttcaaattcggatctatcttcaggattgagattaacaatttatgctttagatttcggcttaatagttttattttatttcatttaactttgtttaaattttcaaaaagaccttttaaatcgtaggatttagaattagaaattaatgttgttgaattcaacctttttccagagtttggataactagtccggatataaaatttaagttgtgtggttgaaaaactgtgtaactaaagaaactcatgagtacaaaagcagcccgatatattttccttttggtttataaaggtaaaatgaaatcacatttttatttcgacacatttgattcgaccggtgccatatatatcttagtggaacattagtgtctctaaggcttttggagacactaattaatggcttttggagacaatctaaagccacttatagattgcattcaaatcaaagggaataacaaaataatggtgcttcattagtttctacaatctaaagtcattgaagattctaggtgtttgattagtttttacacttatcaacagccaatttatatctcctctttccagataattaggaaaagcaaacgaagcttgtaaacttgttaagtgatcactttctgcccccgatcataataatattgtagtcctatatggaattagaatgtgagtgttagttttgattttttgagacattaatgcaatgaatgtagaaacgctttttgaaaacaagacaataatgcaatgaatgtttaggaacgctttttgaattaaaccacaaacaacacttgttaactttttttcctcttaaaattttaaacgtgtataacaaaacgtggttatagataaaaaaatgtacctagcaacttttcttagaaccttatagagttatgaacatttagagaagtgcattgcgtgagtttcttttaaaagcttctgttaacctgttggagttggagatttggtttaaaggtaaaccgggtttgctttagctacaaagttgcgtgaagaggaagttgccgttaaatcagcaatgtgtatcagattcattccataaaatctgcatcgttaatattgtttctatattttctgtaaatatacgatattgtgatagcatagagatcgtgttctctaaagactatatatgtacatgtaatcgttcataataaagatcagagaaactctgtttatttcatggtatcagagcttgagaaatcaattttgattttcttttgaaacgaagagtgacaatg

SEQ ID NO: 12784 - DNA, 3000 bp, Unknown; identical to SEQ ID NO: 12779
  misc_feature (1)..( 3000): cDNA_ID_1807882_gDNA_ID_2214571_Annot_ID_186178 3000 nt of promoter + ATG

SEQ ID NO: 12785 - DNA, 3000 bp, Unknown
  misc_feature (1)..( 3000): cDNA_ID_2709619_gDNA_ID_2214571_Annot_ID_135067 3000 nt of promoter + ATG
gacgaaaccgtggtccggtctccgggatattgaaaggatatgtcggtttaagcacagctatattcactgatctctgtactgctctgttctcaaacgatccggcgtcgtttttggttttactagccgtggtgccttttgccgtatgtctcacggcggttttcttcctccgtgagatcccaccagcatcttccgcagctgaggagaacgaagagactcgttactttaccatattcaacattgtggccgttgttgtcgccgtgtatcttcagtcttacgacatcattggaatcaaaactggagtgttctctgtcgctttcgcttctatacttctcttcctcttggcttctccaatagccattcctttccactccttcatcaagagcttgaactacggtgaacaagatgacttagaaggacggattcaagaaccgttgcttagatccgagatagcggcagcggagaaagaagtaatagttgtagctgcggtggcagcggaagaggaggagaagaagaggaagaaaccggttttgggagaagaccacactataatggaagcagtgttgaccgttgacttttgggtgctttttgtgtccttcttgtgtggtgtaggaactggtttagctgtgatgaacaatatgggtcagataggtcttgcccttggatacacaaatgtctcaatctttgtctccatgactagtatttggggattcttcggtcgcattctctccggtactctctccgaatactttctcaagtaagtactcctgctcctctcatctccatatgcattttatcttaccgttcacggtttgatccgctcctaaaggcaatgcccgtctctattttagaggtattttgctccaatattgtctctaaaatagactttactctaaaatagagaaaaaaatagaggaatctcattttcacttttatatatagagtcaaaagtgaaatttatttttttttcttctattttagagtaatacatcgaaacaaaatcaactcaatttcctttaaaatagagttgtctctaaaatagaagaaaaaatagagatatacattggagatgatttaagatgaaccaaaggtgttttagggactaataacagtaaaaacttcataagttatgcacagttttggccgtagtttactgttcaaaccatattactatgtgtcgttctgtacgatgctaacattgaaagtatcaattctcgttcttacattaactaccaacattcattgcagagctgtaacgtgacgtatatagtttttcatcctcatatatggacatacaaaattcaatgcgttctaaatttgtatatttcttcttccttaaatgatttttctcatattaagaaaagggatcttttagaattttctggttgattcatttaactagtttttgtactacatagacaattccaaatcaaatatcttgctcttttccttattttggaccacggtcttttctcttcacgtgcccacttaattttccaccaaaatttcccctttggattcttttgaaacttttacattctactgatttataaaaattcaatttaaaggttatgcaacatatatatcatatctcaatcaaccatgttgattttatactttactaaccaaagaatgtataattttcttctaatttttataggaaagctggaacaccaagaccactatggaatgcagcctctcaaatccttatggccgtaggatatatactaatggctttagccgtgcctaattcactctacatcggttcaatggtggttggagtatgttacggtgtccgtctagccataactgtaccaacagcttccgaactctttggtctcaaatactacggtctcatctacaacatcttagtacttaacttgccacttggctcgtttctcttctcgggtctcctcgctggcttcctctacgatgcagaggcaacaccaactcctggtgggggcaacacgtgcgtaggagctcattgctaccgtctcatcttcatagtcatggcattagcttctgttatcggagtcggtttggatcttgtgttggcttataggactaaggagatttacgctaagattcacgctagcaagaagtcaaagaaatctggtggtagccttagttaagacactgtatatctagttccggtgcactacattgttttcagatgctgattttgtatacatgatacaatatcggattcaagatattgttgaacaaaatttcaagtaccagagatcattgttgtagtagcatcgccaatgtatttttttgtctttccgagatttgttcaaaattatataaatgtatgacattttgatagtccaattccaattattttctaagattttatttagttacatatatatatactaagtggttaataatacacaatataatgcagaaaatcaccaatcttgtcacttttcagtcacttgtgaattaatgggcaattaatagatgggaactcgaatatgaccataataagaatttttgtggaaaattaagtgggatcaacaatgggatcactcgagaaccagctcacttacaagtgaatcgaaaactgaaccaagattacgctaaaccgggatcgacaattgaaaacccggttcaccttttaaatctattctgctcagtgagtagccgccgccgtggtctttgtcgaattcgtggtctctcctccacgcatcgacgttacgccaccatctaatctctttaaacctccgtcagctggtttatctcgccggcctcgtttacttcaaacaaggtaaggtctttcatctttgttaaggttttaggaactgaaactgttattggttttgaattggaatgaatactcaggagaactagaatagttagccaatccatagcaactctataatttgtatgtttctgttcacttttcaagaaaaagttcataatttttttgattcagggtttagggtttcatctaccactttctaccaatgcaaagcttgtaactttgaggtatacatg

SEQ ID NO: 12786 - DNA, 3000 bp, Unknown
  misc_feature (1)..( 3000): cDNA_ID_2712546_gDNA_ID_2214571_Annot_ID_135068 3000 nt of promoter + ATG
atgataatgtgctgtgacagtaagtccgctatctatatcgctacgaatcccgtatttcatgaacgcacaaagcacattgagatcgattatcactttgtgcgtgatgagtttgttaaaggtgtaatcactcctcgacatgttggcacaacgtctcaactcgcagacatcttcacaaagcccttaggacgtgattgtttctcagcattcaggatcaagttaggcatacgaaatttgtatgctccaacttgagggggggtgttggagttggagatttcgtttaaaggtaaaccgggtttggtttagctacaaagttacgtgaagaggaagttggcgttaaatcagcaatatgtatcagattcattccataaaatctgcatcgttaatattgtttttatattttctgtgaagatacgatattatgataacatagagatcctgttctctaaaaactatatatgtacatgtaatcgttcataataaagatcagagaaactctgtttatttcataaacgatattattcatctattggtcctatgttttatgacttttgtggaggtttcattcggaaagcaaagtacgcacaataatacacccgctctctcagccgttggatcgtgttcatatcatttagtctgcggtggaggctgggaaagacagcctgtacaaagaacattgccagtaccaaagagataatgttccaaagttcaaatttctgtctttttcgaatgtgataagcaaaatgtgataacctctcccgcaaatcagatcgatagctcaaaaaatatctattattgatgtaagatagagactcgtctttatcaatatatttcttctttgtccccaccgttttaaattatacaatttgcaagttgcgtgactttcaccctacatgttctcatattcctcatatttacgtcaccataagtttttgccctaccgcatttatatcaatttcttaaccgtaatgggccatttcaaattactattctaatttggaagttttcaaaaagttatttttactcaaaataaaattattctaagtatattacaaatttttcaataaaataaattcgttatcacatactggaaatataatactcaggctacaacgtgataacgaatttattttattgataatggaaacagaacatggtttcttacgattatcttaacaaagtcttaattatctgacaaggtagctgtaaacgattccacgccgtacattaaataatctctttctcttataagatctgttgagcacgatggcttcgacgtgaatatagacaaaagtggccacatatattttaccaagataaagtaagttgaatatgggtattttaactttaaattatttatcatttataattttataatgatatattacacgttttctatatattttcgtaatgaagtctacgttatgattgagtgttgctttgaaagtttaatttatacagtttatggcagagtttaataaggttcctttaatcatcaagtctctctcagattcgttaatttttgtaaaagagtaaggactagaattcggaaagtgtgaatgcatagacaaatagaagagtttttcttatcgcacaaaatgttatctaggattcccgaaatcacggatgttgctattggccatcccaattagttacatactatataggttctttgttgatgagagagagtctcccctcatgtgtaactcttattggctctcccttgtcccttgctttggttttcttggtagatatggacatatggttaatttcatcttaacactaatccatgtccttttttcaaggttggtttgtaatgttcctttataagtataaatatacaatctccagacaaaaaaaaaaagagttcaaggttggtttgttacgcgagttttgacttccacaatctcgtttgataacatatccatgattttatggtattcggacgattttttattttagtatagacaagaattgtgacggtcgaaattcgatgttacaaggatgtaagctgtttgaattctttttagtgttatttgaaataaaactcaaagattaaaacaatattattttgagtaaaacactaaaacttaatatataatttttttaatttaaaaaataaaatgtcaagtttgaaatatatttgattaaaaaggatcaaaacaaacaaaaaccctcataggtcttcaatgaaattcgtattttagggtagccacaaaaaagttgggaacttagcttgcatctaattaatctgatttaaaaatatatatttgattaaactgtttctttttaaatatgatacgaaaatattatgtgtaaattaataacgatattatttcagtgaaaaaaagttaagttatacataatttgaattgaaattaagtacttgaatcatgtcaggtacgaccgtacgagtatccaaaaccctaattttttttttctccaaaccccaattttagtacccaaacatccaattcgtatgattgctaaaaaaaaaaaaaacacacatgcattcgtatcagctagtaaattacacgatctctctgtatctaaatttttccggatactaaaaaattgcagaattgatcggaattaagtaatactagatctaaccgtatataccagaagatgcatcaattcccaagttggccacatacaattatttcaaacgaccggaacaaaaaaaagaaaaagaccaaaccattagcacgtcgtattttaatattcttttgtcataatacatacacggtttatactttatacatacacctactttaacccgtacatgtcggcgtcgtacctttcctggtctcattccacatcttataattaaaatatacaacttgctaattgttactaattgttcacaaaaatgtcaaaacctaattaataaaacaaaacacgcaaagcataaaaaccctttaccttttctcttctataaaaccgtccatacggacaagctccacgacccacacacactttctcatcttctttctacaaatg

SEQ ID NO: 12787 - DNA, 3000 bp, Unknown; identical to SEQ ID NO: 12783
  misc_feature (1)..( 3000): cDNA_ID_2709615_gDNA_ID_2214571_Annot_ID_135069 3000 nt of promoter + ATG

SEQ ID NO: 12788 - DNA, 3000 bp, Unknown; identical to SEQ ID NO: 12781
  misc_feature (1)..( 3000): cDNA_ID_2709607_gDNA_ID_2214571_Annot_ID_135075 3000 nt of promoter + ATG

SEQ ID NO: 12789 - DNA, 3000 bp, Unknown
  misc_feature (1)..( 3000): cDNA_ID_2709603_gDNA_ID_2214571_Annot_ID_135077 3000 nt of promoter + ATG
taaaatatttagataaaatgaaaaagtgtacattgctattagaattcaattattatttgaaaaattatatatgttttttatattcgcctatttaaacggggtttatctaatatatatatatatatatatatatatatatatatatatatatatatatatgatcttataaagaaataattaaaagatagagaggaatggacgagaaagcaacatgacagttctctcttattaactttcactcctcttcttcttattaatactgagatccaccagaaaagggttattgctattgattgatgaagatgatccattgctttacgagtacgattataacttctaagcttttttatatggtttcccatagatattcttagctttaactgaccaaggtagttatatgttgtagtcggaatagccattaatatctcaggtgcatcgcagcactgtaaacgccttgcaagcctggacaggtggacagtcatggtctagaagaagatcatgttcatagcttttttggagactttggcttttatagaaatcaaggaataagaaagtattttaaagtatagaggctttaggtattttaagtcatgctagaagtgaacaattggcatgggaggctgctcaattgaatcttgtaggagagataaaggaaagagaagtacttccaatgttttctccaataattttgtgccagacgagttgtttttaggaagatgcaaaagtagtacttttaaggcaaaatgtcacaggaggaggagtctctcaccgattcacttggaaatggaagccttattatatgagccatgaataataatatcctatcaagacggataaattatcagctttttgaaatacattgtgtagaacttgtcttaatagtggaattccttgagaattaaaccattttctctaatcttttcgatgaatttgcttcgagttaagttttttatttattttcaaagctaattatttctcgttcttgtaacttcaagttgattgtttagccaagacctcataaacctttactttcagaagtttcttatgtacacactctttctcctaattggattaccaatcaaaaagtgaatttttaactagtacaagattgaaaaaagaaacatttatataatatccgtttagattgaaagaatttttcttttgttaatctttatctcttttttatatttcgatataagccgtttctcggaaaattaaaaattctaagccgtttatatggccataagtaatgaggcagctctaagcccgaaatagccggtggccacacatattcacttgggacttggcccttttaaaacacctaatttcatgccttttcccgctaaacttgccactttctcctaaccaactcatttcttcatataaaaccaacaacatcacacaaaaagagccctcatttattcacctttcttttcccttaaatataatctttataaaaaaaattaaaaattaaaaaaaggaagtaaattgaaaaaacaaaattggtcccctgtcttcttttgttcactggacccttttcttggcttcgctaaatcatactatctctatcttctcaccgacactttcttcttctttgatcatatcatatttatcttcactacaaaaaaaacaagtaaaataaagccaatcttcttaaatatctccagaagatctatcagcatttacgtattcaggtcctccaatgtaagtttcttttttactttcttattctatttgtgtcaatctggtttcattagtcgtggcagctgggcaggtacaaatgctgatggcacatggcatcaaaactatcaatttatttatgtcctaaagacaaaatttaatgataaaatacaaaggatttaggtgatactatgttgtctcttaatgctcatcgtgtatctcttaaaaatccaaaatcttcttattttccttatatttaattaaatgtgtcttgaattttcaagtgtgtctctctctcaatactctggagtttttgtttgtttgtatctgatagttgttacaacatcaattttctgattattctatctttcaacttccctataaaataattatttagagaacaacataaagtttgtattttaaaaatatttaatagccattgattacttttgtaattgcgttttctattagttcttctcacaaagaaaaaggaagaaaaaaaagaagttgtgagagcaaaaaaaaaatggcagtggataaagtgattgtgaagcagaggaacattatattggttggaattccaattgatgaaagtggcgtagaggttttaaaatgggcacttgaagaagttgcaaaacatggagattgtgttgttgttgtccatgtttgttttacttattgtaagctcttcttcttctccttcttgttttgttcttttgaagttactaaattttgatttatggatcttatttttgagttatgattgatacagaccgtgccttgaaaagcaagtcatcgctggatcggtacttaaaaccatacattgaattctgctcaacaaagaaggtatctttcgatctttttgccgcgtcgaaagacacacttttttagcaatgtgtaacagagaatatttggtttttgagaacagattgagctcaaaggagaagtgttaaagggaaattcagttctaggggttttagttaaagaagcaaagagatacaacgccatgtcagttgttgttggagttaaacaacaaagtaaattaaggtgagatcacaaaatctttaagcagagacttatataattttcttgataatctcttactgattttagatattttttcattagtctaaaaatagctaaaggctgcgcaaaagagcttccttcaaccaccgatattttggccatccacagagggaatatagtctttagacgttccaaccattaccaactacctcttggttcgttggttctctttacaaccataatctttgaatctatatatataacattcttcaaactcgaacctgttgaccagaa

SEQ ID NO: 12790 - DNA, 3000 bp, Unknown
  misc_feature (1)..( 3000): cDNA_ID_1028623_gDNA_ID_2214572_Annot_ID_135089 3000 nt of promoter + ATG
attattatgtacacggttgcatgggttttcgggactattggattttgctttcttttggataacaaaaacacgataaatatttcattaaaccatacaaatcttcgattgataaatacatatacgaaaacatacctaaggaaaaggaatccattgttgtaggatttaggtaccatgcggttttccaaaccatagagtaatctcatatgtattgaaatttaaaaaaaaaaaaatacaaagaagaactaaaaaacagaaaaaaaaaactaagaaaatagggaaattaagttggagtctctttaatttgttttttttttgtcatctagagttattttaatgttaccatgatgaaatacttgataaaatacaacattaaaccgaaagaaaacgagattttttcgaagtttaagccctaagtaaaaaagtcataaataatactacaaagcaagaggaaaaaagcaatagtagttgaaatcccaccaaaactataagtcgcatagttcttgaagattatttgaaagaaaagtatcgcggatgcccaccaccaaccaacgatacacaagtcctcctattgagatgaacaacaaccttcagatttcagaatttttaagctttataacctgataaccactgcccaaactttctttcgtatgtggtgatgtcataaatcgacaagaaacaataaacattaagattatgtgccttcattggatcatggactgaaaattaagctcttcgatcaactaaaacaaatttatcatcattgttttcatactcgctgctaagtttgcaggggagtattagagtccacaactaaaacaagtccaaacccaatgtgaggtctacataagtagaattttaacaagttagaagattcatataaacaattatgtaatgagaactatgattgtaactttgagagaactctcttccttcatcttatgaaatatcaaatctagaaacattggcttttggtgacaaaccttaagctcctttacatttttctcttctttacatttcaataaagctcactagaactattgcatttctatctttatataataagctcaatgaacatcaatctatatttgtcttaaaaatgtcaaataaatagaagtttcatgaaaggaccagacctcgatcaagtctgagaagcatagacaaggagtgaagatttagtctcgataacaccattcttaagagacgaaaaaaggtaaaagatcgaatcgcatagaatcaaagaaatcttcacatattcagaggaaaaacagcatgtctagcgaacactagagtcgaacaaaagcaaaccaccaatcacacatccttatttgtcaattatttattttggaaactaaaaagaaagttaatgagtaaaatagtttccataagaagaaaaaaaatgttttctgaggaaagaaaatgttttcgaaggacagcaaagtttaagccaataagcaaaacaaaagctgatgcttgtcgcgactgtgttcgtcaagaatctccaggacgaacccaatcttctctctcgaagctgtctaaaattaatcaatcaatcattgagctaatcatattctaggttaagtaaaaacagagtaaaccctctctttttttctctttctctgcctttctcaatttcgtttcgtctccttcgttcttccaatttccgtctgattttatacgaaatttgcattgatatcgaagtaaaatcgaatacccatgattcaaaatttcattttttatgcgactgattcctcaattttgattttccggtgatttctagggttttctattaggtgggtgttatttatcatttgatgggtcatttactgatgattttgcaggtttttgttttaaggatttgtgtagactttcattgctgctacgtttttgaaagggtaatttgaagggcttagcttcccaaaggtgagaattttaactccagtttggcttctgatattgtgttcattgttatgtatttttaagcttagtagttgtgttttaaagttgttccagtttggttgataagtgtgtatgtgtgttcatcagattgggtgagtacagttctttcattgatatctccagttgatttgtgggaattttgttctgtgtgtataggatttagacctcaaatattggattctctttaagcatttaagtgcctggtttcttcatcatcacttgataggaggactttacaaattttattctgaacatggaatttggttagccgaataacttcgtggggattagtttctcgtgcaaggaaattcttcatggttctgtcttggaagtgtttggaatcttgaagcttgatagattttcgatgtaggcatgatgcggttttcttataggtttaaagggtctttagctgagatatggttcctatggtgtgtaataggtttaaagggtctttagatgagataaaactgtgcaaagagttcatataataaatggttaaatcctatatattatctgttcagtgtacatagagaagaattagctgtggaatttggatgtacatgataataacaatgtagtttatgtcttccaacttgtctctgttgtgataatgatcaatgtgtttctattctaactcctgtggtccattgatttttgaatcctttgtccaccttagtactttcttcgaagaaggcatgggaaaatatgattctctggtccaactttcttaagactgtctgcatctttggatccttagatttgtctacgggattatgaattatttgacttttgataccgattagacaaaagtcttacatttcacacaaataagagtttgcatcattgtagagaacaacattgttttcatttctgcttcagtgtttttgagttgaaatgtaaacacctctttctcttagattagtttgaatggcacttgagctggtgtgacctacattcattttgattgtttactttgcatgctattgcggtttagttatgattatattttgtttcaggcactaggtggcaatcttatccaagatg

SEQ ID NO: 12791 - DNA, 3000 bp, Unknown
  misc_feature (1)..( 3000): cDNA_ID_2703414_gDNA_ID_2214572_Annot_ID_135090 3000 nt of promoter + ATG
tggaaaaccgcatggtacctaaatcctacaacaatggattccttttccttaggtatgttttcgtatatgtatttatcaatcgaagatttgtatggtttaatgaaatatttatcgtgtttttgttatccaaaagaaagcaaaatccaatagtcccgaaaacccatgcaaccgtgtacataataatatatatatttaaaaatccatgtccaatctccaaaccattttaaaacaagagaaacaatagtttgaaaatatagaaaattgcgtgtgagtgtgtcataattcataaatgcaaagacaaatgtttgatctttgattgtaatttctgaaactcacggactttcctacctctttctgatcttcccgaccccatcaacacttttttgtatctctatcacacatataaaatcgtattttgattaataccattttccagccattttgcctctgtcctctcctacttactcttctctcttatgtttccagccatcactcacgagcccatttatgaactttaaccctaaaccagtgtatatctcctcccacttatatatccctcacattatcattccaaactctctcaaaaaaacaaaaataattacttcaaactaaaacccaatgttcaacacaagagttcatattgtcattatcactctaaaccttttattcttgtacgctggagggagactaataccactggagagtgttccaagctcgtcgatgatgcctttatcagtcgaagacacggtcaaattgaatccgaggaatcagatttttcatgggacacaagtaaagagttgtatgcctaaagggttccgaccaagatccgctccgagccggtttgtaaattatcagcctcttgtttccattaagtgttcctcatctaaagttacctcccggtccaagatatcgccttgattattttctcttctattttgagaatttaattatacaaataagactgatgtgttgattcttttggtgtctatatttatgaagacgtatgtaatgcaaaagtatgtgttattttctatgcttttttattcaaatttttagttttggataactcttctttattgcttttattcagggttgtttttgaccaatttctgactaaattcatggtcgaaaattggacagttttcttgtagtagaaaaacaagaaaatgttaagtttgttacctcaagttcctatgtagtgccgaatagatgataacgcagttatatagttcggattttatttttggttgaccaaaattttcggggttttggtacgtagatttttgaactacaaacaaaaacaggctaaatgaatcattttcccaccgccgagaaccaaactcctggtcttgagagactcttccttttgaagttacccactacaaaaatcaagctactagccttggataggtcgatatattcattttataggaaaaccaagaataccaaatgaagcattttcttatattttctgtctttgcatggtgaaacttgaaagaaagaaaaaaaaaagagagcagaagagtaaattgctaaatagagtggcaatggaggaggagtatcatggatcacgtgaacgatttcaaggaaaatgatcggaaagagggaaataattgcaaatttgtgtatgggccgttttacttcttcaagcccacttaaaacttgccaccaatttcaacaaaaccaaatagtgtttcccattcagatagtaaatagttactcaaataacgttaacatcgagaaaaaatgaaaaaaaatctgtaagccatttatcatacaaacaatatttttttcttattttaagtagctggtttcttcatgcttgattataaagataaccaaatatcactttctttttcttttcttttcaattaatatcattaaataaaaagaagaaaagctgatactaataccaaaaaagagcaagatatttcaaaattttgtattatatcgtttaaaatgtcagcaatttgtttgcataattaagaaaagcactaggccaaacctttgttcagatatctaaagcttaaacgaacaaaaaagcttaaagttgaagttagtattttttttctttaaattattttctatattgacattttttcacaagagtattgtgaaaataggcattgtttaaaatttctaatagaaataaaaacttttttacttcaactaagccccaaaataactttatatatccaaaggaaaaacttaactaaaaagaaaaaaatccaaaggaaaaatataatatctgcaaaaatgccatagtgccttcaaattttaagaaatcctattttcacaatactttctataaataattctttttatgcaaattaagtttatatttttatacaataatatgatttttttttcttaaaaggtaaaaaaaatggaattttgctcacttttatgtaattcgttaaagcatttggtttcagacaaaacaaaaaacaattcccaatccatttttttgtttctttatttgcggaacccaaagggtttggttagagagacgtcgtcacttgagagctctctcactcttgctaccaagaagagattctccagtctctgtgcgtctttctctgtggatcttacttcactcagatccaggtttgtctccttctctatcttgttctcatcataactcgaactgagtctcttctcctgcttagtcttcgtttagttgctgagaaaatctatgaacttgaagttactctgtttcagtgtctcaataatgcagaaactgaaaaaagttagggtttttatgatttatactaagttacttaattaggaatcacttctcactagtcactaaactgtaatttagtgagcttttggaaaaagtttagatttttaatagtgcttcactgattcctactatatatagtagtctcttcacttattggcctttttgttttggttgcattgattatggaatctaaacattttattgtaaaatttgtagtttctttggaacattttgtgttcttgaggtgtcaaagg

SEQ ID NO: 12792 - DNA, 3000 bp, Unknown
  misc_feature (1)..( 3000): cDNA_ID_3026480_gDNA_ID_2214572_Annot_ID_186231 3000 nt of promoter + ATG
gaacgtttctagaagttcagcaactttagctgatggtttggctatacttacagagataaccttattcctcgtcattgcatttgcggttgtgaggccgataatgttcaaaataataaagcggaaaggagaaggaagaccaatcgaagacaaatacatccacggggttctcgtcttggtttgcttatcttgtatgtattgggaagatcttagccagtttcctccacttggagccttctttcttggtctcgccattcccaatggacctcctattggatctgcattggtcgaacgattagaaagcttcaattttggtatcatattacctcttttcttaacagccgttatgctcaggactgataccactgcttggaaaggcgctttgacattctttagtggcgatgataagaaatttgcggttgcgtctctcgtcttgctcattttcttgttgaagctctctgtctcagtcattgttccttacctctataaaatgccgttgagagactctattatccttgccctaataatgtctcataagggtattatcgaactcagcttctaccttttctctctaagcctcaaggttagttttctcatattttgattcttgatcatgattatgatttcttgccaaaaacaaaaagttgaaaagattcattgttttgattcttttgattgatgatttggtacagttggtaaccaaagatacattctcaattctagtcttgtccattgtcctcaactctctgctcataccaatggcgatcgggtttctctacgacccatctaaacaattcatatgctaccaaaagagaaatttagcgagtatgaagaacatgggagagctaaagactcttgtgtgcatccatagaccagaccacatatcttccatgatcaaccttcttgaagcttcttatcaatccgaagacagtcctctcacttgctacgtccttcacctcgtcgagttacgaggtcaagacgttcccactttgatctcacacaaagttcagaaactcggagtcggggctggaaataaatattccgaaaatgtcatcctctcttttgaacatttccaccgttctgtctgcagttccatttccatagacacattcacttgcatcgcaaacgcaaaccatatgcaggatgacatttgttggctagctcttgataaagctgtcacgcttatcattcttccttttcaccggacttggtcacttgaccgaacatccatcgtatccgacgttgaggcgatccgatttctgaatgtcaacgtcttgaaacaagcaccttgctctgtcggcattcttatcgaacgccatctcgttaacaagaagcaagaaccacatgaaagccttaaggtatacttacaattacatctactatgcttccatgttggtcgttgtagatgctttaactatatatatagaaaaactaagcacactaagctatttgatgataggtgtgtgtaatattcgtgggaggaaaagacgatagggaagctttggcctttgcgaagcgaatggcccgtcaagagaacgtaacattaacagttctacgcctcctagcatcaggaaagagcaaagacgcgacaggatgggatcaaatgcttgacacggtggaactaagagagttgattaaaagcaacaatgccggaatggtaaaagaagaaacatcaacaatttatttggaacaagagatattggatggagcggatacgtcaatgcttctacgttccatggctttcgattacgatcttttcgtcgtgggaagaacatgcggcgagaaccacgaggcaaccaaaggtatagagaattggtgtgagtttgaggagcttggagtcattggtgatttcttggcctcgccggattttccgagtaaaacatcggtgttagtagtgcaacaacaacgaacggtagccaataataattagaagcggagaaagcatactatggttgtggttgttgttacatctatctctcctttgtgtagcatctacaaaaagaagtttgaaaagaagaaaaaaaatgtatgaccacattttatttgtttttttcattgctacttgtggaatattgttttttgtagagcagaaagaaagactttgaagaatgttttaatccttaaattttcctatccgaatagtctcctagggtgaataattataagaacgaaaaatagtttatttactagaataattgaaaatttcttattagttactagaaatagtttcatacttagtttactttttgaagctttcttacgaaaattagagttcgtaatcaaaaggatctagtggttgagggctcgctttgttagtcaaccttacagtttttggctatttttgatcacttttttgtccaaattccatttgcgaattgcgaccactgattttttttttttacactttcatataaggcaagtaacacgtctagtatgttaaataagcttttaaaactttttttaattgtttttttactaagaaaaacatcaatctcaaacatctaaaccctatgacggatccgaaagactgatcttggacacaagaaatgaaattacacacattcctatatattatatattgatcatcaattagaaatgattctctatttcttaatctatcttaacctaaatctgaatctcgatcattaaacaattaccgtacaattataaccaaaccgttatggtttactgatcaccaactgaaattacatcgccttgtatagatttgagtgtataaaaggagtttcactaattttaggataaacatcgaaatctatctgtcctaacccctatttaatcagttcaccaagaacacaagaaccgaaacacctgcaaagttgtttttatatagtcatgtattaaaggttaaatataggatatctttgttgtaccaaaactcttaaaacaccttttaaaatctaatattttttaactctcacaccatacaacattgttactatacatcctatggatcccttcaatgcgagttggtggaccaatatg
